(19) United States
(12) Patent Application Publication
(10) Pub. No.: US 2008/0286273 A1
(43) Pub. Date: Nov. 20, 2008

(54) Knowledge-Based Proliferation Signatures and Methods of Use

(75) Inventors: Maud H.W. Starmans, Heerlen (NL); Balaji Krishnapuram, King of Prussia, PA (US); Renaud G. Seigneuric, Crimolois (FR); Harald Steck, Phoenixville, PA (US); Dimitry S.A. Nuyten, Branford, CT (US); Francesca Meteora Buffa, London (GB); Adrian Lewellyn Harris, Oxford (GB); Bradly G. Wouters, Toronto (CA); Philippe Lambin, Genappe-Bousval (BE); R. Bharat Rao, Berwyn, PA (US); Sriram Krishnan, Exton, PA (US)

Correspondence Address: SIEMENS CORPORATION;INTELLECTUAL PROPERTY DEPARTMENT, 170 WOOD AVENUE SOUTH, ISELIN, NJ, 08830, US

(73) Assignee: Siemens Medical Solutions USA, Inc., Malvern, PA (US)

(21) Appl. No.: 12/113,481

(22) Filed: May 1, 2008

Related U.S. Application Data
(60) Provisional application No. 60/915,518, filed on May 2, 2007.

(51) Int. Cl. A61K 39/395; C12Q 1/68; A61P 35/00; A61K 33/24; C40B 40/08

(52) U.S. Cl. 424/133.1; 435/6; 506/17; 424/145.1; 424/649

(57) ABSTRACT

The present invention provides methods and compositions for predicting patient responses to cancer treatment using a proliferation gene signature. These methods can comprise measuring in a biological sample from a patient the levels of gene expression of a group of the genes designated herein. The present invention also provides for microarrays that can detect expression from a group of genes.

### CROSS-REFERENCE TO RELATED APPLICATION

[0001] The present patent document claims the benefit of the filing date under 35 U.S.C. §119(e) of Provisional U.S. Patent Application Ser. No. 60/915,518, filed May 2, 2007, which is hereby incorporated by reference.

### BACKGROUND

[0002] The ability to predict outcome and to identify key-players in biological mechanisms that lead to poor outcome, are two important objectives in cancer research. A great deal of research has been performed by means of gene expression profiling to identify gene sets (gene signatures) that can improve diagnosis and risk stratification (1). A drawback of most of the studies performed is that supervised analysis methods are utilized to acquire such signatures. Patient microarray and clinical data are directly used to find the genes that correlate with tumor type or survival. This results in gene sets with a very high prognostic value in the studied datasets. However, application in other patient datasets is limited and the overlap in selected genes of different comparable studies is small (2). If such a signature can be applied to other datasets it will be restricted to a certain patient population and cancer type. Besides, the gene sets obtained with this method are often difficult to interpret with respect to the underlying biological mechanism (3, 4). Further Dupuy et al. (5) showed in a recent review that many of these studies show flaws in methodology.

[0003] A few studies have started from another standpoint. Instead of focusing on a certain patient group, a biological process or specific environmental condition known to influence treatment response or patient outcome is taken as base. In vitro gene expression profiling is then used to identify gene sets that play an important role in these processes. This approach has a broader application because the gene sets can be used in almost every patient group. First, it can be used to investigate whether a certain process is important in a distinct cancer type or patient group. Second, it can be applied to select patients in those groups that would benefit from therapies directed to the biological process of interest (1). Examples of gene sets attained with this approach are the wound (6), hypoxia (7, 8) and “invasiveness” (IGS) (9) signatures. These studies show that the deduced signatures can be used for risk stratification in very different types of cancers (6, 7, 9, 10), presumably because of common core pathways. Recently Fan et al. (11) compared the performance of several supervised and unsupervised derived gene sets (12). Both types of signatures showed high concordance in prognostic power. Another benefit of unsupervised research is that it renders the option to identify the functional regulators in a signature that drive the studied process (13) and might reveal new targeting candidates. One of the processes studied with this method is proliferation. The rate of tumor cell proliferation is a major contributor to treatment response with both chemotherapy and radiotherapy (14). This is one of the reasons why treatment time (e.g. duration of radiotherapy) is thought to be very important (15). In a recent review Whitfield et al. (16) showed that proliferation may underlie the predictive power of many previously identified signatures. Whitfield et al. (16) showed that in almost every supervised derived signature a large subset of genes involved in proliferation is included (4, 17-20). In some cases, these classifiers have even been designated as ‘proliferation’ signatures although there derivation was not based on this phenotype. Two of these signatures have recently made it to the clinical setting as a diagnostic tool for patients with breast cancer (11, 21). Based on these results, it is hypothesized that derivation of a specific in vitro derived proliferation signature derived from gene expression data would provide more valuable information on tumor status, prognosis and prediction.

[0004] In view of the above, it is apparent that there exists a need for improved proliferation signatures.

### SUMMARY

[0005] In one aspect, the present invention provides for methods for predicting patient response to cancer treatment comprising measuring in a biological sample from a patient the levels of gene expression of a plurality of genes selected from the groups consisting of Group A, B, C, D, E, F, G, H, 1, J, and K, defined below: Group A: Genes corresponding to transcripts associated with the Unigene ID Nos. Hs.121025, Hs.126714, Hs.132966, Hs.141125, Hs.156346, Hs.184339, Hs.1973, Hs.270845, Hs.294088, Hs.300701, Hs.308045, Hs.334562, Hs.339665, Hs.369279, Hs.405925, Hs.418533, Hs.433615, Hs.434250, Hs.435570, Hs.436912, Hs.438550, Hs.446017, Hs.472716, Hs.477879, Hs.503749, Hs.522632, Hs.524571, Hs.532968, Hs.533059, Hs.535012, Hs.58992, Hs.591697, Hs.603315, Hs.613351, Hs.642598, Hs.656, Hs.75318, Hs.88523, Hs.89497, Hs.93002, Hs.615092, Hs.62180, Hs.532803, Hs.240, Hs.444028, Hs.58974, Hs.104019, Hs.1594, Hs.178695, Hs.183800, Hs.194698, Hs.20575, Hs.226755, Hs.234545, Hs.239, Hs.244580, Hs.250822, Hs.28465, Hs.368710, Hs.374378, Hs.386189, Hs.436187, Hs.469649, Hs.476306, Hs.482233, Hs.497741, Hs.506652, Hs.509008, Hs.514033, Hs.514527, Hs.592049, Hs.592116, Hs.593658, Hs.631699, Hs.631750, Hs.644048, Hs.72550, Hs.75066, Hs.77695, Hs.83758, Hs.152385, Hs.165607, Hs.203965, Hs.208912, Hs.226390, Hs.26516, Hs.35086, Hs.368563, Hs.403171, Hs.409065, Hs.434886, Hs.436341, Hs.444082, Hs.485640, Hs.498248, Hs.513126, Hs.5199, Hs.520943, Hs.534339, Hs.558393, Hs.567267, Hs.575032, Hs.591046, Hs.591322, Hs.592338, Hs.81892, Hs.83765, Hs.88663, Hs.99480, and Hs.484950; b. Group B: Genes corresponding to transcripts associated with the Unigene ID Nos. Hs.524571, Hs.226390, Hs.436187, Hs.472716, and Hs.194698; c. Group C: Genes corresponding to transcripts associated with the Unigene ID Nos. Hs.368563, Hs.444028, Hs.58992, Hs.575032, and Hs.591697; d. Group D: Genes corresponding to transcripts associated with the Unigene ID Nos. Hs.436187, Hs.194698, Hs.250822, Hs.93002, and Hs.308045; e. Group E: Genes corresponding to transcripts associated with the Unigene ID Nos. Hs.58992, Hs.522632, Hs.446017, Hs.240, and Hs.533059; f. Group F: Genes corresponding to transcripts associated with the Unigene ID Nos. Hs.58974, Hs.75318, Hs.506652, Hs.184339, and Hs.81892; g. Group G: Genes corresponding to transcripts associated with the Unigene ID Nos. Hs.524571, Hs.226390, Hs.436187, Hs.472716, Hs.194698, Hs.386189, Hs.409065, Hs.5199, Hs.434250, and Hs.93002; h. Group H: Genes corresponding to transcripts associated with the Unigene ID Nos. Hs.368563, Hs.444028, Hs.58992, Hs.575032, Hs.591697, Hs.631750, Hs.250822, Hs.77695, Hs.194698, and Hs.631699; i. Group 1: Genes corresponding to transcripts associated with the Unigene ID Nos. Hs.436187, Hs.194698, Hs.250822, Hs.93002, Hs.308045, Hs.444082, Hs.1594, Hs.184339, Hs.5199, and Hs.409065; j. Group J: Genes corresponding to transcripts associated with the Unigene ID Nos. Hs.58992, Hs.522632, Hs.446017, Hs.240, Hs.533059, Hs.513126, Hs.132966, Hs.532803, Hs.239, and Hs.58974; and k. Group K: Genes corresponding to transcripts associated with the Unigene ID Nos. Hs.58974, Hs.75318, Hs.506652, Hs.184339, Hs.81892, Hs.591322, Hs.156346, Hs.72550, Hs.374378, and Hs.77695; creating a signature score from said levels of gene expression; and correlating the signature score with a predicted response to cancer treatment.

[0006] In certain embodiments, the levels of gene expression are measured by determining the levels of expression of a group of polynucleotide sequences selected from the group consisting of: l. the sequences SEQ ID NOS: 1-110; m. the sequences SEQ ID NOS: 27, 85, 62, 23, and 51; n. the sequences SEQ ID NOS: 88, 45, 31, 102, and 32; o. the sequences SEQ ID NOS: 62, 51, 57, 40, and 11; p. the sequences SEQ ID NOS: 31, 26, 22, 44, and 29; q. the sequences SEQ ID NOS: 46, 37, 67, 6, and 106; r. the sequences SEQ ID NOS: 27, 85, 62, 23, 51, 61, 90, 97, 18, and 40; s. the sequences SEQ ID NOS: 88, 45, 31, 102, 32, 75, 57, 79, 51, and 74; t. the sequences SEQ ID NOS: 62, 51, 57, 40, 11, 93, 48, 6, 97, and 90; u. the sequences SEQ ID NOS: 31, 26, 22, 44, 29, 96, 3, 43, 55, and 46; and v. the sequences SEQ ID NOS: 46, 37, 67, 6, 106, 104, 5, 77, 60, and 79. In particular embodiments, the cancer is breast, renal, or lung cancer. In certain embodiments, the measuring of the levels of gene expression is carried out on RNA from said biological sample. The biological sample in particular embodiments is from a tumor, a cancerous tissue, a pre-cancerous tissue, a biopsy, a tissue, lymph node, a surgical excision, blood, serum, urine, an organ, or saliva. The treatment of the cancer may comprise radiotherapy, fractionated radiotherapy, chemotherapy, or chemo-radiotherapy in particular embodiments.

[0007] In a second aspect, the present invention provides for microarrays comprising: a solid substrate and a plurality of nucleic acid probes capable of detecting the levels of gene expression of a plurality of genes selected from the groups consisting of Group A, B, C, D, E, F, G, H, I, J, and K, defined below: a. Group A: Genes corresponding to transcripts associated with the Unigene ID Nos. Hs.121025, Hs.126714, Hs.132966, Hs.141125, Hs.156346, Hs.184339, Hs.1973, Hs.270845, Hs.294088, Hs.300701, Hs.308045, Hs.334562, Hs.339665, Hs.369279, Hs.405925, Hs.418533, Hs.433615, Hs.434250, Hs.435570, Hs.436912, Hs.438550, Hs.446017, Hs.472716, Hs.477879, Hs.503749, Hs.522632, Hs.524571, Hs.532968, Hs.533059, Hs.535012, Hs.58992, Hs.591697, Hs.603315, Hs.613351, Hs.642598, Hs.656, Hs.75318, Hs.88523, Hs.89497, Hs.93002, Hs.615092, Hs.62180, Hs.532803, Hs.240, Hs.444028, Hs.58974, Hs.104019, Hs.1594, Hs.178695, Hs.183800, Hs.194698, Hs.20575, Hs.226755, Hs.234545, Hs.239, Hs.244580, Hs.250822, Hs.28465, Hs.368710, Hs.374378, Hs.386189, Hs.436187, Hs.469649, Hs.476306, Hs.482233, Hs.497741, Hs.506652, Hs.509008, Hs.514033, Hs.514527, Hs.592049, Hs.592116, Hs.593658, Hs.631699, Hs.631750, Hs.644048, Hs.72550, Hs.75066, Hs.77695, Hs.83758, Hs.152385, Hs.165607, Hs.203965, Hs.208912, Hs.226390, Hs.26516, Hs.35086, Hs.368563, Hs.403171, Hs.409065, Hs.434886, Hs.436341, Hs.444082, Hs.485640, Hs.498248, Hs.513126, Hs.5199, Hs.520943, Hs.534339, Hs.558393, Hs.567267, Hs.575032, Hs.591046, Hs.591322, Hs.592338, Hs.81892, Hs.83765, Hs.88663, Hs.99480, and Hs.484950; b. Group B: Genes corresponding to transcripts associated with the Unigene ID Nos. Hs.524571, Hs.226390, Hs.436187, Hs.472716, and Hs.194698; c. Group C: Genes corresponding to transcripts associated with the Unigene ID Nos. Hs.368563, Hs.444028, Hs.58992, Hs.575032, and Hs.591697; d. Group D: Genes corresponding to transcripts associated with the Unigene ID Nos. Hs.436187, Hs.194698, Hs.250822, Hs.93002, and Hs.308045; e. Group E: Genes corresponding to transcripts associated with the Unigene ID Nos. Hs.58992, Hs.522632, Hs.446017, Hs.240, and Hs.533059; f. Group F: Genes corresponding to transcripts associated with the Unigene ID Nos. Hs.58974, Hs.75318, Hs.506652, Hs.184339, and Hs.81892; g. Group G: Genes corresponding to transcripts associated with the Unigene ID Nos. Hs.524571, Hs.226390, Hs.436187, Hs.472716, Hs.194698, Hs.386189, Hs.409065, Hs.5199, Hs.434250, and Hs.93002; h. Group H: Genes corresponding to transcripts associated with the Unigene ID Nos. Hs.368563, Hs.444028, Hs.58992, Hs.575032, Hs.591697, Hs.631750, Hs.250822, Hs.77695, Hs.194698, and Hs.631699; i. Group l: Genes corresponding to transcripts associated with the Unigene ID Nos. Hs.436187, Hs.194698, Hs.250822, Hs.93002, Hs.308045, Hs.444082, Hs.1594, Hs.184339, Hs.5199, and Hs.409065; j. Group J: Genes corresponding to transcripts associated with the Unigene ID Nos. Hs.58992, Hs.522632, Hs.446017, Hs.240, Hs.533059, Hs.513126, Hs.132966, Hs.532803, Hs.239, and Hs.58974; and k. Group K: Genes corresponding to transcripts associated with the Unigene ID Nos. Hs.58974, Hs.75318, Hs.506652, Hs.184339, Hs.81892, Hs.591322, Hs.156346, Hs.72550, Hs.374378, and Hs.77695. In particular embodiments, the microarray contains a plurality of nucleic acid probes are capable of detecting the expression of a group of sequences selected from the group consisting of: l. the sequences SEQ ID NOS: 1-110; m. the sequences SEQ ID NOS: 27, 85, 62, 23, and 51; n. the sequences SEQ ID NOS: 88, 45, 31, 102, and 32; o. the sequences SEQ ID NOS: 62, 51, 57, 40, and 11; p. the sequences SEQ ID NOS: 31, 26, 22, 44, and 29; q. the sequences SEQ ID NOS: 46, 37, 67, 6, and 106; r. the sequences SEQ ID NOS: 27, 85, 62, 23, 51, 61, 90, 97, 18, and 40; s. the sequences SEQ ID NOS: 88, 45, 31, 102, 32, 75, 57, 79, 51, and 74; t. the sequences SEQ ID NOS: 62, 51, 57, 40, 11, 93, 48, 6, 97, and 90; u. the sequences SEQ ID NOS: 31, 26, 22, 44, 29, 96, 3, 43, 55, and 46; and v. the sequences SEQ ID NOS: 46, 37, 67, 6, 106, 104, 5, 77, 60, and 79. In particular embodiments, the plurality of probes comprise DNA sequences. The plurality of probes are capable of hybridizing to the sequences of at least one of the groups (l)-(v) under the hybridization conditions of 6×SSC at 65° C., in certain embodiments. In certain embodiments, the plurality of probes each comprise from about 15 to 50 base pairs of DNA.

[0008] In a third aspect, the present invention provides for kits comprising a microarray comprising a plurality of nucleic acid probes capable of detecting the expression of a group of sequences selected from the group consisting of: groups (l)-(v) described above; and directions for use of the kit.

[0009] In a fourth aspect, the present invention provides for methods of treating cancer comprising measuring in a biological sample from a patient the levels of gene expression of a plurality of genes selected from the groups consisting of Group A, B, C, D, E, F, G, H, I, J, and K, defined below: a. Group A: Genes corresponding to transcripts associated with the Unigene ID Nos. Hs.121025, Hs.126714, Hs.132966, Hs.141125, Hs.156346, Hs.184339, Hs.1973, Hs.270845, Hs.294088, Hs.300701, Hs.308045, Hs.334562, Hs.339665, Hs.369279, Hs.405925, Hs.418533, Hs.433615, Hs.434250, Hs.435570, Hs.436912, Hs.438550, Hs.446017, Hs.472716, Hs.477879, Hs.503749, Hs.522632, Hs.524571, Hs.532968, Hs.533059, Hs.535012, Hs.58992, Hs.591697, Hs.603315, Hs.613351, Hs.642598, Hs.656, Hs.75318, Hs.88523, Hs.89497, Hs.93002, Hs.615092, Hs.62180, Hs.532803, Hs.240, Hs.444028, Hs.58974, Hs.104019, Hs.1594, Hs.178695, Hs.183800, Hs.194698, Hs.20575, Hs.226755, Hs.234545, Hs.239, Hs.244580, Hs.250822, Hs.28465, Hs.368710, Hs.374378, Hs.386189, Hs.436187, Hs.469649, Hs.476306, Hs.482233, Hs.497741, Hs.506652, Hs.509008, Hs.514033, Hs.514527, Hs.592049, Hs.592116, Hs.593658, Hs.631699, Hs.631750, Hs.644048, Hs.72550, Hs.75066, Hs.77695, Hs.83758, Hs.152385, Hs.165607, Hs.203965, Hs.208912, Hs.226390, Hs.26516, Hs.35086, Hs.368563, Hs.403171, Hs.409065, Hs.434886, Hs.436341, Hs.444082, Hs.485640, Hs.498248, Hs.513126, Hs.5199, Hs.520943, Hs.534339, Hs.558393, Hs.567267, Hs.575032, Hs.591046, Hs.591322, Hs.592338, Hs.81892, Hs.83765, Hs.88663, Hs.99480, and Hs.484950; b. Group B: Genes corresponding to transcripts associated with the Unigene ID Nos. Hs.524571, Hs.226390, Hs.436187, Hs.472716, and Hs.194698; c. Group C: Genes corresponding to transcripts associated with the Unigene ID Nos. Hs.368563, Hs.444028, Hs.58992, Hs.575032, and Hs.591697; d. Group D: Genes corresponding to transcripts associated with the Unigene ID Nos. Hs.436187, Hs.194698, Hs.250822, Hs.93002, and Hs.308045; e. Group E: Genes corresponding to transcripts associated with the Unigene ID Nos. Hs.58992, Hs.522632, Hs.446017, Hs.240, and Hs.533059; f. Group F: Genes corresponding to transcripts associated with the Unigene ID Nos. Hs.58974, Hs.75318, Hs.506652, Hs.184339, and Hs.81892; g. Group G: Genes corresponding to transcripts associated with the Unigene ID Nos. Hs.524571, Hs.226390, Hs.436187, Hs.472716, Hs.194698, Hs.386189, Hs.409065, Hs.5199, Hs.434250, and Hs.93002; h. Group H: Genes corresponding to transcripts associated with the Unigene ID Nos. Hs.368563, Hs.444028, Hs.58992, Hs.575032, Hs.591697, Hs.631750, Hs.250822, Hs.77695, Hs.194698, and Hs.631699; i. Group 1: Genes corresponding to transcripts associated with the Unigene ID Nos. Hs.436187, Hs.194698, Hs.250822, Hs.93002, Hs.308045, Hs.444082, Hs.1594, Hs.184339, Hs.5199, and Hs.409065; j. Group J: Genes corresponding to transcripts associated with the Unigene ID Nos. Hs.58992, Hs.522632, Hs.446017, Hs.240, Hs.533059, Hs.513126, Hs.132966, Hs.532803, Hs.239, and Hs.58974; and k. Group K: Genes corresponding to transcripts associated with the Unigene ID Nos. Hs.58974, Hs.75318, Hs.506652, Hs.184339, Hs.81892, Hs.591322, Hs.156346, Hs.72550, Hs.374378, and Hs.77695; and administering a therapeutically effective amount of one or more cancer treatment agents selected from the group consisting of: cancer chemotherapeutic agents and radiation; or performing surgery on the patient; or a combination thereof. In further embodiments, the levels of gene expression are measured by determining the levels of expression of a group of polynucleotide sequences selected from the group consisting of groups (l)-(v) described above. In certain embodiments, the one or more cancer treatment agents are selected from the group consisting of: paclitaxel, docetaxel, imatinib mesylate, sunitinib malate, cisplatin, etoposide, vinblastine, methotrexate, adriamycin, cyclophosphamide, doxorubicin, daunomycin, 5-fluoruracil, vincristine, endostatin, angiostatin, bevacizumab, and rituximab. In another embodiment, the one or more cancer treatment agents is radiation. In particular embodiments, the cancer being treated is breast, renal, or lung cancer. In certain embodiments, the methods of treatment comprise surgery.

[0010] Further objects, features and advantages of this invention will become readily apparent to persons skilled in the art after a review of the following description, with reference to the drawings and claims that are appended to and form a part of this specification.

### BRIEF DESCRIPTION OF THE DRAWINGS

[0011] FIG. 1 depicts Kaplan-Meier survival curves for proliferation signature (a) on various datasets (A: Miller dataset, B: Wang dataset, C: van de Vijver dataset, D: Zhao dataset, E: Beer dataset). A signature score was calculated for each patient in the different datasets. These scores were used to cluster the patients in two groups, one with low expression and one with high expression of the signature. Kaplan-Meier survival curves for the two groups were compared. Patients with tumors with a high proliferation signature score had worse outcomes than those with tumors with a low proliferation signature score. The Kaplan-Meier survival curve with the low signature score is represented by a solid line, and in each panel is the top curve. The Kaplan-Meier survival curve with the high signature score is represented by a dotted line, and in each panel is the lower curve;

[0012] FIG. 2 depicts ROC curves of model of clinical factors with and without proliferation signature (A: Miller dataset, B: van de Vijver dataset, C: Zhao dataset). A model of the clinical factors with and without the signature was generated. Receiver operator curves (ROC) were used to compare the two models in three datasets. Inclusion of the proliferation signature in the model increased the prediction performance in two datasets. The model with the proliferation signature is represented by a dotted line. The model without the proliferation signature is the solid line. The models with the proliferation signature in Panels A, B, and C have an AUC of 0.75, 0.76, and 0.87, respectively. The models with the proliferation signature in Panels A, B, and C have an AUC of 0.72, 0.73, and 0.88, respectively;

[0013] FIG. 3 depicts Kaplan-Meier curves for signature (b) run on the Miller data set (the top curve is the low signature score, the bottom curve is the high signature score);

[0014] FIG. 4 depicts Kaplan-Meier curves for signature (c) run on the Wang data set (the top curve is the low signature score, the bottom curve is the high signature score);

[0015] FIG. 5 depicts Kaplan-Meier curves for signature (d) run on the van de Vijver data set (the top curve is the low signature score, the bottom curve is the high signature score);

[0016] FIG. 6 depicts Kaplan-Meier curves for signature (e) run on the Zhao data set (the top curve is the low signature score, the bottom curve is the high signature score);

[0017] FIG. 7 depicts Kaplan-Meier curves for signature (f) run on the Beer data set (the top curve is the low signature score, the bottom curve is the high signature score);

[0018] FIG. 8 depicts Kaplan-Meier curves for signature (g) run on the Miller data set (the top curve is the low signature score, the bottom curve is the high signature score);

[0019] FIG. 9 depicts Kaplan-Meier curves for signature (h) run on the Wang data set (the top curve is the low signature score, the bottom curve is the high signature score);

[0020] FIG. 10 depicts Kaplan-Meier curves for signature (i) run on the van de Vijver data set (the top curve is the low signature score, the bottom curve is the high signature score);

[0021] FIG. 11 depicts Kaplan-Meier curves for signature (j) run on the Zhao data set (the top curve is the low signature score, the bottom curve is the high signature score); and

[0022] FIG. 12 depicts Kaplan-Meier curves for signature (k) run on the Beer data set (the top curve is the low signature score, the bottom curve is the high signature score).

### DETAILED DESCRIPTION

[0023] Tumor proliferation is one of the main biological phenotypes limiting cure in oncology. Extensive research, including microarray experiments, is being performed to unravel the key-players in this process. To exploit the potential of published gene expression data, creation of a signature for proliferation can provide valuable information on tumor status, prognosis and prediction. This will help individualizing treatment and should result in better tumor control, and more rapid and cost-effective research and development.

[0024] The present invention provides methods and compositions for predicting patient response to cancer treatment using gene signatures. The methods typically involve measuring in a biological sample from a patient the levels of gene expression of a group of the genes corresponding to transcripts associated with a particular groups of Unigene ID Nos. In particular embodiments, the Unigene ID Nos. are selected from groups (a)-(k) as set out above. One Unigene ID No. may have multiple transcripts associated with it. Examples of a DNA sequence associated with each Unigene ID No. of groups (a)-(k) may be found in Table 1 as SEQ ID NOS. 1-110:

TABLE 1
Proliferation Signature

| | | Cell | | | |
|---|---|---|---|---|---|
| SEQ | | cycle | | | |
| ID NO: | UnigeneID | phase | Weight | Symbol | Name |
| 1 | Hs.121025 | G2 | 1 | ZNHIT2 | Zinc finger, HIT type 2 |
| 2 | Hs.126714 | G2 | 1 | CIITA | Class II, major |
| | | | | | histocompatibility complex, |
| | | | | | transactivator |
| 3 | Hs.132966 | G2 | 1 | MET | Met proto-oncogene |
| | | | | | (hepatocyte growth factor |
| | | | | | receptor) |
| 4 | Hs.141125 | G2 | 1 | CASP3 | Caspase 3, apoptosis- |
| | | | | | related cysteine peptidase |
| 5 | Hs.156346 | G2 | 1 | TOP2A | Topoisomerase (DNA) II |
| | | | | | alpha 170 kDa |
| 6 | Hs.184339 | G2 | 1 | MELK | Maternal embryonic |
| | | | | | leucine zipper kinase |
| 7 | Hs.1973 | G2 | 1 | CCNF | Cyclin F |
| 8 | Hs.270845 | G2 | 1 | KIF23 | Kinesin family member 23 |
| 9 | Hs.294088 | G2 | 1 | MND1 | Meiotic nuclear divisions 1 |
| | | | | | homolog (S. cerevisiae) |
| 10 | Hs.300701 | G2 | 1 | TUBB2B | Tubulin, beta 2B |
| 11 | Hs.308045 | G2 | 1 | NCAPH | Non-SMC condensin I |
| | | | | | complex, subunit H |
| 12 | Hs.334562 | G2 | 1 | CDC2 | Cell division cycle 2, G1 to |
| | | | | | S and G2 to M |
| 13 | Hs.339665 | G2 | 1 | LOC653820 | Similar to family with |
| | | | | | sequence similarity 72, |
| | | | | | member A |
| 14 | Hs.369279 | G2 | 1 | NLRP2 | NLR family, pyrin domain |
| | | | | | containing 2 |
| 15 | Hs.405925 | G2 | 1 | PSRC1 | Proline/serine-rich coiled- |
| | | | | | coil 1 |
| 16 | Hs.418533 | G2 | 1 | BUB3 | BUB3 budding uninhibited |
| | | | | | by benzimidazoles 3 |
| | | | | | homolog (yeast) |
| 17 | Hs.433615 | G2 | 1 | TUBB2C | Tubulin, beta 2C |
| 18 | Hs.434250 | G2 | 1 | CKAP2L | Cytoskeleton associated |
| | | | | | protein 2-like |
| 19 | Hs.435570 | G2 | 1 | CDKL5 | Cyclin-dependent kinase- |
| | | | | | like 5 |
| 20 | Hs.436912 | G2 | 1 | KIFC1 | Kinesin family member C1 |
| 21 | Hs.438550 | G2 | 1 | NCAPD3 | Non-SMC condensin II |
| | | | | | complex, subunit D3 |
| 22 | Hs.446017 | G2 | 1 | WSB1 | WD repeat and SOCS box- |
| | | | | | containing 1 |
| 23 | Hs.472716 | G2 | 1 | FAM83D | Family with sequence |
| | | | | | similarity 83, member D |
| 24 | Hs.477879 | G2 | 1 | H2AFX | H2A histone family, |
| | | | | | member X |
| 25 | Hs.503749 | G2 | 1 | H2- | Alpha-tubulin isotype H2- |
| | | | | ALPHA | alpha |
| 26 | Hs.522632 | G2 | 1 | TIMP1 | TIMP metallopeptidase |
| | | | | | inhibitor 1 |
| 27 | Hs.524571 | G2 | 1 | CDCA8 | Cell division cycle |
| | | | | | associated 8 |
| 28 | Hs.532968 | G2 | 1 | DKFZp762E1312 | Hypothetical protein |
| | | | | | DKFZp762E1312 |
| 29 | Hs.533059 | G2 | 1 | TUBB | Tubulin, beta |
| 30 | Hs.535012 | G2 | 1 | LOC441052 | Hypothetical gene |
| | | | | | supported by AF131741 |
| 31 | Hs.58992 | G2 | 1 | SMC4 | Structural maintenance of |
| | | | | | chromosomes 4 |
| 32 | Hs.591697 | G2 | 1 | MAD2L1 | MAD2 mitotic arrest |
| | | | | | deficient-like 1 (yeast) |
| 33 | Hs.603315 | G2 | 1 | | Transcribed locus |
| 34 | Hs.613351 | G2 | 1 | KIF22 | Kinesin family member 22 |
| 35 | Hs.642598 | G2 | 1 | ZNF587 | Zinc finger protein 587 |
| 36 | Hs.656 | G2 | 1 | CDC25C | Cell division cycle 25 |
| | | | | | homolog C (S. pombe) |
| 37 | Hs.75318 | G2 | 1 | TUBA4A | Tubulin, alpha 1 |
| 38 | Hs.88523 | G2 | 1 | C13orf3 | Chromosome 13 open |
| | | | | | reading frame 3 |
| 39 | Hs.89497 | G2 | 1 | LMNB1 | Lamin B1 |
| 40 | Hs.93002 | G2 | 1 | UBE2C | Ubiquitin-conjugating |
| | | | | | enzyme E2C |
| 41 | Hs.615092 | G2 | 1 | NUSAP1 | Nucleolar and spindle |
| | | G2/M | | | associated protein 1 |
| 42 | Hs.62180 | G2 | 1 | ANLN | Anillin, actin binding protein |
| | | G2/M | | | |
| 43 | Hs.532803 | G2 | 1 | HN1 | Hematological and |
| | | G2/M | | | neurological expressed 1 |
| 44 | Hs.240 | G2 | 1 | MPHOSPH1 | M-phase phosphoprotein 1 |
| | | G2/M | | | |
| 45 | Hs.444028 | G2 | 1 | CKAP2 | Cytoskeleton associated |
| | | G2/M | | | protein 2 |
| 46 | Hs.58974 | G2 | 1 | CCNA2 | Cyclin A2 |
| | | G2/M | | | |
| 47 | Hs.104019 | G2/M | 1 | TACC3 | Transforming, acidic |
| | | | | | coiled-coil containing |
| | | | | | protein 3 |
| 48 | Hs.1594 | G2/M | 1 | CENPA | Centromere protein A |
| 49 | Hs.178695 | G2/M | 1 | MAPK13 | Mitogen-activated protein |
| | | | | | kinase 13 |
| 50 | Hs.183800 | G2/M | 1 | RANGAP1 | Ran GTPase activating |
| | | | | | protein 1 |
| 51 | Hs.194698 | G2/M | 1 | CCNB2 | Cyclin B2 |
| 52 | Hs.20575 | G2/M | 1 | GAS2L3 | Growth arrest-specific 2 |
| | | | | | like 3 |
| 53 | Hs.226755 | G2/M | 1 | YWHAH | Tyrosine 3- |
| | | | | | monooxygenase/tryptophan |
| | | | | | 5-monooxygenase |
| | | | | | activation protein, eta |
| | | | | | polypeptide |
| 54 | Hs.234545 | G2/M | 1 | NUF2 | NUF2, NDC80 kinetochore |
| | | | | | complex component, |
| | | | | | homolog (S. cerevisiae) |
| 55 | Hs.239 | G2/M | 1 | FOXM1 | Forkhead box M1 |
| 56 | Hs.244580 | G2/M | 1 | TPX2 | TPX2, microtubule- |
| | | | | | associated, homolog |
| | | | | | (Xenopus laevis) |
| 57 | Hs.250822 | G2/M | 1 | AURKA | Aurora kinase A |
| 58 | Hs.28465 | G2/M | 1 | RP11- | Similar to RIKEN cDNA |
| | | | | 11C5.2 | 2410129H14 |
| 59 | Hs.368710 | G2/M | 1 | CCDC99 | Coiled-coil domain |
| | | | | | containing 99 |
| 60 | Hs.374378 | G2/M | 1 | CKS1B | CDC28 protein kinase |
| | | | | | regulatory subunit 1B |
| 61 | Hs.386189 | G2/M | 1 | GTSE1 | G-2 and S-phase |
| | | | | | expressed 1 |
| 62 | Hs.436187 | G2/M | 1 | TRIP13 | Thyroid hormone receptor |
| | | | | | interactor 13 |
| 63 | Hs.469649 | G2/M | 1 | BUB1 | BUB1 budding uninhibited |
| | | | | | by benzimidazoles 1 |
| | | | | | homolog (yeast) |
| 64 | Hs.476306 | G2/M | 1 | WDR51A | WD repeat domain 51A |
| 65 | Hs.482233 | G2/M | 1 | DEPDC1B | DEP domain containing 1B |
| 66 | Hs.497741 | G2/M | 1 | CENPF | Centromere protein F, |
| | | | | | 350/400ka (mitosin) |
| 67 | Hs.506652 | G2/M | 1 | PWP1 | PWP1 homolog (S. cerevisiae) |
| 68 | Hs.509008 | G2/M | 1 | KIAA1333 | KIAA1333 |
| 69 | Hs.514033 | G2/M | 1 | SPAG5 | Sperm associated antigen 5 |
| 70 | Hs.514527 | G2/M | 1 | BIRC5 | Baculoviral IAP repeat- |
| | | | | | containing 5 (survivin) |
| 71 | Hs.592049 | G2/M | 1 | PLK1 | Polo-like kinase 1 |
| | | | | | (Drosophila) |
| 72 | Hs.592116 | G2/M | 1 | FAM64A | Family with sequence |
| | | | | | similarity 64, member A |
| 73 | Hs.593658 | G2/M | 1 | | Transcribed locus |
| 74 | Hs.631699 | G2/M | 1 | BUB1B | BUB1 budding uninhibited |
| | | | | | by benzimidazoles 1 |
| | | | | | homolog beta (yeast) |
| 75 | Hs.631750 | G2/M | 1 | PRR11 | Proline rich 11 |
| 76 | Hs.644048 | G2/M | 1 | | Transcribed locus |
| 77 | Hs.72550 | G2/M | 1 | HMMR | Hyaluronan-mediated |
| | | | | | motility receptor (RHAMM) |
| 78 | Hs.75066 | G2/M | 1 | TSN | Translin |
| 79 | Hs.77695 | G2/M | 1 | DLG7 | Discs, large homolog 7 |
| | | | | | (Drosophila) |
| 80 | Hs.83758 | G2/M | 1 | CKS2 | CDC28 protein kinase |
| | | | | | regulatory subunit 2 |
| 81 | Hs.152385 | S | 1 | KIAA1370 | KIAA1370 |
| | | phase | | | |
| 82 | Hs.165607 | S | 1 | FLJ25416 | Hypothetical protein |
| | | phase | | | FLJ25416 |
| 83 | Hs.203965 | S | 1 | PHTF2 | Putative homeodomain |
| | | phase | | | transcription factor 2 |
| 84 | Hs.208912 | S | 1 | CENPM | Centromere protein M |
| | | phase | | | |
| 85 | Hs.226390 | S | 1 | RRM2 | Ribonucleotide reductase |
| | | phase | | | M2 polypeptide |
| 86 | Hs.26516 | S | 1 | ASF1B | ASF1 anti-silencing |
| | | phase | | | function 1 homolog B (S. cerevisiae) |
| 87 | Hs.35086 | S | 1 | USP1 | Ubiquitin specific peptidase 1 |
| | | phase | | | |
| 88 | Hs.368563 | S | 1 | ABCC5 | ATP-binding cassette, sub- |
| | | phase | | | family C (CFTR/MRP), |
| | | | | | member 5 |
| 89 | Hs.403171 | S | 1 | EFHC1 | EF-hand domain (C- |
| | | phase | | | terminal) containing 1 |
| 90 | Hs.409065 | S | 1 | FEN1 | Flap structure-specific |
| | | phase | | | endonuclease 1 |
| 91 | Hs.434886 | S | 1 | CDCA5 | Cell division cycle |
| | | phase | | | associated 5 |
| 92 | Hs.436341 | S | 1 | DONSON | Downstream neighbor of |
| | | phase | | | SON |
| 93 | Hs.444082 | S | 1 | EZH2 | Enhancer of zeste homolog |
| | | phase | | | 2 (Drosophila) |
| 94 | Hs.485640 | S | 1 | PRIM2A | Primase, polypeptide 2A, |
| | | phase | | | 58 kDa |
| 95 | Hs.498248 | S | 1 | EXO1 | Exonuclease 1 |
| | | phase | | | |
| 96 | Hs.513126 | S | 1 | KIAA1794 | KIAA1794 |
| | | phase | | | |
| 97 | Hs.5199 | S | 1 | UBE2T | Ubiquitin-conjugating |
| | | phase | | | enzyme E2T (putative) |
| 98 | Hs.520943 | S | 1 | RFC2 | Replication factor C |
| | | phase | | | (activator 1) 2, 40 kDa |
| 99 | Hs.534339 | S | 1 | PRIM1 | Primase, polypeptide 1, |
| | | phase | | | 49 kDa |
| 100 | Hs.558393 | S | 1 | RRM1 | Ribonucleotide reductase |
| | | phase | | | M1 polypeptide |
| 101 | Hs.567267 | S | 1 | FANCA | Fanconi anemia, |
| | | phase | | | complementation group A |
| 102 | Hs.575032 | S | 1 | MLF1IP | MLF1 interacting protein |
| | | phase | | | |
| 103 | Hs.591046 | S | 1 | RAD51AP1 | RAD51 associated protein 1 |
| | | phase | | | |
| 104 | Hs.591322 | S | 1 | RFC4 | Replication factor C |
| | | phase | | | (activator 1) 4, 37 kDa |
| 105 | Hs.592338 | S | 1 | TYMS | Thymidylate synthetase |
| | | phase | | | |
| 106 | Hs.81892 | S | 1 | CSNK1G1 | Casein kinase 1, gamma 1 |
| | | phase | | | |
| 107 | Hs.83765 | S | 1 | DHFR | Dihydrofolate reductase |
| | | phase | | | |
| 108 | Hs.88663 | S | 1 | CENPQ | Centromere protein Q |
| | | phase | | | |
| 109 | Hs.99480 | S | 1 | ESCO2 | Establishment of cohesion |
| | | phase | | | 1 homolog 2 (S. cerevisiae) |
| 110 | Hs.484950 | *S | 1 | HIST1H2AC | Histone cluster 1, H2ac |
| | | phase | | | |

[0025] The levels of gene expression may also be measured by determining the levels of expression of a group of polynucleotide sequences that are members of a signature. Examples of DNA sequences of associated with a signature include any of groups (k)-(v). Thus, examples of signatures include group (l): SEQ ID NOS: 1-110; group m. the sequences SEQ ID NOS: 27, 85, 62, 23, and 51; group (n). the sequences SEQ ID NOS: 88, 45, 31, 102, and 32; group (o) the sequences SEQ ID NOS: 62, 51, 57, 40, and 11; group (p) the sequences SEQ ID NOS: 31, 26, 22, 44, and 29; group (q) the sequences SEQ ID NOS: 46, 37, 67, 6, and 106; group (r) the sequences SEQ ID NOS: 27, 85, 62, 23, 51, 61, 90, 97, 18, and 40; group (s) SEQ ID NOS: 88, 45, 31, 102, 32, 75, 57, 79, 51, and 74; group (t) SEQ ID NOS: 62, 51, 57, 40, 11, 93, 48, 6, 97, and 90; group (u) SEQ ID NOS: 31, 26, 22, 44, 29, 96, 3, 43, 55, and 46; and group (v) the sequences SEQ ID NOS: 46, 37, 67, 6, 106, 104, 5, 77, 60, and 79.

[0026] To examine the levels of gene expression of one or more sequences or Unigene ID Nos., a biological sample of a patient that is suffering from a cancer or who has yet to be diagnosed with cancer is typically assayed. A “biological sample” includes a sample from a tumor, cancerous tissue, pre-cancerous tissue, biopsy, tissue, lymph node, surgical excision, blood, serum, urine, organ, saliva, etc. obtained from a patient suffering from a cancer or who has yet to be diagnosed with cancer.

[0027] The biological sample is then typically assayed from the presence of one or more gene expression products such as RNA, cDNA, cRNA, protein, etc.

[0028] In one embodiment, mRNA from a biological sample is directly used in determining the levels of expression of a group of genes. In one particular embodiment, RNA is obtained from a biological sample. The RNA is then transformed into cDNA (complementary DNA) copy using methods known in the art. In particular embodiments, the cDNA is labeled with a fluorescent label or other detectable label. The cDNA is then hybridized to a substrate containing a plurality of probes of interest. A probe of interest typically hybridizes under stringent hybridization conditions to at least one DNA sequence of a gene signature. In certain embodiments, the plurality of probes are capable of hybridizing to the sequences of at least one of the group of DNA sequences of groups (l)-(v) under the hybridization conditions of 6×SSC (0.9 M NaCl, 0.09 M sodium citrate, pH 7.4) at 65° C. The probes may comprise nucleic acids. An example of a nucleic acid is DNA. The term “nucleic acid” refers to deoxyribonucleotides or ribonucleotides and polymers thereof. The term encompasses nucleic acids containing known nucleotide analogs or modified backbone residues or linkages, which are synthetic, naturally occurring, and non-naturally occurring, which have similar binding properties as the reference nucleic acid, and which are metabolized in a manner similar to the reference nucleotides. Examples of such analogs include, without limitation, phosphorothioates, phosphoramidates, methyl phosphonates, chiral-methyl phosphonates, peptide-nucleic acids (PNAs).

[0029] In certain cases, the probes will be from about 15 to about 50 base pairs in length. The amount of cDNA hybridization can be measured by assaying for the presence of the detectable label, such as a fluorophore. The quantification of the hybridization signal can be used to generate a score for a particular sequence or set of sequences in the gene signature for a particular patient or plurality of patients.

[0030] The term “detectable label” refers to a moiety that is attached through covalent or non-covalent means to an entity being measured or a probe. A “detectable label” can be a radioactive moiety, a fluorescent moiety, a chemiluminescent moiety, etc. The term “fluorescent label” refers to label that accepts radiant energy of one wavelength and emits radiant energy of a second wavelength. The presence of a detectable label may be assayed using methods known in the art that are appropriate to detect a particular label, such as spectrophotometric means (e.g., a spectrophotometer), radiometric means (e.g., scintillation counter), fluorometer, luminometer, etc.

[0031] Included within the scope of the invention are DNA microarrays containing a plurality of sequences that hybridize under stringent hybridization conditions to one or more of the gene sequences in a gene signature. An example of a substrate containing one or more probes of interest is a plurality of DNA probes that are affixed to a substrate. In certain embodiments, the substrate may comprise one or more materials such as gel, nitrocellulose, nylon, quartz, glass, metal, silica based materials, silica, resins, polymers, etc., or combinations thereof. Typically, the DNA probes comprise about 10-50 bp of contiguous DNA. In certain embodiments, the DNA probes are from about 20 to about 50 bp of contiguous DNA. In certain embodiments, the present invention relates to kits which comprising a microarray directions for its use. The kit may comprise a container which comprises one or more microarrays and directions for their use.

[0032] The biological sample may also be analyzed for gene expression of one or more genes in a signature using methods that can detect nucleic acids including, but not limited to, PCR (polymerase chain reaction); RT-PCT (reverse transcriptase-polymerase chain reaction); quantitative PCR, etc.

[0033] In certain embodiments, the levels of gene expression are measured by detecting the protein expression products of the genes or DNA sequences. The levels of protein products may be measured using methods known in the art including the use of antibodies which specifically bind to a particular protein. These antibodies, including polyclonal or monoclonal antibodies, may be produced using methods that are known in the art. These antibodies may also be coupled to a solid substrate to form an antibody chip or antibody microarray. Antibody or protein microarrays may be made using methods that are known in the art.

[0034] Once the levels of gene expression have been measured then a signature score is created. Examples of how to create a signature score are described herein. The signature score is then correlated with a predicted response to cancer treatment. Typically, a Kaplan-Meier curve may be generated to determine if the signature score is associated with a higher or lower survival rate. In particular embodiments, a positive or negative numerical weight may be assigned to a sequence or Unigene ID No. in the creation of a signature score. If the signature score is associated with a lower survival rate, then aggressive cancer treatment may be indicated. If the signature score is associated with a higher survival rate then less aggressive cancer treatment may be indicated.

[0035] The treatment of cancer in certain embodiments, involves measuring the levels of gene expression of a group of genes represented by Unigene ID Nos. selected from the group consisting of groups (a)-(k). The method of treatment typically further comprises administering a therapeutically effective amount of one or more cancer treatment agents selected from the group consisting of: cancer chemotherapeutic agents and radiation. The treatment of cancer may also comprise surgery or surgical procedures. The term “administering” refers to the method of contacting a compound with a subject. Modes of “administering” may include but are not limited to, methods that involve contacting the cancer chemotherapeutic agents intravenously, intraperitoneally, intranasally, transdermally, topically, via implantation, subcutaneously, parentally, intramuscularly, orally, systemically, and via adsorption. The term “treatment” includes the acute or prophylactic diminishment or alleviation of at least one symptom or characteristic associated or caused by the cancer being treated. For example, treatment can include diminishment of several symptoms of a cancer or complete eradication of a cancer. The phrase “therapeutically effective amount” means an amount of a cancer chemotherapeutic agent, or a pharmaceutically acceptable salt thereof, that is sufficient to inhibit, halt, or allow an improvement in the cancer being treated when administered alone or in conjunction with another pharmaceutical agent or treatment in a particular subject or subject population. For example in a human a therapeutically effective amount can be determined experimentally in a clinical setting, for the particular disease and subject being treated. It should be appreciated that determination of proper dosage forms, dosage amounts and routes of administration is within the level of ordinary skill in the pharmaceutical and medical arts.

[0036] It is within the purview of the skill medical practitioner to select an appropriate therapeutic regimen. Therapeutic regimens may be comprised of the use of cancer chemotherapeutic agents and/or radiation. A cancer chemotherapeutic agent is a chemical or biological agent (e.g., antibody, protein, RNA, DNA, etc.) that retards, slows, or stops the growth of cancer or is approved to treat cancer by the U.S. Food and Drug Administration. Examples of cancer chemotherapeutic agents include, but are not limited to: paclitaxel, docetaxel, imatinib mesylate, sunitinib malate, cisplatin, etoposide, vinblastine, methotrexate, adriamycin, cyclophosphamide, doxorubicin, daunomycin, 5-fluoruracil, vincristine, endostatin, angiostatin, bevacizumab, and rituximab. Another example of a cancer treatment agent is radiation. Thus, the cancer treatment may comprise radiotherapy, fractionated radiotherapy, chemotherapy, or chemo-radiotherapy (a combination of one or more chemotherapeutic agents and radiation). The cancer may be any type of cancer. In certain embodiments, the cancer is breast, renal, or lung cancer. Examples of cancer include, but are not limited to: small cell lung cancer, squamous cell lung carcinoma, glioma, breast cancer, prostate cancer, ovarian cancer, cervical cancer, gliobastoma, endometrial carcinoma, heptocellular carcinoma, colon cancer, lung cancer, melanoma, renal cell carcinoma, renal cancer, thyroid carcinoma, squamous cell lung carcinoma, leukemia, cell lymphoma, and lymphoproliferative disorders,

### EXAMPLES

### Signature Score Methods

[0037] From in vitro published microarray studies, two proliferation signatures were compiled of 508 and 110 genes respectively. The prognostic value of these signatures was tested in five large clinical microarray datasets. More than 1,000 patients with breast, renal or lung cancer were included. A signature score was used to evaluate the performance of the signatures.

[0038] Results

[0039] One of the signatures (110 genes) (a signature that is also known as signature (a)—see Table 1 for listing of the 110 UniGene ID Nos.)) had significant prognostic value in all datasets. Stratifying patients in groups based on the signature score resulted in a clear difference in survival (p-values <0.05). Further multivariate Cox-regression analyses and AUC (area under the curve) calculations showed that this signature added substantial value to clinical factors used for prognosis and can be combined with other phenotype based signatures. In addition running 10,000 random gene sets showed the strength of the signature, no random signature showed significant results on all 5 datasets.

[0040] Conclusions

[0041] The proliferation signature is a strong prognostic factor, with the potential to be converted into a predictive test. It can be used to select patients who could benefit from accelerated radiotherapy or chemo-radiotherapy.

### Materials and Methods

[0042] Signature Derivation

[0043] From published microarray studies two different proliferation signatures were compiled. Whiffield et al. (22) studied the cell cycle in HeLa cells (cervix cancer cell line). Microarrays were performed on synchronized cell cultures at different time-points and genes that showed a periodic variation were selected (22). These genes were grouped according to the cell cycle phase in which their expression peaked. It is proposed that this gene set could be employed as a specific proliferation signature. Genes with a peak expression in G1 phase will represent non-proliferating cells and genes in S, G2 and M phase then represent proliferating cells. Another method to derive a proliferation signature with microarrays was employed by Chang et al. (6). Human fibroblasts were serum starved for 48 hours and then stimulated with serum to simulate a wound response. One of the most consistent and important effects in the serum response program is stimulation of proliferation. Abnormal proliferation is also a consistent characteristic of cancer cells, irrespective of a wound response (6). Chang et al. (6) therefore discarded the genes with a periodic behavior to specifically study the wound response. Here it is proposed that the set of genes discarded from the wound signature is a good representation of a proliferation signature. This signature is a subset of the signature derived from Whiffield et al. (22), however it is postulated that it is a better representative of proliferation and will be a better prognostic factor, since only this gene set shows a change in expression upon serum stimulation.

[0044] Datasets

[0045] Patient microarray and clinical follow-up data were collated to test the clinical value of the signatures. Datasets are publicly available in the microarray databases Gene Expression Omnibus (GEO: http://www.ncbi.nlm.nih.gov/projects/geo/) and Stanford Microarray Database (SMD: http://genome-www.stanford.edu/microarray) or elsewhere. Accessory clinical and followup data were also given or provided by the authors on request. In Table 2 an overview of the datasets and where they are accessible is provided:

TABLE 2
Overview of the analyzed patient microarray datasets

| | | Number | |
|---|---|---|---|
| | Cancer | of | |
| Dataset | type | patients | Source |
| Miller | Breast | 251 | GEO accession |
| | cancer | | GSE3494: |
| | | | http://www.ncbi.nlm.nih.gov/projects/geo/ |
| Wang | Breast | 286 | GEO accession |
| | cancer | | GSE2034 |
| | | | http://www.ncbi.nlm.nih.gov/projects/geo/ |
| Van de | Breast | 295 | http://microarraypubs.stanford.edu/ |
| Vijver | cancer | | wound_NKI/ |
| Zhao | Renal | 177 | SMD: |
| | cancer | | http://smd.stanford.edu/ |
| Beer | Lung | 86 | http://dot.ped.med.umich.edu:2000/ |
| | cancer | | ourimage/pub/Lung/index.html |

[0046] Data Filtering and Pre-Processing

[0047] Datasets downloaded from the SMD23 were filtered according to the parameters in the paper. CloneIDs were chosen as gene annotation and the data obtained was log-transformed. For the normalized Affymetrix arrays 24,25 the genes were log-transformed. The Beer et al. (26) dataset was already preprocessed therefore to perform log-transformation all expression values below 1.1 were set to 1.1, this was similar to the processing performed by Chen et al. (2). In all other cases the data was kept in the downloaded format (12), which was already log-transformed. CloneIDs and Affymetrix probeIDs were translated into UnigeneIDs (Build199) with Source (http://smd.stanford.edu/) or Affymetrix data files (Affx annotation files available at www.affymetrix.com). Datasets were imported in Matlab (Matlab 7.1, The Mathworks, Massachusetts, USA). Unless indicated otherwise, analyses are performed in this program.

[0048] Signature Score Calculation

[0049] Expression data of the genes in the signature was extracted from the dataset. The following step was used to calculate a signature score for each patient in the dataset. This score was defined as the weighted average expression value of the genes in the signature. A weight of −1 or 1 was assigned to each gene, dependent on the phenotype the gene represents (supplementary material). The signature score then reflects the status of the studied process in a tumor. When a gene was represented by more than one probe on an array, the expression of the probes was averaged before signature calculation.

[0050] Statistical Analysis

[0051] A loop of 1,000 clustering repeats with the K-means clustering function in Matlab was applied to split the patients in two groups according to their signature score. Outcome in the two groups was analyzed and compared by the Kaplan-Meier method. Differences in outcome were tested for statistical significance by the log-rank test for different common end-points. For breast and renal cancer the common end-points are 5-years and 10 years survival, for lung cancer these are 2-years and 5-years survival, all end-points are analyzed when follow-up is long enough. Results for the log-rank tests are given as the average, standard deviation and the range of the p-values, also the percentage of p-values from the 1,000 clustering runs that were significant was calculated to evaluate the prognostic power of the signature and stability of the clustering. Multivariate Cox regression analysis with stepwise backward selection procedure was performed in SPSS (SPSS 12.0.1, SPSS Inc, Illinois, USA) to show the clinical relevance of the proliferation signature. Further Matlab was used to integrate all parameters in a model and evaluate the area under the curve (AUC) of the model with and without addition of the signature to the clinical parameters; details of the methodology are given in the supplementary data.

[0052] Random Signature Testing

[0053] A method to test a predefined number of random signatures of a predefined size on all the datasets was developed. To show the strength of the best proliferation signature 10,000 random generated gene sets, with sizes equal to the size of the best proliferation signature, were tested on the datasets. These random gene sets were generated and tested in a similar manner as the proliferation signatures.

[0054] Results

[0055] Comparison of Two Proliferation Signatures

[0056] Two proliferation signatures were derived from literature. Signature 1 (Whiffield et al. (22)) and signature 2 (Chang et al. (6)) consist of respectively 1,134 and 199 cloneIDs, these map to 815 and 154 unique UnigeneIDs, respectively. The distribution of genes in the different cell cycle phases for the two signatures is distinct (Supplementary data Table 1), indicating that the signatures are different. Signature 1 shows equal proportions of genes in the defined cell cycle phases. However in signature 2 more genes are involved in G2 and clearly less genes are involved in M/G1. Outcome prediction with proliferation signatures The signatures were tested on several publicly available microarray datasets (Table 2). The signatures were evaluated using a signature score. To calculate the signature score, weights had to be defined for each gene. After translation and weight assignment several genes were discarded from analyses, for these genes weight assignment was ambiguous, details are provided in the supplementary material. The final signatures consist of respectively 508 and 110 UnigeneIDs for signature 1 and 2.

[0057] In every dataset a signature score was calculated for each patient. The patients were separated in two groups by clustering these signature scores. Results of the log-rank tests are given in Table 3 and in FIG. 1 the Kaplan-Meier curves for signature 2 are shown. Signature 2 gives clear risk stratification in all datasets, all p-values of the 1000 clustering runs <0.05. Results of the log-rank test show not only that signature 2 gives a better risk stratification than signature 1, also the overall robustness of the separation is stronger, indicated by the small standard deviations. Nevertheless both signatures show very good prognostic value on the three breast cancer datasets. The range and standard deviations of the 1,000 clustering runs also show that the results are stable for these datasets.

TABLE 3
Results of log-rank test for the signatures for the different end-points

| | | | | | |
|---|---|---|---|---|---|
| | | | | | % of |
| | End- | P- | | | significant |
| Dataset | point | value | SD | Range | runs |

Signature 1

| | | | | | |
|---|---|---|---|---|---|
| Miller | 5-years | 3.1 10⁻³ | 1.6 10⁻³ | 1.5 10⁻³-4.7 10⁻³ | 100 |
| | 10-years | 6.9 10⁻⁴ | 3.4 10⁻⁴ | 3.6 10⁻⁴-1.0 10⁻³ | 100 |
| Wang | 5-years | 1.9 10⁻³ | 1.0 10⁻³ | 9.9 10⁻⁴-3.0 10⁻³ | 100 |
| Van de | 5-years | 4.6 10⁻⁵ | 0.0 | 4.6 10⁻⁵-4.6 10⁻⁵ | 100 |
| Vijver | 10-years | 2.5 10⁻⁷ | 0.0 | 2.5 10⁻⁷-2.5 10⁻⁷ | 100 |
| Zhao | 5-years | 0.48 | 8.0 10⁻² | 0.39-0.55 | 0 |
| | 10-years | 0.54 | 3.0 10⁻² | 0.51-0.57 | 0 |
| Beer | 2-years | 0.16 | 5.4 10⁻² | 0.12-0.20 | 0 |
| | 5-years | 0.49 | 9.8 10⁻² | 0.11-0.63 | 0 |

Signature 2

| | | | | | |
|---|---|---|---|---|---|
| Miller | 5-years | 4.1 10⁻³ | 1.8 10⁻³ | 2.0 10⁻³-6.2 10⁻³ | 100 |
| | 10-years | 7.0 10⁻⁴ | 1.8 10⁻⁴ | 4.6 10⁻⁴-9.3 10⁻⁴ | 100 |
| Wang | 5-years | 2.3 10⁻³ | 1.8 10⁻⁴ | 5.7 10⁻⁵-6.4 10⁻⁴ | 100 |
| Van de | 5-years | 1.4 10⁻⁶ | 0.0 | 1.4 10⁻⁶-1.4 10⁻⁶ | 100 |
| vijver | 10-years | 3.0 10⁻⁸ | 1.6 10⁻¹⁰ | 3.0 10⁻⁸-3.0 10⁻⁸ | 100 |
| Zhao | 5-years | 3.1 10⁻² | 1.1 10⁻² | 1.9 10⁻²-4.2 10⁻² | 100 |
| | 10-years | 2.3 10⁻² | 3.2 10⁻³ | 2.0 10⁻²-2.7 10⁻² | 100 |
| Beer | 2-years | 3.3 10⁻³ | 2.2 10⁻⁵ | 3.3 10⁻³-3.4 10⁻³ | 100 |
| | 5-years | 2.8 10⁻² | 6.8 10⁻⁵ | 2.8 10⁻²-2.8 10⁻² | 100 |

[0058] Statistical Analysis of Signature Scores

[0059] Multivariate Cox-regression analyses were performed to investigate whether the association between the best proliferation signature and outcome was independent of clinical prognostic factors. The variables analyzed differed per dataset, since different clinical factors are provided (Supplementary data Table 2). A stepwise backward selection procedure is performed to select the variables that are prognostic factors; the end-point is 10-years for breast and renal cancer and 5-years for lung cancer. Follow-up time in the Wang et al. (25) dataset is not long enough, in that dataset 5-years was used. In Table 4 the factors selected with this procedure are given for all the datasets, choosing another end-point did not influence the results dramatically. In 3 out of 5 datasets the proliferation signature is a significant prognostic factor of outcome.

TABLE 4
Clinical parameters selected with stepwise backward
selection in multivariate Cox regression
analyses including signature 2

| | Hazard ratio (95% | | |
|---|---|---|---|
| | CI) | | p-value |
| Miller | | | |
| Tumor size | 3.3 | (1.7-6.6) | 0.001 |
| LNS\hat{ } | 2.8 | (1.6-5.0) | <0.001 |
| Proliferation | 3.4 | (1.4-8.2) | 0.005 |
| Wang | | | |
| Proliferation | 2.6 | (1.5-4.4) | 0.002 |
| Van de Vijver | | | |
| Age | 0.95 | (0.91-0.99) | 0.027 |
| Tumor size* | 1.5 | (0.93-2.5) | 0.096 |
| Elston grade | 2.2 | (1.4-3.4) | <0.001 |
| Proliferation | 21 | (1.8-234) | 0.015 |
| Zhao | | | |
| Performance | 1.3 | (1.1-1.6) | 0.007 |
| status | | | |
| Grade | 1.5 | (1.0-2.1) | 0.026 |
| Stage | 3.3 | (2.5-4.4) | <0.001 |
| Beer | | | |
| Age | 1.0 | (1.0-1.1) | 0.058 |
| Stage | 2.4 | (1.6-3.7) | <0.001 |
| Differentiation | 2.0 | (1.0-4.0) | 0.046 |

*Categories: ≦2 cm or >2 cm
\hat{ }LNS: lymph-node status

[0060] AUCs were calculated for all clinical parameters and the best proliferation signature. Results of this analyses show that the proliferation signature has a high AUC in all datasets (Supplementary data Table 3). To quantify the gain obtained with this signature a model of the clinical factors with and without the signature was generated and evaluated with the AUC (Supplementary data). Only the datasets with more than one clinical parameter and more than 150 patients are included. In two out of three datasets the AUC increased when the proliferation signature was added to the model (FIG. 2). In order to show the strength of the signature, 10,000 random generated signatures were tested on all datasets. Of these 10,000 no signature gave a significant result on all datasets.

[0061] Discussion

[0062] Application of the signature score methodology used here provides a very stringent method to evaluate the prognostic power of a signature. Typically signature evaluations are conducted by clustering of patients and genes, which can result in clear differences in survival even when gene expression differences are not very large. The employment of a more strict method, like the signature score used here, gives a better indication on the magnitude of association and thus clinical feasibility of the signature. The proliferation signature could be further optimized by weighting genes according to their importance, which can lead to a reduction in signature size. Here equal weights were chosen for all genes even though some may clearly have a more profound role than others. It is likely that this is dependent on the tumor type, since proliferation is one of the pathways almost always disrupted in cancer. In this light signature 2 could be considered as a weighting of signature 1. Several genes do not contribute to prognosis and are therefore assigned a weight of 0.

[0063] Many other signatures identified in previous studies include large clusters of proliferation genes (4, 9, 17-20, 27-29). Some even refer to their signature as a proliferation signature (4, 29). However in these supervised studies not all genes in the signature are related to proliferation and can therefore not be referred to strictly as general proliferation signatures. Dai et al. (4) determined a supervised signature which was associated with metastasis. Many of the identified genes were related to the cell cycle and these authors thus referred to their classifier as a proliferation signature. However only 17 out of 50 genes in this signature are cell cycle related when compared to the initial gene list of Whitfield et al. (22). Further the experimental method was not designed to find a proliferation signature. The same applies to the study of Rosenwald et al. (29), only 28 of the 48 genes that were associated with length of survival are related to proliferation.

[0064] A proliferation signature was derived from in vitro microarray studies based only on genes that differ in expression in different parts of the cell cycle (6, 22). Results show that the proliferation signature has a high value in patient risk stratification in several types of cancer and can be combined with other phenotype based signatures, like the IGS. Combining the proliferation and wound signature will not increase the prognostic power, as they primarily identify the same patients. This and the fact that large clusters of proliferation genes are identified in many gene signatures (4, 9, 17-20, 27, 28) raise the possibility that many of these signatures, including the wound signature, might be driven by proliferation. Fan et al. (11) already suggested that many signatures probably track a common set of biologic phenotypes and have therefore a similar prognostic strength. The proliferation signature has a high prognostic power, like many signatures, however it is one of the few signatures that has a potential predictive value. It can possibly be used to prescribe a treatment targeting tumor proliferation. Studies indicate that fast proliferating tumors can benefit from accelerated radiotherapy or chemo-radiotherapy (30, 31). The proliferation signature could be used as a predictive test for patient selection for these treatments. This should be tested in randomized patient trials.

[0065] Previous studies have tried to assess the predictive value of proliferation by means of Ki67 staining, measurement of labeling index (LI) and potential doubling time (Tpot) calculation. Overall results of these single-parameter indicators are disappointing, however in several studies a weak prediction potential is found (30, 32, 33). This can be due to the large chance of misclassification with these single-parameter indicators (16, 34). Application of multi-parameter indicators, like the proliferation signature, is therefore a more attractive method (16). In conclusion, the application of phenotype based signatures like the proliferation signature can be used in patient risk stratification, in addition to clinical parameters. It has a high prognostic value and unlike other signatures it has the potential to be converted into a predictive test. It is proposed that patients with a high proliferation signature score could benefit from accelerated radiotherapy or chemo-radiotherapy.

### Supplementary Materials and Methods

[0066] Signature Processing

[0067] For all signatures the gene identifiers were translated into UnigeneIDs (Build199) with Source (http://smd.stanford.edu/) or Affymetrix data files (Affx annotation files (www.affymetrix.com)). After this translation several genes in the proliferation signatures were represented by more than one CloneID. In case these cloneIDs represented the same proliferation status they were included in the signature. However when multiple cloneIDs representing one gene corresponded to different proliferation conditions these genes were discarded. This was approximately 3% of the genes in each signature.

[0068] Data Filtering and Pre-Processing

[0069] Datasets downloaded from the SMD (23) were filtered according to the parameters in the paper. CloneIDs were chosen as gene annotation and the data obtained was log-transformed. For the normalized Affymetrix arrays (24, 25) the genes were log-transformed. The Beer et aL (26) dataset was already preprocessed therefore to perform log-transformation all expression values below 1.1 were set to 1.1, this was similar to the processing performed by Chen et al. (2). In all other cases the data was kept in the downloaded format (12), which was already log-transformed. CloneIDs and Affymetrix probeIDs were translated into UnigeneIDs (Build199).

[0070] Weight Assignment

[0071] The weights for the genes in the proliferation signatures were defined as −1 when a gene represents non-proliferating cells (G₁ phase) and 1 if a gene represents proliferating cells (S, G₂ and M phase). The given cell cycle phases are G₁/S, S, G₂, G₂/M and M/G₁ (Supplementary data Table 1). It is clear that the genes with a peak expression in the phases S, G₂ and G₂/M were assigned a weight of 1. However it was unclear what weight should be assigned to the genes in G₁/S and M/G₁. Therefore these genes, 34% and 25% of the genes in signature 1 and 2 respectively, were omitted from further analyses. The final signatures consisted respectively of 508 and 110 unique UnigeneIDs (build #199) for signature 1 and 2. The gene lists for signature 2 are provided in Table 1 above.

[0072] AUC Model Calculation

[0073] Matlab (Matlab 7.1, The Mathworks, Massachusetts, USA) was used to integrate all parameters in a model and evaluate the area under the curve (AUC) of the model with and without addition of the signature to the clinical parameters. All clinical parameters were transformed to numbers, to be able to incorporate them in Matlab, e.g. negative and positive ER-status were set to 0 and 1 respectively. These parameters were incorporated in a model with the classify function of Matlab, which used the diaglinear method. Part of the dataset was used as training set and the other part as a test set. Assignment of samples to test and training set was done at random and repeated 1,000 times.

[0074] Contingency Table Analyses

[0075] Contingency tables were used to compare patient classification of the proliferation signature to the patient classification of other gene signatures. For three datasets (12, 24, 26) the group classification of the gene signatures were identified in these studies: the 32-gene p53 signature (24), the 70-gene signature (12) and the 100 survival related genes (26). These and the wound response and IGS signature were evaluated.

[0076] Contingency tables were evaluated with the p-value calculated from Chi-square test and the Cramer's V statistic. The Cramer's V statistic (value can range from 0 to 1) measures the strength of association between the two variables analyzed in the contingency table, with 1 indicating perfect association and 0 indicating no association. Values between 0.36 and 0.49 indicate a substantial relation between the signatures and values >0.50 indicate a strong relation (11).

[0077] Supplementary Tables

SUPPLEMENTARY TABLE 1
Percentage of genes in the different cell cycle
phases in the two proliferation signatures
(numbers are given between brackets)

| Cell cycle phase | Signature 1 | Signature 2 |
|---|---|---|
| G₁/S | 18.0 (147) | 18.8 (29) |
| S | 18.0 (147) | 19.5 (30) |
| G₂ | 19.5 (159) | 26.0 (40) |
| G₂/M | 21.7 (177) | 22.1 (34) |
| M/G₁ | 16.0 (130) | 6.5 (10) |
| Matching combinations* | 3.1 (25) | 3.9 (6) |
| Non-matching combinations^{†} | 3.7 (30) | 3.3 (5) |

*Different cloneIDs for 1 UnigeneID are found in different phases, but all phases represent the same proliferation status (i.e S, G₂, G₂/M)
^{†}Different cloneIDs for 1 UnigeneID are found in different phases and the phases represent a different proliferation status (i.e G₂/M, G₁/S)

SUPPLEMENTARY TABLE 1
Percentage of genes in the different cell cycle
phases in the two proliferation signatures
(numbers are given between brackets)

| Cell cycle phase | Signature 1 | Signature 2 |
|---|---|---|
| G₁/S | 18.0 (147) | 18.8 (29) |
| S | 18.0 (147) | 19.5 (30) |
| G₂ | 19.5 (159) | 26.0 (40) |
| G₂/M | 21.7 (177) | 22.1 (34) |
| M/G₁ | 16.0 (130) | 6.5 (10) |
| Matching combinations* | 3.1 (25) | 3.9 (6) |
| Non-matching combinations^{†} | 3.7 (30) | 3.3 (5) |

*Different cloneIDs for 1 UnigeneID are found in different phases, but all phases represent the same proliferation status (i.e S, G₂, G₂/M)
^{†}Different cloneIDs for 1 UnigeneID are found in different phases and the phases represent a different proliferation status (i.e G₂/M, G₁/S)

SUPPLEMENTARY TABLE 2
Results of log-rank test for the signatures for the
different end-points

| | | | | | |
|---|---|---|---|---|---|
| Dataset | End-point | P-value | SD | Range | % of significant runs |

Signature 1

| | | | | | |
|---|---|---|---|---|---|
| Miller | 5-years | 3.1 10⁻³ | 1.6 10⁻³ | 1.5 10⁻³-4.7 10⁻³ | 100 |
| | 10-years | 6.9 10⁻⁴ | 3.4 10⁻⁴ | 3.6 10⁻⁴-1.0 10⁻³ | 100 |
| Wang | 5-years | 1.9 10⁻³ | 1.0 10⁻³ | 9.9 10⁻⁴-3.0 10⁻³ | 100 |
| Van de Vijver | 5-years | 4.6 10⁻⁵ | 0.0 | 4.6 10⁻⁵-4.6 10⁻⁵ | 100 |
| | 10-years | 2.5 10⁻⁷ | 0.0 | 2.5 10⁻⁷-2.5 10⁻⁷ | 100 |
| Zhao | 5-years | 0.48 | 8.0 10⁻² | 0.39-0.55 | 0 |
| | 10-years | 0.54 | 3.0 10⁻² | 0.51-0.57 | 0 |
| Beer | 2-years | 0.16 | 5.4 10⁻² | 0.12-0.20 | 0 |
| | 5-years | 0.49 | 9.8 10⁻² | 0.11-0.63 | 0 |

Signature 2

| | | | | | |
|---|---|---|---|---|---|
| Miller | 5-years | 4.1 10⁻³ | 1.8 10⁻³ | 2.0 10⁻³-6.2 10⁻³ | 100 |
| | 10-years | 7.0 10⁻⁴ | 1.8 10⁻⁴ | 4.6 10⁻⁴-9.3 10⁻⁴ | 100 |
| Wang | 5-years | 2.3 10⁻³ | 1.8 10⁻⁴ | 5.7 10⁻⁵-6.4 10⁻⁴ | 100 |
| Van de Vijver | 5-years | 1.4 10⁻⁶ | 0.0 | 1.4 10⁻⁶-1.4 10⁻⁶ | 100 |
| | 10-years | 3.0 10⁻⁸ | 1.6 10⁻¹⁰ | 3.0 10⁻⁸-3.0 10⁻⁸ | 100 |
| Zhao | 5-years | 3.1 10⁻² | 1.1 10⁻² | 1.9 10⁻²-4.2 10⁻² | 100 |
| | 10-years | 2.3 10⁻² | 3.2 10⁻³ | 2.0 10⁻²-2.7 10⁻² | 100 |
| Beer | 2-years | 3.3 10⁻³ | 2.2 10⁻⁵ | 3.3 10⁻³-3.4 10⁻³ | 100 |
| | 5-years | 2.8 10⁻² | 6.8 10⁻⁵ | 2.8 10⁻²-2.8 10⁻² | 100 |

SUPPLEMENTARY TABLE 3
AUCs of individual clinical parameters and proliferation signature 2

| Miller | | Wang | | Van de Vijver | | Zhao | | Beer | |
|---|---|---|---|---|---|---|---|---|---|
| Age | 0.48 | ER-status | 0.62 | Age | 0.42 | Age | 0.43 | Age | 0.60 |
| Elston grade | 0.65 | Proliferation** | 0.59 | Elston grade | 0.72 | Sex | 0.45 | Sex | 0.45 |
| Tumor size* | 0.71 | | | Tumor size* | 0.67 | Performance status | 0.60 | Smoking^{†} | 0.49 |
| ER-status | 0.58 | | | ER-status | 0.41 | Grade | 0.64 | Stage | 0.66 |
| LNS^{‡} | 0.70 | | | LNS^{‡} | 0.52 | Stage | 0.85 | Differentiation | 0.59 |
| PgR^{§} | 0.54 | | | NIH risk | 0.66 | Proliferation** | 0.56 | K-ras mutation | 0.52 |
| P53-status | 0.57 | | | Mastectomy | 0.57 | | | Proliferation** | 0.64 |
| Proliferation** | 0.67 | | | Chemotherapy | 0.52 | | | | |
| | | | | Hormone therapy | 0.53 | | | | |
| | | | | Proliferation** | 0.72 | | | | |

*Categories: ≦2 cm or >2 cm
^{†}Categories: smoker or non-smoker
^{‡}LNS: lymph-node status
^{§}PgR: progesterone receptor status
**proliferation: proliferation signature 2

[0078] In further experiments the gene signature of (a) was further reduced to provide gene signatures (b)-(k). A signature score was calculated for each patient in the different datasets using each signature. These scores were used to cluster the patients in two groups, one with low expression and one with high expression of the signature. Kaplan-Meier survival curves for the two groups were compared in FIGS. 3-12. Patients with tumors with a high proliferation signature score had worse outcomes than those with tumors with a low proliferation signature score.

[0079] Gene signature (a) was further reduced to gene signature (b) which is 5 genes represented by Unigene ID Nos.: Hs.524571, Hs.226390, Hs.436187, Hs.472716, and Hs.194698. When run on the Miller data set (with one round AUC criteria) Kaplan Meier curves were produced in FIG. 3 (AUC: 0.6943, Plogrank: 0.0000, Pcox: 0.0000, CI: 0.6172).

[0080] Gene signature (a) was further reduced to gene signature (c) which is 5 genes represented by Unigene ID Nos.: Hs.368563, Hs.444028, Hs.58992, Hs.575032, and Hs.591697. When run on the Wang data set (with one round AUC criteria) Kaplan Meier curves were produced in FIG. 4 (AUC: 0.6900, Plogrank: 0.0000, Pcox: 0.0000, CI: 0.6170).

[0081] Gene signature (a) was further reduced to gene signature (d) which is 5 genes represented by Unigene ID Nos.: Hs.436187, Hs.194698, Hs.250822, Hs.93002, and Hs.308045. When run on the van de Vijver data set (with one round AUC criteria) Kaplan Meier curves were produced in FIG. 5 (AUC: 0.7576, Plogrank: 0.0000, Pcox: 0.0000, CI: 0.5694).

[0082] Gene signature (a) was further reduced to gene signature (e) which is 5 genes represented by Unigene ID Nos.: Hs.58992, Hs.522632, Hs.446017, Hs.240, and Hs.533059. When run on the Zhao data set (with one round AUC criteria) Kaplan Meier curves were produced in FIG. 6 (AUC: 0.6438, Plogrank: 0.0021, Pcox: 0.0030, CI: 0.4925).

[0083] Gene signature (a) was further reduced to gene signature (f) which is 5 genes represented by Unigene ID Nos.: Hs.58974, Hs.75318, Hs.506652, Hs.184339, and Hs.81892. When run on the Beer data set (with one round AUC criteria) Kaplan Meier curves were produced in FIG. 7 (AUC: 0.6865, Plogrank: 0.0165, Pcox: 0.0152, CI: 0.4776).

[0084] Gene signature (a) was further reduced to gene signature (g) which is 10 genes represented by Unigene ID Nos.: Hs.524571, Hs.226390, Hs.436187, Hs.472716, Hs.194698, Hs.386189, Hs.409065, Hs.5199, Hs.434250, and Hs.93002. When run on the Miller data set (with one round AUC criteria) Kaplan Meier curves were produced in FIG. 8 (AUC: 0.6911, Plogrank: 0.0001, Pcox: 0.0000, CI: 0.6272).

[0085] Gene signature (a) was further reduced to gene signature (h) which is 10 genes represented by Unigene ID Nos.: SEQ ID NOS: 88, 45, 31, 102, 32, 75, 57, 79, 51, and 74. When run on the Wang data set (with one round AUC criteria) Kaplan Meier curves were produced in FIG. 9 (AUC: 0.6684, Plogrank: 0.0000, Pcox: 0.0000, CI: 0.6182).

[0086] Gene signature (a) was further reduced to gene signature (i) which is 10 genes represented by Unigene ID Nos.: Hs.436187, Hs.194698, Hs.250822, Hs.93002, Hs.308045, Hs.444082, Hs.1594, Hs.184339, Hs.5199, Hs.409065. When run on the van de Vijver data set (with one round AUC criteria) Kaplan Meier curves were produced in FIG. 10 (AUC: 0.7551, Plogrank: 0.0000, Pcox: 0.0000, CI: 0.5710).

[0087] Gene signature (a) was further reduced to gene signature (j) which is 10 genes represented by Unigene ID Nos.: Hs.58992, Hs.522632, Hs.446017, Hs.240, Hs.533059, Hs.513126, Hs.132966, Hs.532803, Hs.239, and Hs.58974. When run on the Zhao data set (with one round AUC criteria) Kaplan Meier curves were produced in FIG. 11 (AUC: 0.6531, Plogrank: 0.0000, Pcox: 0.0003, CI: 0.5050).

[0088] Gene signature (a) was further reduced to gene signature (k) which is 10 genes represented by Unigene ID Nos.: Hs.58974, Hs.75318, Hs.506652, Hs.184339, Hs.81892, Hs.591322, Hs.156346, Hs.72550, Hs.374378, and Hs.77695. When run on the Beer data set (with one round AUC criteria) Kaplan Meier curves were produced in FIG. 12 (AUC: 0.6840, Plogrank: 0.0911, Pcox: 0.0125, CI: 0.4881).

### REFERENCES

[0089] 1. Bild A H, Potti A, Nevins J R. Linking oncogenic pathways with therapeutic opportunities. Nat Rev Cancer 2006; 6(9):735-41.
[0090] 2. Chen H Y, Yu S L, Chen C H, et al. A five-gene signature and clinical outcome in non-small-cell lung cancer. N Engl J Med 2007; 356(1):11-20.
[0091] 3. Quackenbush J. Microarray analysis and tumor classification. N Engl J Med 2006; 354(23):2463-72.
[0092] 4. Dai H, van't Veer L, Lamb J, et al. A cell proliferation signature is a marker of extremely poor outcome in a subpopulation of breast cancer patients. Cancer Res 2005; 65(10):4059-66.
[0093] 5. Dupuy A, Simon R M. Critical review of published microarray studies for cancer outcome and guidelines on statistical analysis and reporting. J Natl Cancer Inst 2007; 99(2): 147-57.
[0094] 6. Chang H Y, Sneddon J B, Alizadeh A A, et al. Gene expression signature of fibroblast serum response predicts human cancer progression: similarities between tumors and wounds. PLoS Biol 2004; 2(2):E7.
[0095] 7. Chi J T, Wang Z, Nuyten D S, et al. Gene expression programs in response to hypoxia: cell type specificity and prognostic significance in human cancers. PLoS Med 2006; 3(3):e47.
[0096] 8. Sung F L, Hui E P, Tao Q, et al. Genome-wide expression analysis using microarray identified complex signaling pathways modulated by hypoxia in nasopharyngeal carcinoma. Cancer Lett 2007.
[0097] 9. Liu R, Wang X, Chen G Y, et al. The prognostic role of a gene signature from tumorigenic breast-cancer cells. N Engl J Med 2007; 356(3):217-26.
[0098] 10. Chang H Y, Nuyten D S, Sneddon J B, et al. Robustness, scalability, and integration of a wound-response gene expression signature in predicting breast cancer survival. Proc Natl Acad. Sci USA 2005; 102(10):3738-43.
[0099] 11. Fan C, Oh D S, Wessels L, et al. Concordance among gene-expression-based predictors for breast cancer. N Engl J Med 2006; 355(6):560-9.
[0100] 12. van de Vijver M J, He Y D, van't Veer L J, et al. A gene-expression signature as a predictor of survival in breast cancer. N Engl J Med 2002; 347(25):1999-2009.
[0101] 13. Adler A S, Lin M, Horlings H, Nuyten D S, van de Vijver M J, Chang H Y. Genetic regulators of large-scale transcriptional signatures in cancer. Nat Genet 2006; 38(4):421-30.
[0102] 14. Bourhis J, Overgaard J, Audry H, et al. Hyperfractionated or accelerated radiotherapy in head and neck cancer: a meta-analysis. Lancet 2006; 368(9538):843-54.
[0103] 15. De Ruysscher D, Pijls-Johannesma M, Bentzen S M, et al. Time between the first day of chemotherapy and the last day of chest radiation is the most important predictor of survival in limited-disease small-cell lung cancer. J Clin Oncol 2006; 24(7): 1057-63.
[0104] 16. Whitfield M L, George L K, Grant G D, Perou C M. Common markers of proliferation. Nat. Rev Cancer 2006; 6(2):99-106.
[0105] 17. Perou C M, Jeffrey S S, van de Rijn M, et al. Distinctive gene expression patterns in human mammary epithelial cells and breast cancers. Proc Natl Acad Sci USA 1999; 96(16):9212-7.
[0106] 18. Welsh J B, Zarrinkar P P, Sapinoso L M, et al. Analysis of gene expression profiles in normal and neoplastic ovarian tissue samples identifies candidate molecular markers of epithelial ovarian cancer. Proc Natl Acad Sci USA 2001; 98(3): 1176-81.
[0107] 19. Pawitan Y, Bjohle J, Amler L, et al. Gene expression profiling spares early breast cancer patients from adjuvant therapy: derived and validated in two population-based cohorts. Breast Cancer Res 2005; 7(6):R953-64.
[0108] 20. Sotiriou C, Wirapati P, Loi S, et al. Gene expression profiling in breast cancer: understanding the molecular basis of histologic grade to improve prognosis. J Natl Cancer Inst 2006; 98(4):262-72.
[0109] 21. Paik S, Shak S, Tang G, et al. A multigene assay to predict recurrence of tamoxifentreated, node-negative breast cancer. N Engl J Med 2004; 351(27):2817-26.
[0110] 22. Whitfield M L, Sherlock G, Saldanha A J, et al. Identification of genes periodically expressed in the human cell cycle and their expression in tumors. Mol Biol Cell 2002; 13(6):1977-2000.
[0111] 23. Zhao H, Ljungberg B, Grankvist K, Rasmuson T, Tibshirani R, Brooks J D. Gene expression profiling predicts survival in conventional renal cell carcinoma. PLoS Med 2006; 3(1):e13.
[0112] 24. Miller L D, Smeds J, George J, et al. An expression signature for p53 status in human breast cancer predicts mutation status, transcriptional effects, and patient survival. Proc Natl. Aad Sci USA 2005; 102(38):13550-5.
[0113] 25. Wang Y, Klijn J G, Zhang Y, et al. Gene-expression profiles to predict distant metastasis of lymph-node-negative primary breast cancer. Lancet 2005; 365(9460):671-9.
[0114] 26. Beer D G, Kardia S L, Huang C C, et al. Gene-expression profiles predict survival of patients with lung adenocarcinoma. Nat Med 2002; 8(8):816-24.
[0115] 27. Ross D T, Scherf U, Eisen M B, et al. Systematic variation in gene expression patterns in human cancer cell lines. Nat Genet 2000; 24(3):227-35.
[0116] 28. van't Veer L J, Dai H, van de Vijver M J, et al. Gene expression profiling predicts clinical outcome of breast cancer. Nature 2002; 415(6871):530-6.
[0117] 29. Rosenwald A, Wright G, Wiestner A, et al. The proliferation gene expression signature is a quantitative integrator of oncogenic events that predicts survival in mantle cell lymphoma. Cancer Cell 2003; 3(2):185-97.
[0118] 30. Gasinska A, Fowler J F, Lind B K, Urbanski K. Influence of overall treatment time and radiobiological parameters on biologically effective doses in cervical cancer patients treated with radiation therapy alone. Acta Oncol 2004; 43(7):657-66.
[0119] 31. Corvo R, Paoli G, Giaretti W, et al. Evidence of cell kinetics as predictive factor of response to radiotherapy alone or chemoradiotherapy in patients with advanced head and neck cancer. Int J Radiat Oncol Biol Phys 2000; 47(1):57-63.
[0120] 32. Begg A C, Haustermans K, Hart A A, et al. The value of pretreatment cell kinetic parameters as predictors for radiotherapy outcome in head and neck cancer: a multicenter analysis. Radiother Oncol 1999; 50(1):13-23.
[0121] 33. Struikmans H, Kal H B, Hordijk G J, van der Tweel I. Proliferative capacity in head and neck cancer. Head Neck 2001; 23(6):484-91.
[0122] 34. Jalava P, Kuopio T, Juntti-Patinen L, Kotkansalo T, Kronqvist P, Collan Y. Ki67 immunohistochemistry: a valuable marker in prognostication but with a risk of misclassification: proliferation subgroups formed based on Ki67 immunoreactivity and standardized mitotic index. Histopathology 2006; 48(6):674-82.

[0123] As a person skilled in the art will readily appreciate, the above description is meant as an illustration of implementation of the principles this invention. This description is not intended to limit the scope or application of this invention in that the invention is susceptible to modification, variation and change, without departing from spirit of this invention, as defined in the following claims.

What is claimed:

1. A method for predicting patient response to cancer treatment, comprising:
measuring in a biological sample from a patient the levels of gene expression of a plurality of genes selected from the groups consisting of Group A, B, C, D, E, F, G, H, I, J, and K, defined below:
a. Group A: Genes corresponding to transcripts associated with the Unigene ID Nos. Hs.121025, Hs.126714, Hs.132966, Hs.141125, Hs.156346, Hs.184339, Hs.1973, Hs.270845, Hs.294088, Hs.300701, Hs.308045, Hs.334562, Hs.339665, Hs.369279, Hs.405925, Hs.418533, Hs.433615, Hs.434250, Hs.435570, Hs.436912, Hs.438550, Hs.446017, Hs.472716, Hs.477879, Hs.503749, Hs.522632, Hs.524571, Hs.532968, Hs.533059, Hs.535012, Hs.58992, Hs.591697, Hs.603315, Hs.613351, Hs.642598, Hs.656, Hs.75318, Hs.88523, Hs.89497, Hs.93002, Hs.615092, Hs.62180, Hs.532803, Hs.240, Hs.444028, Hs.58974, Hs.104019, Hs.1594, Hs.178695, Hs.183800, Hs.194698, Hs.20575, Hs.226755, Hs.234545, Hs.239, Hs.244580, Hs.250822, Hs.28465, Hs.368710, Hs.374378, Hs.386189, Hs.436187, Hs.469649, Hs.476306, Hs.482233, Hs.497741, Hs.506652, Hs.509008, Hs.514033, Hs.514527, Hs.592049, Hs.592116, Hs.593658, Hs.631699, Hs.631750, Hs.644048, Hs.72550, Hs.75066, Hs.77695, Hs.83758, Hs.152385, Hs.165607, Hs.203965, Hs.208912, Hs.226390, Hs.26516, Hs.35086, Hs.368563, Hs.403171, Hs.409065, Hs.434886, Hs.436341, Hs.444082, Hs.485640, Hs.498248, Hs.513126, Hs.5199, Hs.520943, Hs.534339, Hs.558393, Hs.567267, Hs.575032, Hs.591046, Hs.591322, Hs.592338, Hs.81892, Hs.83765, Hs.88663, Hs.99480, and Hs.484950;
b. Group B: Genes corresponding to transcripts associated with the Unigene ID Nos. Hs.524571, Hs.226390, Hs.436187, Hs.472716, and Hs.194698;
c. Group C: Genes corresponding to transcripts associated with the Unigene ID Nos. Hs.368563, Hs.444028, Hs.58992, Hs.575032, and Hs.591697;
d. Group D: Genes corresponding to transcripts associated with the Unigene ID Nos. Hs.436187, Hs.194698, Hs.250822, Hs.93002, and Hs.308045;
e. Group E: Genes corresponding to transcripts associated with the Unigene ID Nos. Hs.58992, Hs.522632, Hs.446017, Hs.240, and Hs.533059;
f. Group F: Genes corresponding to transcripts associated with the Unigene ID Nos. Hs.58974, Hs.75318, Hs.506652, Hs.184339, and Hs.81892;
g. Group G: Genes corresponding to transcripts associated with the Unigene ID Nos. Hs.524571, Hs.226390, Hs.436187, Hs.472716, Hs.194698, Hs.386189, Hs.409065, Hs.5199, Hs.434250, and Hs.93002;
h. Group H: Genes corresponding to transcripts associated with the Unigene ID Nos. Hs.368563, Hs.444028, Hs.58992, Hs.575032, Hs.591697, Hs.631750, Hs.250822, Hs.77695, Hs.194698, and Hs.631699;
i. Group I: Genes corresponding to transcripts associated with the Unigene ID Nos. Hs.436187, Hs.194698, Hs.250822, Hs.93002, Hs.308045, Hs.444082, Hs.1594, Hs.184339, Hs.5199, and Hs.409065;
j. Group J: Genes corresponding to transcripts associated with the Unigene ID Nos. Hs.58992, Hs.522632, Hs.446017, Hs.240, Hs.533059, Hs.513126, Hs.132966, Hs.532803, Hs.239, and Hs.58974; and
k. Group K: Genes corresponding to transcripts associated with the Unigene ID Nos. Hs.58974, Hs.75318, Hs.506652, Hs.184339, Hs.81892, Hs.591322, Hs.156346, Hs.72550, Hs.374378, and Hs.77695;
creating a signature score from said levels of gene expression; and
correlating the signature score with a predicted response to cancer treatment.

2. The method of claim 1, wherein the levels of gene expression are measured by determining the levels of expression of a group of polynucleotide sequences selected from the group consisting of:
l. the sequences SEQ ID NOS: 1-110;
m. the sequences SEQ ID NOS: 27, 85, 62, 23, and 51;
n. the sequences SEQ ID NOS: 88, 45, 31, 102, and 32;
o. the sequences SEQ ID NOS: 62, 51, 57, 40, and 11;
p. the sequences SEQ ID NOS: 31, 26, 22, 44, and 29;
q. the sequences SEQ ID NOS: 46, 37, 67, 6, and 106;
r. the sequences SEQ ID NOS: 27, 85, 62, 23, 51, 61, 90, 97, 18, and 40;
s. the sequences SEQ ID NOS: 88, 45, 31, 102, 32, 75, 57, 79, 51, and 74;
t. the sequences SEQ ID NOS: 62, 51, 57, 40, 11, 93, 48, 6, 97, and 90;
u. the sequences SEQ ID NOS: 31, 26, 22, 44, 29, 96, 3, 43, 55, and 46; and
v. the sequences SEQ ID NOS: 46, 37, 67, 6, 106, 104, 5, 77, 60, and 79.

3. The method of claim 1, wherein said cancer is breast, renal, or lung cancer.

4. The method of claim 3, wherein said measuring is carried out on RNA from said biological sample.

5. The method of claim 4, wherein said biological sample is from a tumor, a cancerous tissue, a pre-cancerous tissue, a biopsy, a tissue, lymph node, a surgical excision, blood, serum, urine, an organ, or saliva.

6. The method of claim 1, wherein the cancer treatment comprises radiotherapy, fractionated radiotherapy, chemotherapy, or chemo-radiotherapy.

7. A microarray comprising:
a solid substrate and a plurality of nucleic acid probes capable of detecting the levels of gene expression of a plurality of genes selected from the groups consisting of Group A, B, C, D, E, F, G, H, I, J, and K, defined below:
a. Group A: Genes corresponding to transcripts associated with the Unigene ID Nos. Hs.121025, Hs.126714, Hs.132966, Hs.141125, Hs.156346, Hs.184339, Hs.1973, Hs.270845, Hs.294088, Hs.300701, Hs.308045, Hs.334562, Hs.339665, Hs.369279, Hs.405925, Hs.418533, Hs.433615, Hs.434250, Hs.435570, Hs.436912, Hs.438550, Hs.446017, Hs.472716, Hs.477879, Hs.503749, Hs.522632, Hs.524571, Hs.532968, Hs.533059, Hs.535012, Hs.58992, Hs.591697, Hs.603315, Hs.613351, Hs.642598, Hs.656, Hs.75318, Hs.88523, Hs.89497, Hs.93002, Hs.615092, Hs.62180, Hs.532803, Hs.240, Hs.444028, Hs.58974, Hs.104019, Hs.1594, Hs.178695, Hs.183800, Hs.194698, Hs.20575, Hs.226755, Hs.234545, Hs.239, Hs.244580, Hs.250822, Hs.28465, Hs.368710, Hs.374378, Hs.386189, Hs.436187, Hs.469649, Hs.476306, Hs.482233, Hs.497741, Hs.506652, Hs.509008, Hs.514033, Hs.514527, Hs.592049, Hs.592116, Hs.593658, Hs.631699, Hs.631750, Hs.644048, Hs.72550, Hs.75066, Hs.77695, Hs.83758, Hs.152385, Hs.165607, Hs.203965, Hs.208912, Hs.226390, Hs.26516, Hs.35086, Hs.368563, Hs.403171, Hs.409065, Hs.434886, Hs.436341, Hs.444082, Hs.485640, Hs.498248, Hs.513126, Hs.5199, Hs.520943, Hs.534339, Hs.558393, Hs.567267, Hs.575032, Hs.591046, Hs.591322, Hs.592338, Hs.81892, Hs.83765, Hs.88663, Hs.99480, and Hs.484950;
b. Group B: Genes corresponding to transcripts associated with the Unigene ID Nos. Hs.524571, Hs.226390, Hs.436187, Hs.472716, and Hs.194698;
c. Group C: Genes corresponding to transcripts associated with the Unigene ID Nos. Hs.368563, Hs.444028, Hs.58992, Hs.575032, and Hs.591697;
d. Group D: Genes corresponding to transcripts associated with the Unigene ID Nos. Hs.436187, Hs.194698, Hs.250822, Hs.93002, and Hs.308045;
e. Group E: Genes corresponding to transcripts associated with the Unigene ID Nos. Hs.58992, Hs.522632, Hs.446017, Hs.240, and Hs.533059;
f. Group F: Genes corresponding to transcripts associated with the Unigene ID Nos. Hs.58974, Hs.75318, Hs.506652, Hs.184339, and Hs.81892;
g. Group G: Genes corresponding to transcripts associated with the Unigene ID Nos. Hs.524571, Hs.226390, Hs.436187, Hs.472716, Hs.194698, Hs.386189, Hs.409065, Hs.5199, Hs.434250, and Hs.93002;
h. Group H: Genes corresponding to transcripts associated with the Unigene ID Nos. Hs.368563, Hs.444028, Hs.58992, Hs.575032, Hs.591697, Hs.631750, Hs.250822, Hs.77695, Hs.194698, and Hs.631699;
i. Group I: Genes corresponding to transcripts associated with the Unigene ID Nos. Hs.436187, Hs.194698, Hs.250822, Hs.93002, Hs.308045, Hs.444082, Hs.1594, Hs.184339, Hs.5199, and Hs.409065;
j. Group J: Genes corresponding to transcripts associated with the Unigene ID Nos. Hs.58992, Hs.522632, Hs.446017, Hs.240, Hs.533059, Hs.513126, Hs.132966, Hs.532803, Hs.239, and Hs.58974; and
k. Group K: Genes corresponding to transcripts associated with the Unigene ID Nos. Hs.58974, Hs.75318, Hs.506652, Hs.184339, Hs.81892, Hs.591322, Hs.156346, Hs.72550, Hs.374378, and Hs.77695.

8. The microarray of claim 7, wherein the plurality of nucleic acid probes are capable of detecting the expression of a group of sequences selected from the group consisting of:
l. the sequences SEQ ID NOS: 1-110;
m. the sequences SEQ ID NOS: 27, 85, 62, 23, and 51;
n. the sequences SEQ ID NOS: 88, 45, 31, 102, and 32;
o. the sequences SEQ ID NOS: 62, 51, 57, 40, and 11;
p. the sequences SEQ ID NOS: 31, 26, 22, 44, and 29;
q. the sequences SEQ ID NOS: 46, 37, 67, 6, and 106;
r. the sequences SEQ ID NOS: 27, 85, 62, 23, 51, 61, 90, 97, 18, and 40;
s. the sequences SEQ ID NOS: 88, 45, 31, 102, 32, 75, 57, 79, 51, and 74;
t. the sequences SEQ ID NOS: 62, 51, 57, 40, 11, 93, 48, 6, 97, and 90;
u. the sequences SEQ ID NOS: 31, 26, 22, 44, 29, 96, 3, 43, 55, and 46; and
v. the sequences SEQ ID NOS: 46, 37, 67, 6, 106, 104, 5, 77, 60, and 79.

9. The microarray of claim 8, wherein said plurality of probes each comprise DNA sequences.

10. The microarray of claim 9, wherein said plurality of probes are capable of hybridizing to the sequences of at least one of the groups I-v of claim 5 under the hybridization conditions of 6×SSC at 65° C.

11. The microarray of claim 10, wherein said plurality of probes each comprise from about 15 to 50 base pairs of DNA.

12. A kit comprising the microarray of claim 8 and directions for its use.

13. A method of treating cancer comprising
measuring in a biological sample from a patient the levels of gene expression of a plurality of genes selected from the groups consisting of Group A, B, C, D, E, F, G, H, I, J, and K, defined below:
a. Group A: Genes corresponding to transcripts associated with the Unigene ID Nos. Hs.121025, Hs.126714, Hs.132966, Hs.141125, Hs.156346, Hs.184339, Hs.1973, Hs.270845, Hs.294088, Hs.300701, Hs.308045, Hs.334562, Hs.339665, Hs.369279, Hs.405925, Hs.418533, Hs.433615, Hs.434250, Hs.435570, Hs.436912, Hs.438550, Hs.446017, Hs.472716, Hs.477879, Hs.503749, Hs.522632, Hs.524571, Hs.532968, Hs.533059, Hs.535012, Hs.58992, Hs.591697, Hs.603315, Hs.613351, Hs.642598, Hs.656, Hs.75318, Hs.88523, Hs.89497, Hs.93002, Hs.615092, Hs.62180, Hs.532803, Hs.240, Hs.444028, Hs.58974, Hs.104019, Hs.1594, Hs.178695, Hs.183800, Hs.194698, Hs.20575, Hs.226755, Hs.234545, Hs.239, Hs.244580, Hs.250822, Hs.28465, Hs.368710, Hs.374378, Hs.386189, Hs.436187, Hs.469649, Hs.476306, Hs.482233, Hs.497741, Hs.506652, Hs.509008, Hs.514033, Hs.514527, Hs.592049, Hs.592116, Hs.593658, Hs.631699, Hs.631750, Hs.644048, Hs.72550, Hs.75066, Hs.77695, Hs.83758, Hs.152385, Hs.165607, Hs.203965, Hs.208912, Hs.226390, Hs.26516, Hs.35086, Hs.368563, Hs.403171, Hs.409065, Hs.434886, Hs.436341, Hs.444082, Hs.485640, Hs.498248, Hs.513126, Hs.5199, Hs.520943, Hs.534339, Hs.558393, Hs.567267, Hs.575032, Hs.591046, Hs.591322, Hs.592338, Hs.81892, Hs.83765, Hs.88663, Hs.99480, and Hs.484950;
b. Group B: Genes corresponding to transcripts associated with the Unigene ID Nos. Hs.524571, Hs.226390, Hs.436187, Hs.472716, and Hs.194698;
c. Group C: Genes corresponding to transcripts associated with the Unigene ID Nos. Hs.368563, Hs.444028, Hs.58992, Hs.575032, and Hs.591697;
d. Group D: Genes corresponding to transcripts associated with the Unigene ID Nos. Hs.436187, Hs.194698, Hs.250822, Hs.93002, and Hs.308045;
e. Group E: Genes corresponding to transcripts associated with the Unigene ID Nos. Hs.58992, Hs.522632, Hs.446017, Hs.240, and Hs.533059;
f. Group F: Genes corresponding to transcripts associated with the Unigene ID Nos. Hs.58974, Hs.75318, Hs.506652, Hs.184339, and Hs.81892;
g. Group G: Genes corresponding to transcripts associated with the Unigene ID Nos. Hs.524571, Hs.226390, Hs.436187, Hs.472716, Hs.194698, Hs.386189, Hs.409065, Hs.5199, Hs.434250, and Hs.93002;
h. Group H: Genes corresponding to transcripts associated with the Unigene ID Nos. Hs.368563, Hs.444028, Hs.58992, Hs.575032, Hs.591697, Hs.631750, Hs.250822, Hs.77695, Hs.194698, and Hs.631699;
i. Group I: Genes corresponding to transcripts associated with the Unigene ID Nos. Hs.436187, Hs.194698, Hs.250822, Hs.93002, Hs.308045, Hs.444082, Hs.1594, Hs.184339, Hs.5199, and Hs.409065;
j. Group J: Genes corresponding to transcripts associated with the Unigene ID Nos. Hs.58992, Hs.522632, Hs.446017, Hs.240, Hs.533059, Hs.513126, Hs.132966, Hs.532803, Hs.239, and Hs.58974; and
k. Group K: Genes corresponding to transcripts associated with the Unigene ID Nos. Hs.58974, Hs.75318, Hs.506652, Hs.184339, Hs.81892, Hs.591322, Hs.156346, Hs.72550, Hs.374378, and Hs.77695; and
administering a therapeutically effective amount of one or more cancer treatment agents selected from the group consisting of: cancer chemotherapeutic agents and radiation; or
performing surgery on the patient; or a combination thereof.

14. The method of claim 13, wherein the levels of gene expression are measured by determining the levels of expression of a group of polynucleotide sequences selected from the group consisting of:
l. the sequences SEQ ID NOS: 1-110;
m. the sequences SEQ ID NOS: 27, 85, 62, 23, and 51;
n. the sequences SEQ ID NOS: 88, 45, 31, 102, and 32;
o. the sequences SEQ ID NOS: 62, 51, 57, 40, and 11;
p. the sequences SEQ ID NOS: 31, 26, 22, 44, and 29;
q. the sequences SEQ ID NOS: 46, 37, 67, 6, and 106;
r. the sequences SEQ ID NOS: 27, 85, 62, 23, 51, 61, 90, 97, 18, and 40;
s. the sequences SEQ ID NOS: 88, 45, 31, 102, 32, 75, 57, 79, 51, and 74;
t. the sequences SEQ ID NOS: 62, 51, 57, 40, 11, 93, 48, 6, 97, and 90;
u. the sequences SEQ ID NOS: 31, 26, 22, 44, 29, 96, 3, 43, 55, and 46; and
v. the sequences SEQ ID NOS: 46, 37, 67, 6, 106, 104, 5, 77, 60, and 79.

15. The method of claim 14, wherein the one or more cancer treatment agents are selected from the group consisting of: paclitaxel, docetaxel, imatinib mesylate, sunitinib malate, cisplatin, etoposide, vinblastine, methotrexate, adriamycin, cyclophosphamide, doxorubicin, daunomycin, 5-fluoruracil, vincristine, endostatin, angiostatin, bevacizumab, and rituximab.

16. The method of claim 14, wherein the one or more cancer treatment agents is radiation.

17. The method of claim 14, wherein said cancer is breast, renal, or lung cancer.

18. The method of claim 13, comprising performing surgery on the patient.

The application's sequence listing, which the Patent Office published only in electronic form, follows.

SEQUENCE LISTING (106 sequences)

SEQ ID NO: 1 - DNA, 1296 bp, Homo sapiens
ctaccaccggcgtgcgttcgcaggtagatcgcggtgccagttgccatggagccggccgggccctgtggcttctgcccggcgggggaggtccagccagcgcgttacacctgccctcgctgtaatgcgccctactgctcgctgcgctgctaccggacgcatggcacctgcgcagaaaacttctaccgtgaccaggtgctgggagagctccgcggttgcagcgctcctcccagccgcctagcaagcgccctacgccggctgcgtcagcaacgcgagaccgaggacgagcctggggaagcaggcctcagctccggcccggcgcccggcggcctatcgggactctgggagcggctggcgccgggcgaaaaagctgccttcgagcggctgctgagccgcggtgaggccgggcggctgctgcctccatggcggccgtggtggtggaaccgcggagccggaccgcagcttctggaggagctggataatgccccgggtagtgacgccgcggagctggagctcgcccctgcgaggaccccgccggattctgtgaaagatgcctccgccgcggagcccgcggccgccgagcgggttcttggagatgtcccgggggcctgcacgcccgtcgtacccacccgcatccccgcgatagtcagcctgagccgcggcccagtctcgccgctcgtgcgcttccagctgcccaatgtgctgttcgcctacgcgcatactctcgccctgtatcacggcggtgacgacgcgctgctctctgacttctgtgccacactgctcggcgtttccggagccctgggtgcccagcaagtcttcgcctctgcggaagaagccctgcaggcggcagcccacgtgctggaagcaggcgagcacccgccggggcccctgggcacacgaggggctatgcacgaggtcgcccgcatcctgctgggcgagggcccgaccaaccagaaaggctacacgctggcagcactgggggacctggcacagaccctgggccgtgcccggaaacaggccgtggctagagaagagcgagatcatctttaccgggcccggaaaaagtgccagttcctcctggcctggaccaacgaaaatgaggcggccctcacacccctggccctagactgcgccagggctcaccaagcccatgctgtggtagccgaggaggtggccgccctcactggggagctggagcggctttggggaggccccgtgccacctgccccaagaactctcattgaggagctccctagctgaacgggttaccctggtcattaataaagctgtgactggtca

SEQ ID NO: 2 - DNA, 47786 bp, Homo sapiens
ggttagtgatgaggctagtgatgaggctgtgtgcttctgagctgggcatccgaaggcatccttggggaagctgagggcacgaggaggggctgccagactccgggagctgctgcctggctgggattcctacacaatgcgttgcctggctccacgccctgctgggtcctacctgtcagagccccaaggtaaaaaggccgggaaagcatcttaatttagcgtgcagtctcagctggtcctgccattccagataaacagagaaaccattctgaattggggatgggggtgaggatgggaacaggagtctgtgtcctgctggggcaggccattggaagatgtgaaagagttgtctatttccttccaccggagggagacttcaggtcagccaggtgtctggagtatgaaccatgtatcagcaccgaaaggttctagaagtcagactttcgggcagtgtgtcactaactctcagcatgctggcctggctcggcccacagcaaggtcttctcgcctccctttgggtaaatactgaggggtgcctctgcaggacgggacctctgccagactccactccatacccagagaagcagggaaaccaaaattggagtcagccttgaggtgtagctgttgagccctcagcagctggggagagctggcggatgctgccctccccccagtttcctaatggtgttgtttaaaaagggtcaggggacgggggaacagatggtgggaagagcacagtgcagacacctggcaccggctctgaaggcagcatggcagctacaccgttggctgggaagggtgtgcccctgaagaagtcgtttacattctcgagtcaattttcctggagtgtacaatggacctgtgggaaagcctgtatgaaagggtaatgatgagggacctagcacagtgtccaatattttataggaactggaattgagctcataggagctcaattttattggcattgctgttgttggatggttaaaggggtggtatcccttttctcagactcccctgaaatgtatggtttgctttgaacccagagactgatgacaggtctgccggtgtggttgggtgcagccttaagttgctacgggaaagtgttggagggggagaagtcagaggtaaccttgccccctccctcaattccagatgaggaaattcaggcctgaaaagggaaagtgaccacctcaaagtctcatgccttggaggacccagcaggaatccaagacctctgaaaaggaccggcagggctcttgccacggctgggggtgtggtcatggtaacacaggttttccatccatggaaggtacctgagggattttctcttcctccctagggccagcatcagaggagtgaatagctcagttagctcatctcaggggccatgtgccctcggaggtggtttgccactttcacggttggactgagttggagagaaacagagacccacccaggggtggggacaagctccctgcaactcaggacttgcagatcacttgcccaagtggctccctagctcctggctcctggcccggggcctgggactctccccgaagtggggctggccactgtgaggaaccgactggaggcagggacctcttggatgccccaggcagttgggatgccacttctgataaagcacgtggtggccacagtaggtgcttggttgctccacagcctggcccgagctcagcgctgcagaaagaaagtgaaagggaaaaagaactgcggggaggcggggaggtaggatgaccagcggacgagctgccacagacttgccgcggccccagagctggcgggagggagaggccaccagcagcgcgcgcgggagcccggggaacagcggtaggtgaccaaagtctcctctgtaacccctaaggtcgggctgagaatcgaggctccgagactgtcagctacttgctcaaggtcacacagcaagtctgggaggatggggggatggaatatgcaaaatgtagggccgggaaacacctcgtttccagcatccccgcaacgactctgcgcgggaaccaggagccgggaacccggagcttggcttgctgtgcccagagctccggggccgtgggcgggtggcaggaaagcctggcggcagcttctgcagagaagccggagcgcagactgggagcgcggagcagacacactcccccggccacccttggccgactccgcgcgcccgggatcctgcagaggtgcgcgcccttcttgtacgccagactttggaccagggccgccgttccctgagcttcactttccctgttgggtcatattccatctctaactctggaatcttgggtattgggctctccaggcggggggccctgctcagggaggcagtagggagccaaacctttaaccagaggatgggataagtcctcaactctcgttgaacatcttggcgaaggtgtgtgttgttgggaggggtgggggagggatccccccggactgaaccgatctcttgatctctcacttctctacctcgctttggggccctgagtcacaccctctaaggagagaggctaaagcgccccggaaagccagcgtgcgaatgccggggtgggagtgggagattggatctccctggggtccaggaaagccggaatcggagccaccatgcttagcttagtctggaactcttaaaagccgcggtcctcctgagtcccacagcccctctccaccctaggtggcacaggagaggtggcaaaagcctagaagttcaaggcatggctccctccccagccgcagcctggagtgtctaactttggcaggaagtcttccgtttctgctccccactccagagaaaaaataaataaatacttctccggagtgagattaaggaaacaggtacttcttcctcttggagaaagaggagccaaaggaacttgactccaacaaatgatcaccttgcaaacccccggctcccttaggggatgacctggtctccaacaatctcagagcgtttggaggcagggtctttggagatgactgagtggggaatcccaggctccccacacatgaacatcacctgggatgatcaacctgttcaggatgtaggttcccgggctcacccccaggcccggttggctaggcctggggtgaggctgagatcctgcaggttaaaccatctatcccaggtgactccaatgttcgtttgtggggcaaaagtccctcaagtcagagacactgggaggcgctgatgtggtctcatctctttactctctccctgttacaaaacctctatcagaaaaggagtaccaggaggtgttttgttttgttttgcttaacgccacatagcaagcagtttgcagacgcaggatttgaaccctggtctactgagagcccagcccagtgcagcaagcagatgtgaacctccacaaatgcagggcaggtcccaggcagtcagagagaaacctgttgatacccagtctgtctgatggctggggcttggtttcatgtcctaagacccagcctcagataccttgagaagagcagaatcagaaattaacccaaggaaactctggattagttccaggcaatcagggaagtggctggagggaggtaggaaacttctggacttagcctcagatttgccttgagtcacactgacaagtgacttcccctctctgaggttcatctgtaaaatggataaaacatgagagcttgcttgatgatgtctgatgtgtacagaaaaagcactttagaaaaccaccaaagaatattcatgcattgggaataattattatagatcctaaagggattgtttagaaagatcagagaggggccgggagcagtggttcacacctgtaatcctagcactttgggaggccgaggcgggtggattgcttgaggccaggagttcaagaccagcctgggcaacctggagaaaccccaactctactaaaacacttttttgtgttttagccgggcatggtggtgcacacctgtaatctcaactacttgggaggctgaggcacgagaatcacttgaacccaagaggcggagtttacccgagaggtggaggttacccgagagctgagattgcaccactgcacgccagcctgggcaacagagcaagactgtctcaggaaaaaaaaaagagagagaaaaaagtcagagaggaaagcataggcagatgggaggtttccaaagaccaagacacacacagtcaaaagacagttcagaaaggggcattagttaccaccgattctcataggaaggacatagatagttttcagattccttcaatccttctgacatcaaggacaaagtctctgattttccctgatgtttgacagtgccctaatgcttgctaagatttctttttaacaaagtggtaaagaagctgagattattttagtaacattgtttctttttcaaccacaagtgatactgttggtttggttttgcttttccgtttatacatggaaaaaaaagttttctttttgtaaaatcatggtaaaatacatataacataaaatttaccattttaaccactttcaaatgtacatttcagtggcattaaatatttcaaactgttgtgcaacctccgctaccatccatctccagaactttttcatcctcccaaactgaaactctacccaataagcaataactccccactgccccttccacccagctcgtggtaactccaacttcctgtctctatgttttgggctactctagacaccgcctataaatagaattacgtgatatttgtctttttgtgcctggcttctttcacttagcataatgtcttccaggttcatccatgtcgtgccatgtgtaattcctttctatggcggaatagtattctaatatgtggatatcccatattttgttcatccattcatttgttgatagacacttgggttgttcctacctcttgactattgtgaataatcttgctaggtacatgggtggacaaatatctgtctgactccccgctttcaactctagaaagctttcttttaaaatcggtctatttaagtttctttaaaaagttaatttaagaaaaatactaaggtaaattgtagaacaggtgatatgtcaatatgaccccaaaaattgtaaagatggaagacgaatgcctgcagtttgggaaaccggatgagaggaaagacctggaagctattgtaaaatctatgctgagggtctggtgactactagaccaagggcatggcagcagagggcagctgaaagacttcaggaaggaaagatataagaattaagaaaggggcctggtgcagtggctcatgcctgtaattccatcaccttgggaggtcaaggcaggatgatggcttgagaccaggagttcaagaccagcctgggcaacagagcaagacctttttttaggaaaaaaatatataaattaataaaaataaatttttgaaaatacagattccaggccgggcatggtggctcacacctgtaaccccagcactttgggaggctgaggccggtggatcacctgggatcaggagttcgagaccagcctgggcaacatggtgaaacaccgtctctcctaaaaatacaaaattagccgggtgtagtggtgcatgcctgtaatcccagctactcggtaggctggtggaggagaatcgcctgaacccaggaggcggagattgcggtgagccgagatcacaccattgcactccagcctgggcaacaagagtgaaactccgtctcaaaaaaaatgaaagaaaatacagattcctgggcccggctgcagactccctgaatagaatcactgggggtgaggcccaggacgctgtgtttttaacacccttcccaggtaattctcactcacagccaagcctgccgatggctggactccgtagtcagatctcagcaagcaggactggctcgtggttcatcttggggtctccagcacccagcagagtgctggcggggggactgtgttaagtagagccggatgggtcaggactggagtgtggggcctggctttgctaactgcagtcacaagatcctcatcactccaccccctaccccagcaccagggtcaggttcccttccaggaaaaacttgttggactcctttccaggtcattgactgcagttaggagtggcatgcagaagggaggctatctggagctgggacagaccaggcaagcggggaagggaactcttatcccaaccctgcattctggacagggaccgaaggtctcctggctgcagctcatacagctcatcttcattctcatcctgggaccaccaggcccctcacccacaataactttaccctttactggcaaatgcacaagctggagatgatggcccattcgagttttaagattttccaagttgttatgaggtcagtgtcctcaatcgggacccagagaagataggtggcttgcctgaactttcagagggggcatctgtggtgtcttttgtggggtcctgtaggatttccacgtccctcttggaggaaaaatagaagtaagttgtctcaggtcagattgtctgggaagccaagtaggagatggagatttgcatataggaggtttactggggacattcacaggagggaacacccgaaggaaaagggaagaaagcagggttgggaagcagcaggagttgaggtgcaatgcagtcacaacagaggtcttagccaatcccatagggagcactcaagctgggacagcaaggaagctagaccttcacatccctcatctacctccgtcctcccatacaggcatagcctcccccatgatgaacactcagcaccagactgatacatttgttataatcaatgaacctacattgatgcatcattattacccaaggtccatggtttgtttacatgagggtttactcttggtgttgtacattctgtgggtttggacagatacatgatgtaatgtatatgacattatagtatcacacagactcatttcacttgtgactgagcttgtccttctttctttaacctgcctccaactgctgagaagccctttggctagggattgcagccaattttaatttgttttccactttcctgctctgaagttactttgtttgccagaggctggttggttcaaacccaaagggcagggagctgcaatggaaatccattcaacggtgctggaattgggatggcaaaaaggagcagcaggcaggtgtcagcagggagcagctctttgcatcccacagttcccagggagcttaccattctttcattcattcattcatcctttcatttatgagacaaagtctcactctgttgcccaggttggagtgcagtggcacagtcattgctcactgcagcctcaagctcctgagctcaagccatcctcctgcctcagcctcccaagtagccgagactacaagggcactccaccacacccagctaatttttgtatcttttatttctgaagagatggggtttcactatgttgcccaggctggtctcaaactcctggcctcaagtcatcctccctcctcagcctcccaaagtgctgggattacaggtgtgatctcagacagcttacctcttaatcacctttccatctgagctggcagcagagctgggaaagtgcacccaacaccccagatgctgcaactttagtgcttcctgctccttctctgtgtggaactggcctgtttgggtacccagggccagtcccctccaagaccctctgtagaaaaagaccctactgtacacctcaattccattgcaggacaggacataattgaatcctgcctctccctgccccagtcacccatccctcccaagccattatcttgggacctgcaagggcctccaagccaagggtggcaaatccaaataccaaaggggccataatgatgtaaaatgtgtccaggcagaaggcaatagggagtagtggggcctctggtaacaattgtgtgtactctatatagagacattgtgatggtgatttagacacacacacacttatattggcttgggaaacaaaacaaataggcctatcgactggattcaacttttgattttgcagccaagcccctgtggcacagctgaggagcttgcaggtcagaaaggggatttagagccaaccaatagcaatatctccagacctctcctgacacgaagctcatctgacctcctgcccccattacacacatacacatgcacacacatgcatgcaggcacatgcacgcacgtcttctagtctccctgccttgaggacaaatgatcagatcctgcaactgtttccaggcccataagcccctgagcattgcagtgttgctacatgccttagtttcctctccgtctcctgtgacctcctcgtgccactccaggaagtgaaagtcttgagtgagaccagtagtttctcttaagtcctctctctgtctcgttctcctgggatatctacacttggtttgcaaacagcaggctggagagtgaggggcttcttcctctacatccagctcctcccccatcctgctccaagtccagcatgttcctatctcttccccaggaccctgggctcttgggcacaaatcaagccatcaccagacagcctgtggggtggcaagagcagaggtttgtttctttgtgaacatctataggtaccaggctctgtgcaggccctattgttggtgagccatagaggtaccaacctcaccccatgaatcctcctttgtttcttttcttttcaacccctgggcctttaaaccttcgattaactgcccagtgcagcccaggtcatggtacactatgatctttggttcacatgagggttttctcttcattaatgtccctatttcccatactgggtgcccattctaatgcatttcaggtgtatctttctgtttgtatgtgctcttataaaacatgttttgccttttttttttttttttagatggagtctcactctgtcacccaggctgagttttctatttttagtagagatggggttttaccaccttggccaggctggtctcaaactcctgacctcaggtgatccacccgcctcggcctcccaaagtgctggaattacaggtgcgagtcaccacgcctggccacagtttcttacttttgcattctgtactatgtttttaggatctacttgccttgcttctgatgcatttgatctttgcttctaatcacggacattgttctctatggagtgcaggggttacttttcacctgtccacacccccagtgatggacacctaggtgacctccaactctctgtcaccacaaataacacagcagtaaccatcctcagatgggttctcctggggagttgtgggaacatttcttcaggatatatagacccaagagctgaattgccaggtggtaggatctacatatccttagatattctacatgatgccaggtcgttctccagagcggccccatccatctacattcccacaaacccgtgtaaccaacacttggcatttcccagatgtctaacttttgccagttgtacagtatcaagtgtcactttgctgttttatttttggagtttacatcttagtaccacttactcgctaagtcactttaggtaagtcacaacaacccagtgacataagcactgtgccaacaaaatgcagtcgattctgtgactcagagaggttgagtaacatttgcaaagtcacacagcaagtgtggaactaagatttgaacccagagcctgcacccttaaccactatgctattattatgttttgtctctctcctaaaatatcatctgggtctacattgcaagcctctttggcagggactgtgtggtaaacctctttggggccagtaaggaactgagctcagtgactttcttacggggtgctcagtgaatcattgttttacagctttagaggggaaaagtgagagatgtttcttagagtttatctggaggactacagggtgcatgagcaaaagcggaactcatttgagctactacccccacaaagaagctgtttggggtctggtcatggtagataggcattcctaggcccctggcttcccaacaccatttggcccccggaagcagcttgtcatgaggttggggagcaggttggtgttggggggggccttgggggaaaggaaaaggagaagactgccaggcaacgaggaatcagaatctcaaaaagactcaattgaaggggctccaacactcgttgaaacggaggctcagagggctaaggtaatgtactcaggatcaaaggcagagcagaaactcaaaccatgtctctaggcacacagttcagaggtcttcccattattcctcaggaggagaagttcatggtcaagagtagggaagtattccttctcaagctttttttttttttgtctgagacagagtcttgctctgtcaccgaggctggagtgcagtggcgtgatctcggctcactgcaacctccgcctcccaggttcaagcaattttcctgcctcagcctcccaagtagctgggattataggcacccaccaccacgcccagctcatttttgtatttttgcagagacggggtttcaccatgctggtcaggctggtcttgaactcctgacctcaagtaatccgccagcctcggcctctcaaagtgctaggattataggcgtgagccaccacccctggcctccttctcatgctctttaatcacagttcagagcagtgctggaggcttttaggggtagcaaaagagccttcttctccctttcagtgcctccttagaccctcaaagatagactccccgcctctgggaagaaaacatctaatgaactggacgtaatctcagcgcctgcgtctgtaaaatggctataataacaacaatctcccagagttgccgttaacagttgaaacagaatagtaaatgcaaggcatctagcacagccccagacacagagaaatctcccctggtcactctcacagaggtaagaagcacattaataataaaaatggtcatcacgcatattgtactcaccatgcagaagttgtgctgccttaagctactgttcattgagcacttactggtcgccagtcccctttctaagggctccatgcaacttaactcccctaatcctatgagttgccaattattatcccccactttacagataaggaaactgaggctccaagtggtttaaaaaatgaacttacccagattgtagtgcgttggtaggtagggataacctgaaagttgggaaatttcaccccaaagctcaccatctgagctccattcatctcccaccagctgagatggaacgttatgctgttcccagaagagatgcatgcactgatcttcagatagtttaagtctgagttagaacattgtggcgacacctgatttccctcgggggagagagaggtgaattgttatttcagacacctgtttagtgtctacacttagcctttcaaatcctgcatgcagtgtgaagtggggatgaaaataaaccccaaaaaggacttttgatggcaaaaagatcaggaatattttctcgagttggatgtggaaggtggtggcccagggggaagcacagtttcaaagaggaccttctaaaaatactgcccatttaccaaaaagacacagaccgcgcctctgccctgcccccacatggctcctcaaaaggagaaattgtcttgccacccacgccttccctcgccggggtgctggggggccaacagcaattcaaaaaggctatagagtgggctgagactttggagatgggtagtttggttcaaatctcagcccactaatccctctgagcctgtctcttcatctgaaaaacaggaatacaaatagctgatgtgtaagttagaccaaatggggtaatgcctacgagtcatgtcatttggtacctggcacttgctggacactgtgaattctagttctatatcattgccacggatgaagagaggctgccatgcgcagaaacatgctgagagctgggagaaggtgagctagagggatacagtccctgccctcagggagagctgaagggctctctctcctgccacgggatgatcagggccatcttttccctccatcccgctctggcaatgtggtttggagaaacagtccaatgaaggggcctttgaagcacttcctaagcatctatagacataggaaacttggctctggggatagaggaaggtcccatgccaagattcaagtagatcttggtgtgactgggaggcagctgtggcgttgtggggaaacctagagtcttgggcctgaatttcagctttgacaccctctaatgtaatgggcttcctttgactgtaggcttcccacatagctggcaccccacacagaactcccttggccttctgatgatcctgcaggacaatcttttttgttttttgttttttgttttttttttgagatggtatctcactttgtcgcccaggctggagtgcagtggcgcagtcttggttcactgcagcctctgcctcccaggttcaagcgattctcctgcctcagcctcccaagtagctgggattacagaagcacgccaccatgcctggctaattttgtatttttagtagagacgggatttcaccatgttgcccgggctggtctcaaactcctgacctcaagtgatctgcctgcctcggcctcccacagtggtgggctgcaaggcaatcttcattctccagaactaatattgggaaaactgatgttcagagaggtcaagtgacttggctaaggcatcacagccagaattcagatgcaagctcctaaaccacatgaccttggacaagccatttcactgaggcgtgtgaacctcctctaagctcaaatgggcataacactctaccctgccttttccccagagctttttgggaactcagatggtgtggaggatggaggcagaagtccactgtgagctgcaaatccttgatcacccaagaggaagtgcttaaggtgcaggcttcagtcttagggaagcaggaagtggggcgctgaaatgtgtattgggggcttctgggagggggtttcttcttgtccaggttgagccaatgacgcagatcttaggccctctggtgactttttgcccaggcaacttctcagtggtggtgatggggagcgtggccagaccatccaagctgccctgctggctgtgggggccttttttttttttctgagacacagtctggctctatcacccaggctggagtgcagtggtgcaatctcagttcactgcagccttgacacctccccaggctcaagctatcctcccacctcagcctcctgagtagctggttctacagatgcacatcaccacgcccagctaagttttgtgttatttgtagagatagggcttcaccatgttgcccaggctggtctcaaactcctggactgaggtgatactcctgccttggactcccaaagtgctggaatttctacagatgtgagccaccatgcccggcctatggggcccttcttgttcctatgaagtctgcagggtccccttatgcaaaagaacagaaagctcggcttcacaaagtttgacctcggaagaaatggaagggaaagggtccctttgtcactctcacaaacgtaagaagcaaactaataatgatggccatcacacatattatactcaccatgtagaagctgtgctgccttaaacttctgttcattcagcacttactgattgccagtcccattgctaagggctccgcgtgacttaactcccctaatccttgtgagttgccaattattattcgcattttatagatatggaaactgaggctccaagtggtttaaaaaatgaacttgcccaggttacagtgtgttggtaggtaggggtagtctcaaagttggtaaattttacgccaaagctcacgatacttgccttctttcccttctcaatttatttctctgactgtgtgcttaaccacacagcagtgtcatccagagtttgaagcagagctcatcaataagtgggggtgggctaaatgtctccaggctcctccctgcggtccctcccaccatcccccatctgtgataccacctgtgtctctatgcttgagcccagacaggacaagggtgatcatttcattgggaacattttgactggggggaaagagcaccagcctgggagtcttggcagggggagtgggggagaaggggcaggggcagccaccgacaggctatgaggtcttgtgcaagtcacgtccttcccggggtctcagtcttgtcatctgcagagtgaaggaaagaggtcaagcttgaaggtccctggcagacccaatgccctgtgagaaaactgagtttgggtaacttattattttatagatatggaattatcttatagaaatgttatagatatggaatcattttatagatatggcccaaagtccaaagtcacacaactcattcacggagttgctaggatcagtctggagctcttgtcacgagatcacactgcctcaaagaggaggcagattgctgcaatgtaggttcttaataaagagcatgggtggaatgggaggcgggcatcaggcaggagctggggcaaaggtgtcttttctcactgctctgagagaacagattttgtgcctgtgtccctgaccaaggggctgggagaggtggagcatctcacccccaaccatctcccagctttggccctgctccaggaaaagggcggtggccccatctttcagttctgcttcctctagtcatggttggctgggatctcgctgcaagccggttatgtttgggttcctgcagcccccgctcaaccgtcatgaacaagtgggcccagccagtgccccagcttggactggaaagatcattctctgtgacatccgggggtctgtgctgagcctctccccaggcagtgaaagctgtggatgcgtgaaagaaaatgggtctctgggccgggtgtggtggctcacacctgtaatcccagcactttgggaggccaaggcgggtggatcacctgaggtcgggagttcgaaaccagcctgaccaacatggtgaaaccccatctttactaaaaataaaaaaattagccaggcatggtggcgggtgcctgtaatgccagctacttgggaggttgaagcaggagaattgcttgaatccgggaggcagaggttgcagtgagccaagattgcaccactgcactccagcctgggcgacagagtgagactctgtctcaaaaaaaaaaagaaaaagaaaatgagtctcaggaatggggtggcaagttgagtgtgtgttttctcatgagcttactcttcaatgtattctcttctgggcccagaacagggcagtaggagcctccctctggtcttccagcttcagggccagctctcctcttacctcctccaggaagctccctctgtttctttccagccttcatctgcatgtcatgtgtggtgggttgaaaggtggccccccaaaagatatgtccatgtcaaatccctggaacctgtcagtgtgactttatttgggaaaagggtctttgcagatagaattaagttaaggggctgggtgcagtggctcatgcctgtaatcccagcactttgggaagctgagattggaggatcacctgaggtcaggagttcaagaccagcgtggccaacatggcaaaaccccatttctactaaaaatacaaaaattagctggtcatggtggtgagcacctgtaatcccagctactcaggagactggggcaggagaatcgcttgaactgggaggtggaggttgcagtgagccgatacagcgccactgcattccagcctgggcaacagagcaagcctctgtctcaaaagaaggcaaaaaaagaattaaagatcttgaaatgacatcatcctggattatctaggtgggtcctaaatccaatgacaagtgtctttataagagaaagagacttgctacatgaggagtaggtgatgtggccactaaagctgagtttagagtgatgcagccacaagaccacaagtcaaggatcaccagtagttcccagcagctagaggaggcaaggaagcattctcccctcgagcctccagaggcagcgtggccctgctgacaccttggcttcaacttctggcctccagaaccatgagagaataaagtgctgttgttctgagctacctggatgctggtaccttgtttcagcagccctgggaaatgaatataccatggaaacatggacctgaaccacggatcctggcaggagccttagagccacacagatgagccttcagcttggctttccccagcaagagctacatgatcttgaggaagctgcttgtcttctctgggtctcaagttcttcatctgccaatggagacaataatgcttacttcctaggttttaacagctttattgagatgtaattcacatatacaatttgcccacttaaaaagtacagttcatgcctgtaatcccaacactttgggaggccgaggagacaggcggatcacttgaggtcaggagtttgagaacagcctggccaaaatggtgaaacactgtctctactaaaaatgcaaaaattagccgggtgtggtggtgggtgcctgtaatcccagctgctcaggaggctgaggcagaagaatggcttgaacctgggaggcagacgttgcagtgagccaagattgcacccctgcactccagcctgggtgacagagactccgtcttaaaaaaaaaaaaaaaaaaaaaaaaaaaaaagtagagttcagtgttcttttgggaatactcagagagttgtgtgaccatctcccatccccacagtcaattttagcacatttcatcaccccctaaagaaactccagacccatcagcagttgttccccatttccttccaaaatccctctctgccaagccctaggcaaccactaatatgctttctttcttaaaaaaaaattaatagagataggcttttgctatgttgcccaggctggtcttgaacacctgggctcaagcgattctcctgtctcagcctcccaaagtgctgggatttcaggcatgagccaccacgccccacccctcctactttatgtctccatggatttgcctgttttggtcatttcaaataaatagaatcatacaatatgtgaccctttgtgtccggcttcttcacttagcattttttttaaggttcatccatgttccagcatgtatcagtgctttctccctttaatggtggaatactttattgtatagataagcaacattttgtttatccatttattttttggtggatatttgggctgtttttatattttggctattttgaattatccttctgtgaacattcgtgtataggtttttgtgtggatatatctggtttttcttgttttcttttgttttattaatacataatatgatacatatttatggggtatatgtgaatatttattacatgcatagaaggtataatgatcatgtcaggatatttgaggtatccacatttgggattgtttaaagattaaatgaaatagtgttaaaagtatttaatatgcccttcaacaaatgatgaggaaatcttagaatctgctcagactccttcagtttacatattaggaaactgaggcacagaaaggagcagagacttgctcaagtccacccaaagcagtagagcattgtggttaaatgcaggacttcagtcagactgtctgggttcaaatcctggttccacttggacatgggtttccttacataaatcacttcacctctctgagcctcagttttctcatatgcaaagtgaggataataataataccttccttacatggttactgatatgagtattaaatgtgccagctcatgtgcctggcgtataggaggtgctttataaaccttagctgttaccactcatggcattgccaaatgtgggacgggtctcctgactctctggtgtgagattgatggaatccacactttccagttcccttttctacctcctgggtatcttctcatatggttgtaagttccttggaggaagggaatgtggcttgctctctccaccacgctgagcatataagaggtgctgaatgagcgcttttattcactcctctcatccccagccctcaccagctgggagttgttgtaggtgtcaattttctgcctctttccaacaccctgtgaggtgactgagcattgtcttccctcccaggcagctcacagtgtgccaccatggagttggggcccctagaaggtggctacctggagcttcttaacagcgatgctgaccccctgtgcctctaccacttctatgaccagatggacctggctggagaagaagagattgagctctactcaggtgggccctcctccctctggtctcttccggtatcccccacccctcagcttgctgtagagacggcaatcaggggaaattctggtccctgccctcccgtcagcaccacggacagctcccacgtctgtgggacgctctctgcagatggggatgatctcccagccctgccccgcctctccctcgttccccaccagccctctttccagaaatttccttcttcatccaagggacttttcctcccagaacccgacacagacaccatcaactgcgaccagttcagcaggctgttgtgtgacatggaaggtgatgaagagaccagggaggcttatgccaatatcggtgaggaagcacctgagcccagaaaaggacaatcaagggcaagagttctttgctgccacttgtcaatatcacccattcatcatgagccacgtcagtcccctcccacagaaatcattgcaagggggatgcggagcaatggctggaggaacggagactccagggaagagaggggagatggaggccagtgggggaaataggccccttcactaatgaccaccaagaaaacaaaatctcatgtttacatcctccacctccatttctatacgcatttctgcttcttgctcttctgtccatcctttctacaaagcccataccatacacccctttcccttttcctcccagctccttagccaagctactctagtatttgtaataactagcatttactggatactcatagtatgctcattgctgtccatacattatcatctggaatccttacaacaacaaaggaaatacatattattagtttctgtcttttacaaatgaggaaattgaggtttagagaggtgaaacgacctacccaagtttgcattagagatagtaatgtacagatctgaaattctaacctaggtctttctcgtttcaaagtctccatttttaaccacaaaaaaagaaagtgtctggggttggaagatttgctaaggcttaagcagagaagctaatttgtagccttaagaagagctacagctttcagacaagggcaggactcttggggagaggtggtggtggtgttgctgctagtggtttgttttttgggggagagacgtgggatagagaatctcttctcaccagcatcaccaccacctcatacagagcctatgttgaaatagaaaaaagtggcctttttctggaggatgcagcccctaccaggaagtaactgcttggctagcaaagtgcaagccggagtcctgcccccattttccttgttggcttgggcacctgtgtgcagtgaacaacctgcaaaactcttcttagtggtcttcttcctgccaacccaggaacagcagcattcagcagttctgtgcttgatccaaatgtggccaatttttccccagagcacagtgtattgaaaatcataccaaggaagaaaatggaggggactagtaattgttcatgtttcagaaattacagaactgagagcttgactgcttccttcccttcctggggatttacatgggggaagcagaagtgattggggctgaggacattcacatttcctcacaactggaggcagtcattaaggatttgggcatgtcataggatttgggtgtttttctccccccttagtggcatctccacaggcagcgaaagctgtctaagcaaataggtgaggcagtgcgttagtccattttttgttgcttaaaacaacatacctgacactgagtaatttataaagaaaaaaaatatttcttacagttatggaggctgagaagtccaaggttaggggctgcatctggtgagggccttcttactggtgaggactctctgcagagtcccaaggcagtgtggggcatcacgaggcaagaggtttcggtgtgatagtctctcttcctcttctcataaaaccactagtcttactcccacgacaacccattaacttattaacctgtttatccactaatccatgaacggattaacccattcatcaaggaaaagccccagtcacctcttaaaggccccacctctcaatactgccacataggggattacatttatacatgagttttggagaagacaaacattcacgtcataacaggcagcttcacccaagtctgctcctcaagtctgtgggttttctctctgcttctggaaggtgaagcccaggcctgggcaagtattcttttgcagcatcctgaaatatgaccttagcttctaaatgtgtaaaatggagataataatcacacccaccatcacgggatggttgtaagactgaataagttacaatgtgtaaagcatttagaaaaggaatttgcacagagtaagcattcagtagatgttaggtactaccccacaaccaccgttatcattattatcaccatcattattatcatcttcattttcatcaccttcattatggccatcattccattcctcagctcagaagccttctatggctccccattgcttataaaatcaagtcctaactttccccagcatgaaacttctaccaccgtcacctatctctcagggtttcctaaacatactctgaacaagtttcctcactctgccactgtgacccagaaagctatctgttctccttctcccagactctgcctcatctttcaaggcctggttccaggatcccttcctccaggaagccttccctgattgccctattccaccatacaccttttttctcggacttcatgtcatggtgcctatattccaagggctctgagccatgtacccctttatatagttaccactatttactgagtgcctactgtataccagctactgtgttggatgctctagatgtagaacctctaattatcaccatcgattcctgggtagtaggcattatttattcatcttacacagatgagaaaatggaggcccacagtggttaaataagtagcccaagattgcacagctagtagggctagtggaaagtagaggtggaatttgaactcaaatcctgcagtaactctaccattctgccttgctcttctttgtagcagtagataagttttcatggatacatacctcatccttttgattagattaagggcccctggagtgtcagtgttcattcatttgtttgatcattcattcattcaacaaacatttcttgagtccccactgtgtgccaggcccagaggttccccagcccaaggcctggcacacagtgggccttcagttagaccttgttgattgactgcgcttttccttgtctgggcagcggaactggaccagtatgtcttccaggactcccagctggagggcctgagcaaggacattttcagtaagtttgtggtgggtggggaggtcttggctcagcctgcatttcctgccttgttccctggggggtgccctaatacctgacgaccattcattgatgggcagtcagacccctctccccaaggtgggtacaatagagactcaccttgggctttcattgattgtgtgagttggtctctggtttttctcaaagtagagcacataggaccagatgaagtgatcggtgagagtatggagatgccagcagaagttgggcagaaaagtcagaaaagacgtgagtgagcccctccctgatccaacctagccttgcttgagacctggcctttccttgactccaaagcctgctgtgggtccaacttgcttccctcgctaagtcctgtctggttgggaggccctttaaaagccaacaggagccttaaaatgtacatctgattatttcatggccctgataaccctccaatggctacaaaatacatgccacaaggcctgtatggcccttcctccctctccaaacccactatgagacaccacacttcagccaccaccagcttctccactcctataacccatgtgccctttcaagcctcggggcctttgcagttgctatagtctctatctggaatgcccttcccccagttcttcccatggctgactcctttgaatctttctggtgttggctaaactgtcacctcttcctggaacccttctctgaccatccttccatgtagattagctcagttattctcaccttgtgtgtctttttccttgcagtttagcactcattaccatctggacatattttacgccttgctctcccactgtgaggacagggaccttgtctttcttgctcgtgactgtttccccagcatctagtgcagtgcctggtatgcagtagcacctcagtagatatctgttgaatgaaaacatctgtaaaatgggtgtaacagttaactgagtacttattatgggtctgaccatgtgtaagtcctgtatctatttattcagttcttaaacaggtgaatcgcacacagggtatgagattttaaaagtgcaaagaatattcagtgaaggctgggcgcagcggctcacacctgtaatcccagcagtttgggaggccaagggggacggatcacttgaggtcaggagtttgatacctgcctggccaacatggtgaaaccgcgtctctaccaaaaaatacaaaaattagccgggtgtggtggtgcacgcctgtaatcccagctactcgggaggctgaggcaggagaatcgcttgaacccaggaggtggaggttgcagtgagctaagatcacgccactgcactccagcctgggtggcagagtaagactctgtctcaaacaacaacaaccaaaagaatattcagtgaaaaaaaaatctccctcccactcctgttctgtagtccctcagttttgctcctatcttagtcaacctatgtgaccagcttcctttttgccttgtcagaaataaagcgagctcctgtatttgctttaattttccatgcaaatgaccacattttatttacactattctgcattttgctttcttcatttacttcattactccctgtctgggaggtcacgttccatattattgagggagaggacacggtcctatcttcagcagcttctttattttctttcttttcttgtttttcttctttatgttttcatttgataaatatttccccccaagattttattgtgaaagttttcggccaggcgtggtggctcacatctgtaatcccagcactttgggaggccaaggctggcagatcacctgaggtcaagagtttgagaccagcctggccaacatggtgaaaccccatctctactaaaaatacaaaaattagccaggcgtggtggcgaacacctgtaatcccagctaccagggaggctagggtgggagaatcgcttgaacctaagaagcagaggttgcagtgagccaagattgcgccagtgcactccagcctgggcaacagagctagactctgtttcaaaaaaaaaaaaaaatgttttcaagatacaataaaagtgaaagaatggtactatgaaggtccatatacccaccatgtaccattttgattctacaattaatgttgggttttattcatcttatcacatctctattcatctgtccatccctctatccatccacacacccattcattatatttttggtacatttcaatgtacatttcaaatgtaaattgcagatttacactcccctcgtgtacttcagcatcctttcttttaaggccatgcagtgtttcgttgggtagatgaaccataatttgtttaagcagtcccttgctaagggacacgtgggtttttaatctgttgctgtgagtgcttgatactcactcactgatttctggcatactcctgcaatgtaggaaccaccacccccatttcatagatgtgagatcaaaggttcagagaagctgcattgcaaaggcacacagctaggaagcggttcaaaagcaggttcctttgttttgttttgttttgttttttggctcaaacccatgttgtgtccccatttgtgactcggcctcttctgctgctacactgcctggtatggtttgagatggggtttgggttcaagccaaggagctggggttggaatgttagagcgaggggaggaaaatggacccccaagaccactacccagccttgaagttaaggccgtatagcctgctagagtcctgagccccttctggcttgggacatcctctccctggggcagctgatcacatgttttctctgcagccttcccagaggagcttccggcagacctgaagcactggaagccaggtgtgcagggcaggtgggctggggttgggaagggtggatgccttggggaggggatggaagagattgaactcctggcccaagtctgatggggatggtgcatggtgcagcccctgcccttctttgggtagaggctgagagcttggggtcccttagagtcctctaaggggctcacgactgtttgtggaaggtggtaggggcttggagctaacagattgttcataggttctattctgccccagctctccgtgtggaggccctagggtcctgctcagcatagctctcagagccaagtcacaaggagaggactgggggactgcctggcacagagcagttgctgatcaacacagctgcagccagggctgagaagatgacaagcatttcctctgtcaggagagacatccatgccactccagggccctccccatcccaggaaggcccctccaagcacccagtctctaacacagcccacttcctcacagctgagccccccactgtggtgactggcagtctcctagtgagaccagtgagcgactgctccaccctgccctgcctgccactgcctgcgctgttcaaccaggagccagcctccggccagatgcgcctggagaaaaccgaccagattcccagtatgttagggggcttggagagagtgggctttctccctcttgggaggtggataaggagttgacactaaggcagggactgtcaggaactggacctcacctctccccaaccctatcagtgtcactcacctctgccccagccagttttatccttggggcccccgtcagctcaatccctggcagagaacatgcctcagaaggaaacacatccgtgcgagcatcaggagggaatctccaccaattagagcattcacctgccagccttattcgttcatcagctcttcatggagccccttctctgtgccaactgctctgctaggtgctaagaattccatcagggcaggacagaaacagctactgctcttagggaaattagggccctttaggggggtcagacattaatcaaataagcaaaagcagaatcgcaaacacaggtgctatgcaagatcccacctcactgcctttgtctcttgcagtgcctttctccagttcctcgttgagctgcctgaatctccctgagggacccatccagtttgtccccaccatctccactctgccccatgggctctggcaaatctctgaggctggaacaggggtctccagtatattcatctaccatggtgagtgcggggcctggctccccgaccacctctccctcctacctgactgctccctgacctcatcctccccatactccatgcacttggcagtggtgccctagcaccttctcatgatcctccctccccagcacaactttctctgtccctatttcccaaaaatcaaagcagaagagcagagattcctgaggtggtctgggtgcatgaccaagagtggttgtgtggccttccatatgttgctttccccttctgacccttagtttttccttattttttttaaatgtttttgtttttaaattgcaacatcaatacatgctcactaataagctaatgacaagtgatgtttacaagaattcactgtctctctcactcttttagtatactgatgtgaatagtttggtgtgcatccttgcatagctttctctgatttgtcttgtttcctaatcagtaaaatggtccctactgacccaccacactgaggggttgtgacttgtctcagggaaggtgtgtttgggctgtcagggatgagaccaggaggatgcttccactcaagtccagagcatccattcctggttgcaagacagtttcagtataacgcactggtatctcagaagcagagaagcagttcctgatatctaggaaaatgagcactgaccacacagcaggaagagtgcaatagtagtacctgccctaagttccttatgagctaattgcacccatttcacagattggaaaagcaaggttccaggagctagatgtaactccagagctctttcttcagctctgtcctgaaatatcttcctttggaagttctactctcttctctccagacttcctgagctccacagcccagtttggagtaggggtgacccaagtgcatttctggaatcaatacctggttattctcacaccactctccacccccaatgtaggtgaggtgccccaggccagccaagtaccccctcccagtggattcactgtccacggcctcccaacatctccagaccggccaggctccaccagccccttcgctccatcagccactgacctgcccagcatgcctgaacctgccctgacctcccgagcaaacatgacaggtaaggacccttagggcctgtgagaggtactagaagcaggatcgaggccctggggaaggaattgtctcaaataagatccacaagcaaagctgcctgtagggacaacaggtcatgtttaggggtcagtcgggacagggagggtctccagggagtggaggcatggttgtgggggaatggacagctagagaatccacatcccatccaaatacagccatcagccttcagctgcttgttacccagcagaaaagccagacaatgtggtcagatcttttgaagttgaaaaccctgatttttacatagatattgtgattttttaatttttattttattatttatttattgttgagatggagtctcactctgttgcccaggctagagtgcagtggtgcgatctcagatcactgcaacctccgccctacaggttcaagtgattctcctgcctcagcctccggagcagctggaattacaggtgtgcaccgtcacacccagccaatttttgtaatttcagtagagacaagtttaaccatgttggccaggctggtctcgaactcctgatctcaagtgatccacctgcctcgacctcccaaagtgctgggattacaggtgtgagccactgcacccagcctgatattgcgattttcttttttaaacatgagtgaaatttttaaaagtacagttggccaaagaaagacatatttgagttagatacagcctcaggccgctatcttataacctccatcttgggaaactcagcccatgaaggctgtaaggactaagtggcccagagggaggggggtccccaggggtaaccctcaccctaaatctggcacctgcttctccatctccagagcacaagacgtcccccacccaatgcccggcagctggagaggtctccaacaagcttccaaaatggcctggtgagtgatgcgggatctctctgccctgggtggtggagatggaagcccatatctggcttcacattgctcattcacttgacacttattcaaccccttctttgttggctcacacactcatttatttattcattcattcattcattcacttatttgattatgccatcatttcaccattcactccaccactccctcaaataatatttattgcccttcaataagcctgcactgggtgttaacacttcattgtcaggctgagagaatgaatgaggggcaagcgaatgatgaagtgagtgagtggatgaagtgagaagttgatgaggatgggagcaatggaaagtgggaataaaccagtgaataagagaattactaaattactaaatgcttactctcacatactggtctaagcatgttaggtatgctaaatcattaacatctcacacaatcccaatattatccccattttccagatgaggctactgaggcatggtgggatgtatagcatgctcagaattgctccagcaagtggtagaaccgggatttgaacccagacacgtgggctccactgtcttaactcttaacactccctcccatgacctccccatggtgagtgagtagtgatcaagcgaagaaaaagcttagtgagtaaatgaaggaatgagaaaagatggccatgcatggtgccttatgcctgtaatcccagcactttgggaggccaaggcaggtggatcacctgaggtcaggagttcgagaccagcctggccaacatagtgaaaccccgtctccattaaaaaatacaaaaattagccagacgtggtagtgggtgcctgtaatcccagctacttggcaggccgaggcaggagaatcgcctaaacccaggaggtggaggttgccgtgagctgagattgcgccagtgcactccagcctggggcacagggcaggatccatctcaaaaaaaaaaaagagagaaaaggtctaaaaggagtggacacttaaacaagagagacgatgagtgaaggaatgggtgtggaaatgagtgaactaatgaatgagtggtgggtgactgaatgaagcaaatgatgaagactgtatgggggccagatgtggtggctcacacctgtaatcccagcactttgggaggccaaggcggaacgattgcttgagcccaggagctcaagaccagcctgggcaaaatagtgagaacttatctccacaaaaaaacaaaaaagaaaaattagccaggcatggcagtgggcgcctgtagtcccagctactcaggaggctgaggtgggaggattgcttgagcctgtgaggttgaagctgtggtggaccatgattgtgccattgcacgccagcctgggcgacatagtgagaccccatctctacaaaaaaatcaaaaaattatctgggcatggtgtcacatgtctgtggtcccagctacttgggaggtggagtcaggaggatcgcatgagcccaggaggttgaggttgcagcgagctgtgatcacaccactgcattccagcctgggcaaaaaagccagaccctgtctcaaaacaaaacaaaacaaacaaacaaaaaaactgtgtggggaacagatgtaaatgatggtggcagtgctggccttgtggtggctggccctggccctgcctctcacatacccccaccctgacacgcccctggcctttgcagagccggtggagcagttctaccgctcactgcaggacacgtatggtgccgagcccgcaggcccggatggcatcctagtggaggtggatctggtgcaggccaggctggagaggagcagcagcaagagcctggagcgggaactggccaccccggactgggcagaacggcagctggcccaaggaggcctggctgaggtgctgttggctgccaaggagcaccggcggccgcgtgagacacgagtgattgctgtgctgggcaaagctggtcagggcaagagctattgggctggggcagtgagccgggcctgggcttgtggccggcttccccagtacgactttgtcttctctgtcccctgccattgcttgaaccgtccgggggatgcctatggcctgcaggatctgctcttctccctgggcccacagccactcgtggcggccgatgaggttttcagccacatcttgaagagacctgaccgcgttctgctcatcctagacggcttcgaggagctggaagcgcaagatggcttcctgcacagcacgtgcggaccggcaccggcggagccctgctccctccgggggctgctggccggccttttccagaagaagctgctccgaggttgcaccctcctcctcacagcccggccccggggccgcctggtccagagcctgagcaaggccgacgccctatttgagctgtccggcttctccatggagcaggcccaggcatacgtgatgcgctactttgagagctcagggatgacagagcaccaagacagagccctgacgctcctccgggaccggccacttcttctcagtcacagccacagccctactttgtgccgggcagtgtgccagctctcagaggccctgctggagcttggggaggacgccaagctgccctccacgctcacgggactctatgtcggcctgctgggccgtgcagccctcgacagcccccccggggccctggcagagctggccaagctggcctgggagctgggccgcagacatcaaagtaccctacaggaggaccagttcccatccgcagacgtgaggacctgggcgatggccaaaggcttagtccaacacccaccgcgggccgcagagtccgagctggccttccccagcttcctcctgcaatgcttcctgggggccctgtggctggctctgagtggcgaaatcaaggacaaggagctcccgcagtacctagcattgaccccaaggaagaagaggccctatgacaactggctggagggcgtgccacgctttctggctgggctgatcttccagcctcccgcccgctgcctgggagccctactcgggccatcggcggctgcctcggtggacaggaagcagaaggtgcttgcgaggtacctgaagcggctgcagccggggacactgcgggcgcggcagctgctggagctgctgcactgcgcccacgaggccgaggaggctggaatttggcagcacgtggtacaggagctccccggccgcctctcttttctgggcacccgcctcacgcctcctgatgcacatgtactgggcaaggccttggaggcggcgggccaagacttctccctggacctccgcagcactggcatttgcccctctggattggggagcctcgtgggactcagctgtgtcacccgtttcaggtggggtgaggggcttggggaagagacatccttgtgttgggcattaactgcggtcttggtgccaagcccagtgctctgtggggtctcttttagtatgcagagcagccgggtggggcagaatggattctctccatttttaagatgaggatgttgaggctcagagaggggcagccacttgccacacagcaagtgagaggcaatggcattctcccagtcaatatttgaaggcccgccatgtgccagtcactggggtatgtctagaatctgagactgacctgggctcaaatttgttttattctttccaccccctgagcacgccaccgttttcttatgctaagagtaaagccatggcctccccttggactctctgcctccattctctcctcttccactccattttgtattcagcaaccagaccaatcttctcagaacttgaatctgattgtatcccatccctgcttacaatccttcagggacactccaccactgtcaggatgaaggctaaattccttaatttggtttcattaagtcggtctgcaatctgcttgagcatttcagcttaatcgccagaggattgcttccatatttccccctaaacatactttacccaagctgtaaggtcctacataattgtgccaataatttagcagtgagcttcctggtagccgaagcaaaaagggaaagaaaaccactgtgtgagttgtgagaaagtaggaatcaataaaggctggagtggtcatggaaggctttctgggaaaggtagaggttgagctaaggaaagaaagtattttaataggtaggaggacccttcatggagctgcccttccattaaggtctagcctggtcaccgtgcctgggtctgaggccctccctccacagggctgccttgagcgacacggtggcgctgtgggagtccctgcagcagcatggggagaccaagctacttcaggcagcagaggagaagttcaccatcgagcctttcaaagccaagtccctgaaggatgtggaagacctgggaaagcttgtgcagactcagaggtgagaggagaggcggatgggaggtggttcacgccatgcaggttgaggacatgtaggacccattctcaagtttgtcatgggcatttccagtgccccctgtcctctgggacaccccatgccctctttctgggcaatggctaaccagagtctctcactgcactcgctgcccaggcggagcctctagaattgaaaactttgctgcattcaaaacctgccatcatgtgcccaagtcttagctaaagccatggagaacctctccccttctaggagttaacaaggatgccttgtgcacctagtaacagaagtgacacctactgccaccctttgaggcatttaggacaactgttgtcccaaatttatagacggcagagctaaggtccagaaggcagacaaaacttgattacagaacaagttaactgtctttcattcattccttcatcacacattgtttgagcgcctcttaagtgctgtctgggataggtactggtaagtgcctaatctgaggctcatttccatgaaagatacagtcctgagatcttttatttttatttttattatttcttaaagacagggtctcgctgtgtctaccaggctagaatacagtagtgcgatcatagcttactgtagcttcggaactcctgagctcaagcgatcctcctgcctcagcctcccaagtagctgggattataggtgcacgtcatcacaccggatgattttttaagtttttgtagacacagggatcttgctatgttgcccaggctggtcttgaactcctggcctcaagcaatcctcctgcctcagcctcccaaagtgctgggactacagtcacgaggcaccgcacccagacagatctttttttttaagagggggacaacagttgccccaaggaaagcaatccccctggggaatttggggcactggggcagccatcatgggacccatgggtaagggctcagtgacagcagtgcctgctccccctaacattgcctgttctctccaggacgagaagttcctcggaagacacagctggggagctccctgctgttcgggacctaaagaaactggagtttgcgtaagcaaaggggtggattgtcttgtgggtctgcgcaaggtttcccctgcagcattagctgggcttgtaccacctgaatggagatagatctccagaatcattcttaccctcttgcccaccactttggaaatagcttccagcagctggaaagtgaccagtgtgggcaaatgctggaggttctcagatttgaagctaatggacccgtttgctggttaacatggtcattcccatcactcattcaacagaggtattgagcacttgaatgactgaggctgctgtcctcatgagctgacagtctaatcaactcccctctggaggaggtcagggggacttcctggaggaggtgatatctgcactgaagcttcagtgaggataaggaatgagctgagtggggagaggggagtaagaaaggctttccaggaattgtaatttcgccagggatcagaaaaggcccaatgtgtccccaaccttccataggaggatgccactatgactatggagtccttttccctcctgtggccaggaactgcacaacgtcccttgtgcctgagcttgtttacttccacagccaagggatggcctccccagggagaatctttcccccattttgaaattcccaggagcttttgatgtgcagctaggatgaaaaagcaaccctacttgcctgggactatcctggtttgaaaactgaaagtcttgcatcccaagaagccccttagtcccaggcaaactgggacagttggttgctctatgtgtggccagggctgggggccacaccctaggcagtgttgctggggtgacagaaatggagacctaggcaaggctctagggagtccagttgtgtctgggtcactgaggaggggcagcccaccatacatgggccccaagaaagcacaataattattatatttagatctgtcagaatatagcttttctttctttctttcctttcttctctctttctttttctttctttcttctttctttctttctctctttctttcctctttctttcctttcccttccttttctttccttccctccctccctccttccttccttccctccctcccttcttcccccttttcttctttttctttctctctgtttctttctttctttctctctctctctcccttccttcctccctccctatctctctctttctttctttctttccttcttttctttctttcctttctctcctttctctttctttctttccattctctttctttctctttccttccctcccttccttctcttccttccttctttttcctttccttttctttccttttcttttctttcttgaggcagagtcttactctgtccctcaggctggagttcagtggcacaatcacagctcaccacagcctcaacctccctaggctcaagtgatcctcccacctcagcctccctagtagctgggactacaggcatgccccacctgactaatttttgtattttttgtagagacaggatttcaccatgttgcccagtctggtctcgagctcctgggctcaagcaatcctcccacctcagcctcccaaagtgctaggattacaggtgcgagctcccgcacctggccagaacaggcttttaaatttgcagctcaccttccatctcaattatctcaggccaccctcctctacaggcattgtcatcatctccccattgtacaaatggcaatgctgagaacaagagactttaaattgtttatccaaagtcataaaggtcaggtcagcctggccctaagctccttccacagaaaaagctaaatgaatgtttgttccttggtaggggtctagatcatctaatgattaggaaggagttgttatgcctgtggtatattcggtgctgtttttttttggagatggggtcttgctctgtcacccaggctagaatgcagtggtatgatcttggctcactgcaatctccacctctcggttcaagcaattttcctgcctcagcctcccgagtagctgggattacaggtgtacaccactacacctggctaatttttgtatttttagtagagacgggctttaaccatgttggccaggctggtcttgaactcctggcctcagatgttcctcccacctcagcctcccaaagtgctgggattacaggtgtaagccaccatgcccagcttataattcagtgcattttatatataatctcattaatctcaagagctactgtggaagacagacagtcatcatcttccccattttacagatgaggagacggaggcctggtgaggttaagtgacttgcccgtggtcccccagctggtcacccacaagctatcagctctccctgatcactgctcccctgtgccccagaaaaaagccagtgtctcttgttttgaacagagacaaggtgctaaatttgtccagaggtaaaaatgatgctgaaaaggggaaatgtctgaaaacaataactgagggccctttctggccttaaattattttcagctgaaaaagcccctagttcaagatcggaactgcgctctggggaacagcggccatggggtggaacagcctagagccgggtgatcagccacctggagaccggaagcccccgaggaggttctgaggaaggaaggaaggaaggaaaagactatttctggcattttctcaggcttctactgtgcccaggcaccctgtagacctcatctgtctgtcaaatcagggttcttagccactcacaaccctacagggacttcgtttgtacacagagtccttccccagttcagtccccactcacctgttcacccttatctcctacactcgctgggtgctctctccattccagccacagggcctccttgctggctttcaacctcctaggcatgcttctgcctccaggcctttgcaccggctgtgccctctgcctggaatacttctccccagatatctgcatggctcatgccttcacctcctctggtctttactcagtgaggccttttcttttctttctttccctgtttctttctttctttctttccctcctttctttctttctttccctttctttctttctttttccttttttctttttctttttttgaggtggagtctcgctctgtcacccaggctggagtgcagtggcacaatctcgactcactgcaacctcctcctcccaagtccaagtgattctcttgcctcagcctcccgagtagctgggactacaggcacatgtcaccacatctggctaattttttgtatttttagtagagacggggtttcaccgtgttagccaggatggtctcaatcttctgacctcgtgatccccccacctcggcctcccaaagtgctgggattacaggcgtgagccaccacacccggcctcagtgaggtcttttctgaccctcacagttaaaaataaaactctggccaggcgcagtggcttatgcctgtaatcccagcactttgggaggccgaggcaggtggatcacaaggccaggagtttgagaccagcctggccaacatagtgaaaccccatctctactaaatatacaaaacaaattagctgggcatggtggcaggtgcctgtagtcacagctacttgggaggctgaggcaggagaatcatttgaaaccgggaggcggaggttgcggtgagctgagatcacgccactgcagtccagcttggatgacagagtgagaccccatctcaaaaataaataaataaataaataaatagaactccattcccctcatggttaaaaaaaaaactccatccccctcaccactgtatatttccatatgattcattgtctcagacatcagcttgctttccgatttctttgattatctgtctatcttcccccctggaatgtcagcacccagaaggcagggattttcgtctgtttggcccacaactttcctccctgggcctggcacatagtaggcaagcggtcaatatttaacaacgaatgccttaatccaagaacccccataagattggggtgaaatatttgaggagatcaagacttaagggtgaagggatttgccaaggcctttagcagggagccaaatgccagatcctggagtcaaactctgatcctgtggccttttgctgaggccagtgttctcagacttcaggatttcagaggccgagaacatttcggaatgaattcgagtgaccgtgcgcggttactgttttttaatgtttatcaaggatgctcattcaaacaaacaaataacaacaaaatacccactgctggcaccataattttaccaaagaatgatcattctaatattgaaaaagttcaaaggacataattgcagaataaaagacagctctttatatggaatgcatttaaccatatttttaaactaaacggcccttcgttgtccttatttttctcatccccttgaagtctgctctaaatgttgatccaggctgtgtgaccctgtgtgagctatttgatcgcctagtgcctcagtttccctatatgtaaaatggagataagagcccatagctcagagtcttgaggagtaaatgagatctaggccgagggaagggcctagcatgcccctggcttataataaatgctcaacaaatggttccttttgttattaaaatgcaaaggcatattagtcaaccacctggtttaccactggcagtggtcgtcagctggcatttcaggaccccttccccaggctgcggcgggagaagggtatctgtggatgttgggaagagtaagaactggctccctacttagagacaaaagctggggagccccaagatgggagcccaacttacctctttttcttttctttttttgttttttttcttttttgagacagggtctcgctcttacccaggctggagtgcagtggtgtgatcatggctcactgcatcctccacctcctgggctcaagcgatgcttccacctcagcctcctaagaagctgagaccacaggacacaccaccacacttggctaattattgtgttttttgtagagactgagtctcactatgttgcccaagctggtcttgaactcctgggctcaagcagtcctcttaccttggcctcccaaaatgctggaattacagacatgagccactgttcccagcctcaactggcctcttatggggggctatgaaatctaccccaagcagaaaagattggggtcctacgtggaagggttgcagggacctaagaggctggggtggaagggaagaggaggggcctcagacaggacctgacttctgtgccttgtctctgccccaccctggggctgaatgaggggctgtgactgtgactggaggtcttacccttgctctttgcctcctaggctgggccctgtctcaggcccccaggctttccccaaactggtgcggatcctcacggccttttcctccctgcagcatctggagtgagtatagactctgggaccccttcctctcaacatctgggtgcagtgctgtgatcatagctcactgcagcctcgaattcctggcctcaagtagtcctcctgcctcagcctcctgagtagctgggaccacaggtgcatgctacagtgcccagcaacctctgggttttgacaaccccaaatcctgcccccaaggcacctgcagaaagaaaagccctcactttgtccctttttttctctcttccgcctactgcatcctcaatgtggctggcacatgagtgatgagatgacgccacatcagatgggaatccccagtgacaaaaaaagttgtagatcctttcgtgacctttgaaactcctttcctcacaacctcatttgctgctctcagcaattcagctggggagggattggggagcatagtcctactttacagtggaggttaaggaagttgccaagcctcaggggcttagttcctaagaagctaaacagggattcaagtccatcatgagttagactttgccctctggctgcctggttggagcccccaggtgatgaagtcctcgtctgaaaagctcaggaatgtgccggctgcctatggtgtattagagctggggggtgggaagggcaggtgccagggctgaggaggccctcactgggatgggaagggtcagatggccccaggacgctagctgatggcccccatctgattccacctgcagcctggatgcgctgagtgagaacaagatcggggacgagggtgtctcgcagctctcagccaccttcccccagctgaagtccttggaaaccctcaagtgagtgagctgggcctgcccttcctgctgaatcgggcccccaaagtccggctgactttttcaaaattaatttaaatttgtttttttagacaagggctcgctgtgtcacccaggctagaatatagtgctatgatcatacctctgcagccttgaactcctggcctcaaggaatctcctcacctccgcttcccaaagtgctgggattataggtgtgacttaccatgcccagccccagtggattcatccattcactcattcacctattcaatcagccattcatccttccattcaatgattcatccattcacttatgcagtcatttctttactccctcatccaaccgctcactcaatcatttctttacttacccaaccatttattaatttaatcaacaaatatttaaggaggacctactatgtgcaggcacctttctaggccctggagacccagctttaaacaaaacaaataaatcccctgacctcaggaatcttaaattctagtgaggagacacaatgaacaagtaaacaagtcggtaattataaagtatacagtaatgaaaataatgtttggtgacagaaaattatactggggggtgaaataggagagatagattaggatttatcaataaagcattattatcaaaacagtaaaactttttaaaaactgttctgggctctgggaagttggagatggataagatacaggaggatcaatgtgattttttttctttttttcagacaaggtctcgctctgtcacccagggtggagtgcagtggtgtaatcatggctcactgcagcctcaatctcctaggctcaagcaatcctcccatctcaaccttctgagtagctgggacaggtgcatgccaccacgtcccgctaatttttgtatttttttgtagagacgtggtttcaccacgttgcccaggctggtcttgaacttctgagctcaagccatcctcctgcctctgcctcccaaagtactgggattacaggcatgagtcactgtgcctggttcaatgggattttttttttttttttttgacacggagtctcgctctgtagcccaggctggagtgcagtggtacgatctatttattgcaaacttcacctcctgggttcaagcaattctcacacctcagcctcccaagtagctggaattacaggcatgcaccactacacccaactaatttttgtatttttagtagagacggggtttcaccaggttggccaggctggtcttgaactcctgacctcaagtgatccgcccacctcagcctcccaaagtgctgggattaccggcatgagccaccacgcccagttcaacatgattttttactgaacctagaggatatcaaaatcttcccacactccccctcacaaccaaggtcttaggatggccaaataatttaccggaatttacttagcaatttccttaattgtaggactgtgggacttctccagtaatttctagtgtcctaggtaacactgtaagctagatttcttctccttagtccttccgtccccctctttcttacccgccaccccacttaagtatttattgagcacctactatgtgcctggcagtgctctaggcacagggatacagtaatgagcaaaacagacacagccctgctccatgtgaagcccacaacccggcagaaaggattacacagccattaaacaaataatgccaacacttatttcattatagtgctgaaaagtggcgcagagggaaaagaggggatgttgtaaagtcatgggacaggtgggggcaggagggtgcactctccctcccatccacctcctcatccctgccctcccacttggccacaggacctaacagtatcctcctatttaccgagaggtagcttaagtctgtcgacagcgccattcacagcctatgacccagaactctccttgaggtcaaagtgaggcatgcaagtttggtcctgagccctccccctcactgtgtccccgcagtctgtcccagaacaacatcactgacctgggtgcctacaaactcgccgaggccctgccttcgctcgctgcatccctgctcaggctaaggtgagtggggccccggataccggtcaggtgctgagctggggggctgcagagcgcagggaacccacatcgtgctggctgcaggggacactgagaccctagaagcaatcaccacagccctgaacaaaaggattagcgggacgtggtgaaagaaactctgagcaagtcagttattcattcctagccgctgttttcttacctggaaaatgggaaccatcctaatggtctatgtaagcacttgtcacaatgccaggttctgttatgcaataaatattgctccttttcccccagggatggcgggaccaggctttttccggaacctaggggtggtggcttctggaaggctaaccacgtacgtcagcttttgccggccttgtcacttacatgccggtcagtgtttcactgccaccttctggtaggccttggcatagcacctcttgcttttgagtgacttccatccaggccctggtgtggtcccagaggtaatgagcggactgagcttggaccagagccccagtcatccaactcagcattaccagctcttcttactcgccagactgagagaaactgctctcctcttcgccagagctcttcacttactgaggacaaccagagtcagattcccaggaaagatggcatttggtcccttattatttatttatttttaatttttttaatttctgtttttgagatggagtctcgctctgtcacccaggctggagtgaagtggtgtgatctcagctcactgcaacttctgcccccccccaggttcaagctattcgcctgcctcagtgctccgagtagctgggattataggcgcccaccaccacgtccagctagtttttatatttttagtagagacagggtttcgccatgttggccaggctggtctcaaactcctgatctcaggtgatccacctgcctcggcctcccaaagtgagtactaggattacaggcgtgagccaccatgcccggccaacttatttatttatttatttatttatttatttggagatggggtctcacccaggttgtagtgcaggggtgcaatgatggctcactacagcctcgactacctggactgaagcgaacctcccacctcagccttccaagtagctgggtcctataccctcctgagccttgttaatttcttcccagcatgatcactgttttacaatattttatttatgtaggtgcttacttcttgctatgcaaagaaactcagaagcaaaaatagaatctgtctggttcataattgtgctaaaaactagagatacaagtatgaactagacagatgtcgttcttgcttttgagtttctttgcgtagtaggaattaggcacatacataaataaaatattgtaaaacagtgattcatgctgggaaggaaactaacaagccccaggagggtacaggacttctggggagatgattcttccgtgggaagctctaggggaaaaggactctaggaagaaagaacagcaggtgcaaaggccctaagtgggaaaaggggctgtgttttaagggtcagaagggccactgtggctgtgtgtagtgaatgagggacagaggctgggcaatggtggaagtaggggaggtcaggggaatccagatcacacagggaggcccttgtgggtcacaagaggtatttgcagtttttcagtgtgaatggaaaagtaggtgggcctgggaaggcgacacttgatctgatttacacttttcttttttcttttcttttctttttgagaccaagtctcactttattgcccaggctaaggtgcagtggcatgatctcagctcactgcaagcactgcctcctgggttcaagtgattctcatgcctcagcctcccaagtagctgggattacagatgcccgccaccacaccaggctatttttgtgttttcagtagagacagggcttcgccatgtggcccagactggtcttgaaatcctgggcccaagcgatccacccacctcagccttccaaagtgctgggattacgggtgtgagccaccatgcccagcctgatttaccctttaagaaacatcatatttcatggaatctaagatgccatccattgtaagaccccaatatgaggccaaaatgcaaactgtgacacgctattggttataagacacatcctgatctcaatgatattcaaatggtgacatatatgtcttggcatcgatgaaatatggtcagattactctccctgtggggtggaggaagggtctccagggttcagagattgcaaaacccccatctagtttctgcactggtaccggccgacccgtgatgtgagttgatttagcctgaatccacttggcagcagtgtaaacctgctgcatttatttatttttttctttttttttcgagacagagtttcgctcttgttgccaaggctggagtgcagtctcagttcactgcaactccgcctcccgagttcaagcaattctcctgcctcagcctctcaagtagctgggagtataggcatgtgccatcacacccggctaattttgtatttttagtagagacggggtttctccatgttggtcaggctggtctcaaactcccgaccttaggtgatccacccgcctcggcctccaaagtgttaggattacaggcgtgagccactgcacctgctgcttttatatgcagccctgcaagggagttctgaggctgaatcatggcaaagtcatggccctgaaatcatacccgcagcagcacctgacctgttaaaaggctgcttggtgtcgagtaaacagctgaagttggcatcagtgacactcatcatgctattttcactgctactaatgctggttgtgaatatgctgcagaaactggagctggtccagtgactggctttttctcttcctgcccccagtgctggtcacaccctctatgttaactcatgcgaccctcaccaatgttcctgtgatgtagtcagaaccatagctaacatttagttcattctaggcaccaaggcatgttctaaatgttatatcagcattgattcatttactcctccccacaatgactctatcatgcccattttacagatgggcaaactgagtctcagaagagttgagtagcttgcccaaggtcacataggcagtaagaggcatagctgggatttgaacttgggaagttgttctgacagtttccacacagtaaggcaagaaatgacttccttttagtcctgctgttttcctgggctcactgtttgaccacagagaagtggtctcaactctctgggtcttggtttgcctgtctttaaaatggggcagtaatcccagtaggtggtgactcccacggggctgacctccaggctgcaggggacactgagatcctagaagcaatcaccacagccctgaacaagagaactagtgggacctggggacagaaactttgagcaagtcacttattcattcctagcctctattttcatatctagaaaatgggaaccatcccaatggcctatgtaagtacttggcacaatgccaggctctgttgtgcaataaatattgattccttcccccagggatagtgggaccaggctttttctggaatctagggatggtggcttctggaaggctgaccatgcacaggcctccaatccctccccctggcctctgtttccgacagcttgtacaataactgcatctgcgacgtgggagccgagagcttggctcgtgtgcttccggacatggtgtccctccgggtgatggagtgagtgtgggagtctgggcggtgggtggctcagcccggggtgggagacactgaagtctctccctggtgtcctggaagagctggatgtgggggtggccttggtctggagctggggagtcccaagggccaggccccaaggtgagtttctcttgccagcgtccagtacaacaagttcacggctgccggggcccagcagctcgctgccagccttcggaggtgtcctcatgtggagacgctggcgtaagtccaggcaaccctggtgggtggagaacaactcactccccaggcgtgtggcccagtgtgaccccggagctcaaatcatgctcttcccttcaccaatctgcaaccctgggtgagcagacacttccccctctggcttcagcttcttcatctgtaaagtggggacagtaataatatccacccaagaggttttgtgaggcttaaactaatcaagccctacaaagctcttataacaacagtagctggcacacaaaaatgccaataaatgctatattaggctgaaccatatgaaattgctgacatccacccatttttgacctgtaaaattggcaatttcatatggttcaggtttatcttttattaagtcaccatgatgtccaatactggttactttatattctttcaaagcacttttatctccacaatcactcacctcttctaagacgcacagggtgggtcttacaagacccattttacagatgaggaaaataaagcacagagcagttaactaacctttctggggtcacacagcaagtcagctgcagaaccataaaggaatctcgggcctcctaggcttctccttttccccatgacccacaccggtcggtatcttgccaggggaaaagtccccaacgttctaggctgggtggaaggagggatttgggggcagctgtcactggggccccaggccgccctctctcctctaacctggctctgagtcccatccccccttgcaggatgtggacgcccaccatcccattcagtgtccaggaacacctgcaacaacaggattcacggatcagcctgagatgatcccagctgtgctctggacagggtaaccagggtgggcttgggaggggagagccgcagtgggttgggggcagtgtccttgtgaaggtggcattcaaaaaatgtgggcgggacacaggtggggctaggccaccacccttggacgcatgcgtcatcagagacatcccctcatctccaccctgggctcggtggagctgtcctccaggctttgcgagcttggtccctgtggtcaggcttagagatcaggggacaggaaagttggccatccacatcccacagcctcagtgcttggaagagcttcctttggggactccaagccttcccagctgctgtttcggcttggtggctgccctgatgctccgggtttgtctcagatgaacttgcttgacaagtctcctgctcctcactatgaagatcactgtcccccagccctgtgctccccgcactgtgctgcacgtccacctccattccactgcccctcccatccccccatcttgatagcacccttcccaggtgtcaagctgcccctcctagagtgtcctgcctaaaccccctctcctggctcctcccgctacagcatgttctctgaggacactaaccacgctggaccttgaactgggtacttgtggacacagctcttctccaggctgtatcccatgagcctcagcatcctggcacccggcccctgctggttcagggttggcccctgcccggctgcggaatgaaccacatcttgctctgctgacagacacaggcccggctccaggctcctttagcgcccagttgggtggatgcctggtggcagctgcggtccacccaggagccccgaggccttctctgaaggacattgcggacagccacggccaggccagagggagtgacagaggcagccccattctgcctgcccaggcccctgccaccctggggagaaagtacttctttttttttatttttagacagagtctcactgttgcccaggctggcgtgcagtggtgcgatctgggttcactgcaacctccgcctcttgggttcaagcgattcttctgcttcagcctcccgagtagctgggactacaggcacccaccatcatgtctggctaatttttcatttttagtagagacagggttttgccatgttggccaggctggtctcaaactcttgacctcaggtgatccacccacctcagcctcccaaagtgctgggattacaagcgtgagccactgcaccgggccacagagaaagtacttctccaccctgctctccgaccagacaccttgacagggcacaccgggcactcagaagacactgatgggcaacccccagcctgctaattccccagattgcaacaggctgggcttcagtggcagctgcttttgtctatgggactcaatgcactgacattgttggccaaagccaaagctaggcctggccagatgcaccagcccttagcagggaaacagctaatgggacactaatggggcggtgagaggggaacagactggaagcacagcttcatttcctgtgtcttttttcactacattataaatgtctctttaatgtcacaggcaggtccagggtttgagttcataccctgttaccattttggggtacccactgctctggttatctaatatgtaacaagccaccccaaatcatagtggcttaaaacaacactcacattta

SEQ ID NO: 3 - DNA, 125982 bp, Homo sapiens
gccctcgccgcccgcggcgccccgagcgctttgtgagcagatgcggagccgagtggagggcgcgagccagatgcggggcgacagctgacttgctgagaggaggcggggaggcgcggagcgcgcgtgtggtccttgcgccgctgacttctccactggttcctgggcaccgaaaggtaaaattgcagcccctttcagatccagtacccaatccctcgcctcaggggttctgctttctttgttcccctaagagacctgactgctgttccagggggcaaaaccacgtaggtgggctagagtttaggggcttcggaaactgaagagacgtggccacggcgaggacgaaactagaatggggcttgtctttttagggggttgcttctgatggccacctgtatgacttaggagggagaggggcgctgggacagtgggtgatgtgtgactgttacggcccagcaagttttaaagctgggatctgactcagcccttacaaaagggatccggtcatcctcgtcccaccgtgatgcagctggcaaggtttgagccgagctgtttccttgttcccagccttgctttatctgtgttatgttggggtccttccaaggggcaggtgtttctgtgaaagtctgaattcatttctggcaatcacgcggggcttgtgatccatcaattttccatcgtaccttatctctttctggggcttgtggtggacatctatcttattaggtgaaatagattataaccagaggctgagcgatgtggccagtcgtagtgctgacccgataattaaagcaccagtgaaagtactttccctgactattgtcaatgcagaatttactccgaagtacggtttcccattcatatctttcatgttttaaaagagccatttgctaatttggcagttggagagggctccaatggctcacgcatgaatagttgcccagtgtattttaccttatcacagttttatgttcaaaggagccctcgggcagaatgaaatattgtcaactctcttaggcaaaataatcaagatactttaattgctatgttaagatggtccatgaatgtgagaggattgtaagaactgacgttggaggcaatatagactatctggaccctctcttgaattttaagaagactgttcacattctgtagctttgggtgggggtttattctgtcgctttcatcagccagacacatgcacattgccatgcaaatggattcagaaaaacattatattcccttacagctaaactattatagctgactaatgaattttttctgcatgaagatgatctgaaaatgatgtacatcatgtttctctgtgctacagggacataaattgcatttttatgtaaacagtgtaagtggtgcttggattatttacaggtacatagctttccttccttgatctaagctaattgagctttgttttgaacgtgtaaacttccataatggaacataagtgaggtactttggttcctatcatttgcaagtctgtggtgtattcaatgttcattctttttgaactgctgaataacagagggaaaatttacatcattcataagaaattttggtagtacaaaaatgtgtctgatagcctataaaatgtactgctgttttaaaaattctattccgttttcaaacttaatggtgtataagctatagttattaacttaaatatattttgcttttaacatgatggaatttgtggcatatagaagacagtctgccgactactgctttttcaaaattgctttgttcttgatacatggcagtaggggtttacattagatgtatactacatgctttcaaaattagttgatggagtttatcttcatgataaaaaatgtaccagattaatcatagccagtcaatacgaaagctcataactaatattttcactacttttaaacctataatagagaaaaatgaccctttgctaagcaggagaaatacccatattttataaattccttttaagactatgtaagtatatgccttgcattaatcttgaaatctttaaaaaaaaattgtcttaatgagggctagactaagaaatacatttcaaaaatcaatttccttagctgtttttaaaatagtgtttgaagtagcattagtcatattatccttctgcagatctacataatagtctcaaattaactttttctcaaatgtggtcatctcaaaacaacgtgaataactcagaggagctaacatcctctaactggcttattttctccaagtggctgcaccaaagacatggcaacacccccatggtgagcacagttcctcacacattcagattacctcccatttctctgtcctcttcctcctcaaccctttcccttggtttggtcagagctgctttcaaggccttccgtgcccccatttctccagcccagtttgctcgtttcttctttaggcattaggcttagtgattctcgccagagccatctacgctttcttttccgtggtctaaatccctaagatttccttggtctgctgtgtttattcataggatactcaatttcctcattgtgccctcttaaggggagaaaatgtatgtagaaactcaagtgtccggaagtgagccttcttttcctggctggtgtatgctgaaactagtgtttttgacaccaagcccttagggcagagtttcttcatgggttttgctcagtgcaaaataaatagtcacttctcagtaataaatgatagatacactgactaatgttagttcagaatcactttgatgatgtgttctcaactgacactgagttgctgctagatccacatttgcctgaccaaaaatagctaggacctataggtagagtatcatatgtgctaggtactacagcattttctttaaaagaaagaaatggaatctgcccttgagaagtttatgatctagatacacagacaaatatcacatattaaatgaacacaaattcataattattaagaggacatcacatgagaaacgctttcaaaatcatcctatttgctatgaaataatagaatttttttttaaaaatcaaagtttggaacttaaaaaccttaacattttcaagctgtttctgcatacatcacctttctgataccaaaacgaccttacaagataggcaagtctgataacatcttaacattcttatgttatagacaaggaaactgagcttgagactagctccatgctatttcaatagcaccataccacctttcctcagccatcaactattggaaacattttccatggaggcatcattagggatgcttaagatagtggtaaatgatgaatataacatatctagtccctggagtttttgtcaccttctctttctccagttctctctctcttttttttttttaatttcttttcttttctttttttcttttctttgtagtgagacataccgagaaaaggtttcattcatatgtgtggggcattctgctcctgttatcagattaagagccgtgaataattttgtaatctatccttctatcagaaagcccattctcagatatcttttcagctgtgttaaacaggttagtatattccgcttgggatttgtttcaataaaaacatccagtaaaatctgactactttgcttttcatgggacaaaatgaaaaaagtgcttttataagctgtaaaacttaattgagagaaaaaatcacgtgtggcatttgtagcaggaggtatgagctcagtgaaataaaaaagttaactttgtaatcacatacccaggtacacatatttctctctgtgattgcataaatgtgtgcaagtatgtttatgtaggttactcccattgattttaatttctataataaattatgtagctatagggcccacaggcgattatataatgggcaatagaatttgaaaatgtatctctcctaatataattaaggatagcaattatgaaatgtgcttagagaatcacaagttatcgtgaaagccaggttcctgtactccaagaatgtgaatgaggatttagtcattcattcaggacaattttttgacaacctacgaggcatagttctaaaatctggcatttccacagagtataaaacagatgaaaacctctaacctcatgacactctgttctattgagttggcaaacaataaagaaatacataactgaaatgtgttgtatgtcaggtgatgataatagcttcaaggtagaataaaatggaaaagagaatagtgactgtcaaggataagagagagtgggatggtgattgaaaaactcaatagtgaggtcagggaaggcttgtcttcaaaggtgggctttgggctagaatctgaaggagataaggaagtgagccaggcgcatatgaggagcacttctcaggagtgctattctcatcttgtttttcctgaaattgtgcagttcacagcttgcacaactgtccatagactccctgattttggagggagatacctgaatagtgcccctgtttttgtagggaaatacctggacagtgcctgccatcattagctaccatgttaaagatgaagatacaggagtggcccacatctcttggtttatgagacatggaagaagaagacccagagtgttgttttgtttttttttttgtttttttgttttgttttgttttgttttgttttgcatccgcctggtcccatcccatactccatcctctatcagagatattgctccattcagacaattttccttcttattttccacactgtgagcctgtcacagtgggatttgttgagaaggatacccatggcttttttcactgatcccttccatagtataaatctaaagacagcaagaggcagttgctgatggtgtgcagcttctgtctgctatgcacttctttctttccccctcgctctccttccttttcctttccagtattaagtcactgcattggattttcttcctcttttcttccttttcccttattcccctatttatatcctgtatcaagatttgcaaacaggtaacttaaatgaggaaaactaaccatttcactagggattgacaaactgcttaggaaaagcagaggggcagtcactgcttggcgtgattagagctgttgtgaggctcagtgtatggcatgggcccatgtggtagtatctttcagattttcaagagaagctaggactctcccaattttaaaatgttgactcagtgtctttaaaacaccatacagcttacagtggcagaaagtctgcaagccagattgggctcctgatggtcccaattgcagcagcatgcatggcccgagagccccaggactgcttctacaaaatattttattttctaaaattctcagaaaattaactaaacaaattttttaaaaccaatattttatgtcagttcctattggcacgtggttatttttctaaactcatcagcccacatactttacatcaaactatgtacgtttctaaactaaagggtaatctagttatttcattcttaaactgaagtagtagttttctgaaacctgaatccatcatggctttatgcatcaatttcatttccaagttctctgattcaggataaactccccctttggaatattgtctttctctctctctctctctgtctctctctctctctgtctctgtctctggaaatgactgaacttcacccgttgttattaccctgccattgaaattcaaaacatgcactgccctcctggtttccagtgccctttaaaagcaatcagatcagtgttaaaatctatttttccaaaggaataaaagctcacaggttgtgcactaatttgtttcctttaatcctaaaatctcagtgaaatgcccaagctagcagccctccagaaggccactgtgttagaaagggagattatgtactgtatttcttcctactattttaaatgcaaatataataatatatcatgaaacagtgcacatacagtatacatattaagatcagtggtctattcctgttttgaaatggtctcctactccttaatagttggaattctgaggcagcacctagactctcaggtccaatttgaaaatgtatgtttttttttaaaaaagaatgacttggggaataactgtttgataagaccgtggaagatttctaatttttaatattttattaaaaatgtaaagaaagacattcaaagctgagacctttgaaataatatggtctttgcaagtcagagaaaaagagaagtggtaaatttattagagataggttgcctcctttgaggcctaatcatgtgggaaaggaaaacccagccaaggtttgggtccataagacaattcaacctagctttaaaaataggttttggctttgcttgggaccagcattgggaccagagtgtatctagaccagcattttagctattaaattttaaacctaggggtcttttaagggaaatttaatccatgtgtctttgattcactaaatcttaaatcattactcacaaactgtatgtccctctaagctctttgatgtccaagagatctctaaaattgtgtaaggcctttttgttccagaaaaaaataggaagttggtttttgctaagcgtcaataaacagcatcctcaaaaatctgattaggtctaaaatcttgcaaccatgacagtatggatgtttgaatgatgcaatgtgaaaattttaagcactttttaaagtccttgtttaccagtaatactcagttgtaatccttactaaccccaaggaaattattttgacacatttcctctctgttttgtaatataaatacaaagcccaaatattcatcattttattctggcacatagtaggtactcagtaagtattttgtagagtgttgaatgactctttcttctgcccagaaacttctagctaatgtcagttcttctattcaatattgatatccatctgtcataccttggaataagatctattctaagtcagtgaccttgttcgacaaatttttaaaataagccatctaactaaatatatgacatttattgaaattcattttgcaccatgaagcaactgccttgcaaagagtgctgaaaataggaaggaatttctagactaatttgattaaatattcagttgttgccatatgctttctgaaaattgattttcccccttttactattcctgtcatccttcctcccaccttgacatgcttactgattgaaagctatgcacagaaaaagggcaggtcgcttgtatgtataagcaagagcagcaagtccaaacaggcttagaaaacgtaatgctataatcacgagttgtcataatataggagaggggagagaggaatactcagcaataagagtggtgttgggtattgctccaaattacatggatgacacatctttgaactctattgtgtcgggggaaaacaccttcttgctgtagttagatttcctgtttgtgaatgtgtattttctggtaaccagacttcctatatgaatttgacatagctttaagtgcatttcaaatgacatgattaaagaatggctgctttggagacagcagctccttctctcttaaagaaataaactatcatgctaaaatataggcattgagatctttcttgataccatattgtgaatttctaatggctcatcacatttttatcctcagaaaacctttcctggtgaaaagcatgctgttttagtatcacatttggggtgatggaattggcaatttcttatatcttgagggggcgggggggtaaaaggaaaattgtgttaatagggtcttaaaatagagattctcttaggttaacctgaagatttactaaatacattatcattacagcttgttttgacatttaattgtagatggcactgtatcagcactgacttatttatacagctttgtttagacatgcctaatttttatttcattggtggaaccaaaccatcagtaataaatcatatatcagtgtttttgtacacattcgtatttacatgacttttaaaattccaatgtaaaggtctcacaacttgaaaaatgaatgaatgcctgagtatttgaacagttgggaaaatgtagttcaatttaagaaagattttttatgacaattcttatgccatatatagaaaatagataataaaggagaaggcctggaggtttagatgggatattggatcaatgagcaaaggaaggggaaaggtgggcgggatatgctgaagggtcatgggcttgagtgcaccctaagtcataaagagggtgtcccattaagaatcaggctgcctgaattctaagtaggaaagaggcaggtcaaaatggtgtataggccaggcacagtggctcacgcttgtaatcccagcactttaggaggccaaggtgggtggatggcttgagctcaggagtttgagaccagcctgggcaacatagcaaaacccccctcttaaaaaaattacaaaaagtagctggacatggtggcgcacacttgcagtcccagctactcaggaggctgaggtgggaggatcacctgagcctgggaggccaaggctgtagtgagccgagatcataccactgcactccagcatgggtgacaaagagagaccctgtctcagaaaaagtgggggagggagggtatggaataaagtaaagctcatgggaaaatggtacctttaccattttcccaccttgggaaatggtgggaaaatttagacattgctttacaaagtctaaatttctgccaacttgtgttacatgtggtttgattctggagaaagatagactatcatctatccagtcctaaattgggcctcttagtctgtcctcccctcagttaccaggaagaatagcaggaatatgtcacagaagcagagaaagcttttattctgagtgtcagaggcatgttctaagcactctgttatctactcccaggcactctaaatgaaattccattttctctgaggaaatcaaaatataaaaagaaaactcaggcaaatttataaaggttttacaccattttcatgactgaaatattctagcatatctagctcattataatctataaattcctgttgggaccaaaagttatggccctaaaacctgttatctgtaatccttttccactgggatattgtctctggggatatatattagctttccttgaggatactaccttgaaaccatttctttggtccttgactatacaaagttcatactagcatggatgtaggaattgtatttttctattctaaatacgaatttagacagtgatataaagattcaaggaaagcttctatcaaggcctgccttcactacttgtcttttggctcctctgagggtcttaggtgagccactttcatctgattctgccctcacttcaggcagaattcatatggctccagccaatggctacactgtccaaagtgagactgtggtctcacaaccatctggttaatacaaagacagcaagccaatatgatcacttaggacctaggcaaacctttgggcttaaaatattaccttagctattgttgtttttaatgagtatcaaatagtatgatatttgtaatttgtattatgtaaagaagtaaccaaagcagagattgttgacaaaaaaaaaaacttcctcctaacataaatgaatatgcattttggacttttcaaaaattccctttctgtcttgtcaaaattaagatatttctaaattttatttcggtctcactaacacatacttggattattgttcattgaaatctgtacgtcaaggcccagtgattttaaacattcttttggtcttcaaagaacttaccaaaaaaaaattgttctttaaatcaccagaaaagtgcagataaaatcccagacagtttcattaatgacaatgaaaggtgacagcccttgaatctatgtcataagttgattaattactttccaaacattattaaagatattagacgaataacttagactggtatccaggatcaaggttccttcataatccctaaatgggttttaattttcagagttagatgatcattatatgtgatttatttctttaacatctttagactgttggctttattgaaaagagaggagagtatctgtttcaatgtgttttcttttccctgaagttattccttgcagaattcaataaaaccggttttgaaataaaaataattaaatgctggcattttctgttaataagggcccatagacctgatgaattatataaacattacaaggaatttaccactgagttcataattatgtaaccatttaatgcccaaacctgcctactgacagtgaagacgttcaatgagaatggacattgtgcattaggataaggatgacctggagtgaactttcattcttgttttggttctttcccattttgcccaattcatagcacctgattctcttaaccagcaagtctgtttgcatgtctccagtccaatttttcgccatgcccactgcagtgattccaaactctcaccatttcttaagctcttgcatcttttgggctctccttattctcagtataagatctttccttatagtttagagagtaaacacaagcccagttgtttccatgtcacccattattacctctttctgtctcaaaggatgaaacagtcttttctacctaagtcttgaccctgttgttccccacacctgtgagcacctcctccctctatcctacccaccttacaactcttcccgtgtttaaaatctccctcaccatttttcttttttaaaaaaattatattttaggctcagtggtacatgcgcagatttgttacataggtaaactcgtgccacagggtttatttcatcacccaggtattaagcctagtacccaatagttatcttttctgctcctctccctcctctgccccctcaagtagaccccaatgtctgttgttcctttctttgtgttcataggttctcatcgtttagctcccacttataagtgagaacatgcagtatttggttttctgttcctttgttagtttgctaaggataacagcctccaattccatccatgtttctgcaaaagacagaatctcattcttttttatgtctgcatagtattccatggcttctctatttttcattcacctcttactcaacttactgattcttctagaaagaaataaaacacacacatcaggcatcctgataggatcttgaatacacaatttccttaagtagtcactcctgttttcattttagcctttaaataatgaattcttgaaaataaatgtctaactcagtttctctactttcttcattcccattcattcttaagtcattcaactcaagcagtctgtaccacatgcccaagaaagtgtcctcattctaatcaccagtgccctcctcatggccagatctgatggacactggtttttatcccttttgacccgtctgtagaatttgacaccatacattttatttctcccttctcgaaagttctccttagcttatctctccacattttctttgcctacaattgttctttttaccctttaaaacataaaggttagattctagtcttctgtaaggctccatctgaattcctcctttctacttacaaaacacattcacaagtgatctcacttcagtgacttccaatacaccgatggacgagtggttcacaaaccgctctctctcacttcctcttttctctagaccaccactttcatgttgtcagctaccttacagactccaccacttagatgaccagaagctacatcagggttattaactcaactaattacttttaccctcaaagtctcctctccctattttccttaccttggtttatgatacccagatagacaattttttagccattcttggcttttcagtctcctctacaatcaaaatccatattgaataattcccacataatttttctcactttaatatgtgtataatctagtccttcctttctttccataatgctagaaactttgttcaggaacattcttttgtatattgattgattctgttgtccattcattcaataaatgcttactaagtgccatgtaatgacactatgctaagggctaaaagtggagcttacactctgatgggagacacagataaataagttactatatagtgtggtaaaggctagataaggggaagacaggtttgatgtttgagcacataggagagttcctaattccttactagaaggtaagagatgcatcagagaaggcttcccagaactgttccctaagatgaggcttgaagagagaggacaacttatccatgtgaagttgagggcaagaatatccataaagagggatccacatgtgctgaaacccagagtggctgagcacatggcttgcttcaagaactggaagagggcagagtggccagagcctagatttctaatggtgtgatggcaagaggcaagactggagagtggggcagaaaaaaatggtatgtggtttgtaagctctgccaaggggttgacattttttttcagcaaagaagtgacatagtcaaattgtcagtttagaaagatatctctggtatgctagggggcagatgatcagggtgagaatggagagggaagaccagcgaggaagctgttgtagtaatccaggtatgaagtgacactgccctgaccatgggcatggaagccaataaggagatggacatgtttaaaatatttgtaggtgggtgtcaaagatgatgtcctagaaatatgggacatgttcagcactgaggtaggatacagagagggagaccaggttttgtgggagtagatggagataacagaaggatatccaactgctccttcttggtctcttgtcccatctgtctttgtctcctgacctattagctttggtggcgccatcactcagtcctcctctcttcattctctacagtccctctcctcggagatcccatccactctcatggcttttcatgatgtctacatgctgacaacttcttaatttaaatctctagcccagacctttctccttaaccccgggactcaaacatccaactgcatgcccggcatctccacttagatgcctaaaaaatgtatgtcaggctgagtgcagtggctcatgcctgtaatcccagcactttgggaggctgaggcgggtggatagtgaggcgggtggtggtcaggagttcaagaccagcctggccaacatggtgaaaccccgtctctactaaaaatacaaaatttagccaggtgtggtgatgtgtgcctgtaatcccaactactcaggaggctgaggcaggagaatcgcttgaacttgggaggcggaggttgcagttagccaacaccacatcactgcactccagcctgggcaacagagcaagactccatgtcaaaaaaataaaaataaaaaaacctccattgtgggcaaaactacattcctggtctcctcatatcctacaaacatgcttcaccaaccagagtctgcatgtcggtaactggcaaagccattctctctgttaaaaaagtcaaaatccttggcatattctcctttttttctcacatgcctcagatctgactccatcagtaaatccggatggagttcgatctgaggcatgtgacaaaatagctctgtcttcaaaatagaaccagaattcggccacatctccccactctccccttccttcctggcccaggccaccagggtccccctcctggaacaccactggagcctcccagctggcctcaccactccacctttgccctgaactgccccccagccactagcagtcttctctcccatatgatcgaggtgaatacattccaacataatccccccttgttcaacaccctgcaatgactccccatttcactccaataaaaacctgaatctcccaggggcctacaaggccttacatgctctgcttctttgtccttttgatctcagctcccggtcaacaaagtccaggcttactggcccccttgctgtgcttcagacacaccaggcacatttagttcttccttcttgcctctgcccagaaatctcttttcccatctcagacatctgggtccacaaaagccaccttcccaatttccgagctacaaacctatccccatacctctcctccaggcagttctgatgccccagccctactttttgtttttccctgtaacacacatcaacttctgaaacactacatcatcagcttgttatgggtattaattgttgtccccagctaaaaagtaagttccacaagagcaggggtgttgggttttgtttactgatgtatcccaagcatctgatgcatagtaggaccccagtaaatacttgtcaaatttggtcttaaatagctgttgcatagacaaaagtgatattggagagatggatttcgggattctctggagatccttcaacaaaacatatcagactttctttaatgtggccacagcctaatcttatacctttttccactgtcaacccagcccacctggcctctatgccaattgcagcttcctggacaaccctgcatcttctccccaggtgcccgtgtgtgagtccactccacccaaagtgtctgtcccctacctcagctgcacctgagcagctccaacttatcctgcaagacacagctcaagtagtatcccctctgaaatactccttggccccgctttctgtctgcatagttagctcttctcccccgtgctgctccactgacatgcgcacacctttacagcacagcctgggcgtgttgcaggtggaaggtggagattcccagtcaaggggcaacacctgtatggttggaaaagttgtttgttttaatttcttgccctctcttctctcttctatttctttcctctcccataaatacacataccgcctatatacacacaacctgccctgaattgttttccttgaattgatgagttacgtaaatgcaatcctaagcacagttgttttcaggttgtcctaaccttttgctttattgatttttcaaggatccagagtgtttactgagtttcagaaattggattctgtacttatttttctgtactatcctagttttatgagaatctatttgctcagcattctctattcttttaaaagtgtttaagatttttgtaaacagttttgtttggttctttattttctggtgacatattgatctcaacataatgctattcatatacttttaattcttcttccaacactgttaggattgcattatgttcacccaaggaatccacatctgtacaaaatgtggccaggtttggctattccttcacattcacagtattctcatgatttctaacaattcttgtctactttgcctaaataagaaaatgtcatatactgacaattttgatcgtgaaaaagagaccttagttcataccagtgtcagagtctacttgcaaacattgatttccaagaaaatttctcaggtgtgagcaaataagcaaaataaattcagacctaagagaaaatagcactacaaggaacgcccagctcattcaaacgctctgcattttgagactagagggggcttggcctttggcaccctcacacctctcccctttgtctctctgtccctgggtgctgatttctctttctttgtgtgacagccactgtgaaaagaatggggttcactcaccacctgcattcctccacagccatttgatatctgctttcgataacagcagaggaaactgatcagtcatataaatccaatcctgagcatagttcctcgtttggaattgtaccatgctttatgccgaggacattttcaaacacggagggaggggatgtctgattcattcgtgagtaatgtaccagcttcctctccaacttgtctcccttcagtggttcacattctgactattcagtcggtttatcctttccaaacccagtatttgaatgcaactggcaaaggttgattgcctctttttttttttaatatatagacttggaaagatgtttctcaaatgtgatttgcggatttatgttattcagtcttcctggattaattgaacaaaaactggtaacactgctacacagtctgaatcacaaaattatgtccatccatttggctgaaaaatacgaaaacaaatacttgtataagttttcatgcattttagcactttctttacattggggaagttcaaccttcacactttcaagggcaatgaaacatttttgtctgacctacaatttattaatgggacaaaagcccatctgtcaatcagggctctgagagttcaatgtattttctgaacaatattttttacattatgtacaatggtaaaaacaaatgtccatttattcttctttccaagaagttgagtactttcaaccattcttaaaaggacaaagatgtttgctgacagaatatgaatttataaaggataatcttgaggatataatggcattctattctttttatctttactcttgccatatcagagttggataatagtctcaatcatatgttacaactagaaaatgcacaattggctttttcttatgctaacaggcagccattttcaactttttaaatgattataggactaagaggggatgcaaaaacagataagaatctgaataaaagcactatctgtcaaagaaacaacatttgtgtaataatcaagaaaccgtttagagcaccccctggaaacattaattataacacatgcaaatcattcctgtacaaagcttaacttgtttatctcctatagccacctgtatttgaattttttaataagctcatttattataaataaagcatgtaaatcaatctgggaataccttttctgtttcagaaatttcatgtaaatgacaggctgccacatacagtacaactatagaggggaaaaagtttctttactccctttcatatagttataccttcatatgacacttaaaaccacctgccaggaacttttaaaacatgttttagatgcacagaagcaaacccaaatgaaaaaatgctatgcagttttgcaatacatatataccacagaaagctttaaaaacattctaccccaacagataaatagatttggcccaaatctttttaatgtgagttttgtgggtaaaaaagattattgttcccttatttttccccatttgctgacgactaggattgtcatataaaatacattcctgggacatgcttatactaaacaaattatccactgtttatctgaaattcaaatttaactcagcatcctatatctttacttgctaaatctcagttgggatatgggcttactctttttttttttttttttttttttttttgagacagagtctggctctgtcatccaggctggagtgcaatggtgtgatcacggttcactgcagcctcaacctccctagctcaagtgattctcccacctcagcttccacagtagctgggactataggcacatgccaccatgcctggctaatttttttattttttgtagagatggggtttgcccaggctggtctcaaactcctgaactcaagcaatcgtctggcctcagcctcctgaagtgctgggattgctggcgtgagtcacagtgcctggcctgagctaactcttttttaaagagttaaaatactggttcctatttgtttttacttctctagtatgggaggctgttactgtggcttctgtcttggggggcaattttcgaagggcttcaagaacttgaaccgaggttagaggaaaaccacaagatggctaaagggtgggaaaagaagaaataacactatttaaactttagatgagaggactaaagtgatgaaacagtcaccaggtatttggagtggtctcacccaagggactgtgccaacttcctcattttttatgagggcaggcaaaaactggccaaaacacaagttaggataataagcatagtagctattattaaatgctagggtgtgctgcataactgaaggacagtgtttctcacagtttatctccaactctcatggccaacccatgagatgtatatcattatccccacgttttgaatataagaaactgacactcaaatcagaaggcatgtcagtgaaaaaggccatattcacatcccatctaagtctgtctgacactaaagcccacactctctccactacactccaccttgtctccagaatgttttgggctgtttaaatgtgattataccaaagagcagttgaatgcactgaaaaattctgaagattcctcctgtcccttcgattcactgttggaaaccattgtcaaggtagtgtctggctacgatagaagggatttttgacatggcctattgttttatctttttaaagtaaatgtaggtgcttttgatgatcataacactaactgttaagtctttaggcataagaatcaagcattcaactaagcatgtttacaaatttgctttcagcccagtggatctatccacttttccatttaggttgcacatttagatttcggagtttatcctgttatcttcaaatccacggactgtacactctttgagggaagaaactcttagtatctagtcaagtacgtggcatgcaatgggtgctcccaaatacttgattaatatcatatgatataatgtaatatgattcttcataaacagtgagtgtttataaatacagtattttaaatgtcattaggaatcttctattggaatcttaactttattttaatagacctacttttaaagttaataaacataatataaatgtggacagggctaagatttttccctaagatttcactctggcaagtcttcctggagatttagccatggctatttttatgactgtaatttccttaatatggggcctcagccatattccatcatcataaatccctttcttgcacttaaaagcaatgttgaaatattttccagtttctatatcttaactctttacttagatccattatttccattttgagattatcttatgtaaatattgtagaagattttagaattatataataagaaaatactagtataccacctcagaaatcttaactaatagatatgttctcaaatgcaaagtgaaatatttaaagtaattattcaagtaaataaagagaccatctttgtcccaattacttgaatattttacgtaaagttggttttatgcacttgactttgtgtttaaactcaagtttgtagtattgtctactggacattgttagctcaggaccttttcaggagcaaggaatgaaagaatcatttttaaacttatttaaaaaaagaaataaggaagaaaagaagaaattttactggctcgccttagcttaagacatggctggatacagatgctcagacaatcacatcaggagcctgcctccctccgtgtctgggctctctggcctcttgggtcagtttcatgctcaggctggctttctccacatagtggcaaagatgggcatcagacatcccaagttaacatcatctttagtgctcatgctgtcagaatgaaagaggccctctcccagcatccatattaaatctccaaagagattctgtttggccttgctttggccacatactcaaccctgaccaagctccgtgtcaagagaacagagttcgttgaaaggccagcctggtttgcacactcattctgtgttgaaagatgtagaccatgtgattgacagtcccaggagataggagagggagaattttcaaaagagttgccggtataagagacagtggattctgggaaggtaaaaagaggtatttattaaaatactgtgcctttggaataaaaatcttttccaggaaatgcaaataatttaaaacaattcaaataaggatcatacattttaaaacaattagaaatacactcagaagaactgaattgctcatttagtagatttcagataatattttctcctctttgaacctcagttttgtcatctggaaacacaggataatgcttaccttataaggtaatcatgattagaagagatgatggagctgaccatatctatttactataaagtgctatctacatagttataaattatgacagctaagaaaattaatccctaaagaaagcaaaattacctatgtcacggtttagaaagtctctctcttaagaagaaacttattctattgcctctgttgggttttttcctgaggaatcggtgtttgaatgcaatatacatttttgtaggctctgcaatgtttttatgatgaggacagtcatagtgttgacaattactcaatgaatacttagagatttgaatgtatcgctagatttctgggaaatgaaaagaccaatgtaagctagttgaatgagaaaaccagaggtgggcagatggtggacagattaagtcgctggttttaaaggtaggctgaactggtatttgtaactattaataacagccatcttctttaaaggaagtactcctaaatatcaatagtttagtggccaaggtgccattgagatgatcactcccaggaaatgttttgccagtgatattaccttaactttcatctgaaaagaaataaagaaatgttttatggatgattcactttcacctgatatgtgcacaacattttaagagaatgaattagtcagtctgtttgaatcatctttacgtgttccttttagcagggaactcaaagttggttaaatggctagctctatttcagaaagcaaaaataacagaaacagtgaaaagacagtctatattgaaagcctgatccagacacatcatgggggaataaatatatcaggacaaaaatatatgaaaagtgaaagtatttctggagtatttcactaccaatataaatattaaaatgctcacacagccagatctggcaagttacatagatgaggaagtgaaagcaataatatgccaagtcaatggcattggtgtaaaatgtaatcatagaggaacaatctcagagttgaaaattattagaattggaaaacactttgaagttctttagttccacccaggagtatgccattaaatatttaataaccatccctctgcgggctttaataacaagccctgatttgtagtgtttgccaatttctatggtgtcaatacagccaccatggctgattttaggctaccaagatgaggtcactgaaacacaagttgggaagagatgcacatagtaggctgtcatgagccagcacacagctggttcagcattataattttcaaataagaaagcagttgacctcagaggagttgggtgacttgcctgggtcatacaaataattagctgcactgccacaactaaacctaggccctctccagtgtttgacctcagaattgtgaatgcattatgaggaaagcaccatgattgattgattggtaagcccacgtgactttctgtcctagttaagttcccctttaagggcctccatagacatttctacattgagtttaaactatagtctgcctatctccactactggcctgagatctcactgacatttggaaagcgttttatttatctttgtatcttcagcactctgtacagtatctgacacttagatgcttataagtgtttgttgggggccatgtacgaacaatagagaacatgcattgacctgctatgtgccaggcagtgttcttagtgatttacatgcattaacttattgaatccttagaataactctcacaagtgaggtaggtactataatcctgcccatattttagatgagaaaatacaggcttagacttacttgcctaaggtaacatggacagtgattggatttaaaccctaaaatctggccagtgcctgtgcacttggcctctcagttgtcactcatttaactagcagttatcatcatagtgcccagctcagcgccaaatacttctaaaaggtctccctcctttccttaggaaggacacaaaacgtttcccagaaaagatctgatctgaccaacacacacctttgttaatggggaagggcctttattaatgggaatgatcaaggaaatggggcgtttttggtgattacattttctcattatctgaggtttaaacagaaacctctagtttaattaaaatttctgttgctgacaataggccctagtcccatttttttctttaattaaaaaagttaacctttttttgatgtattcacttgaaaaatggcatcaccatatggtaacagataatgtaaagaaggtgtaggagattaaggtactaactccaactgtgttctgtgagggtttttctttaaatagaaaatatattcttcttccccactgattttccatttcatcaaatgaagtaacaaaaagcctatttctacatgtgtacattttcttggattcttgtccactgagatttagtacagtgtgtgacttatgtgcgaaccttaagatatgaatcttattttaaaaacataatttaatataatatctctaatttttttgtttttgtttttattttttttagatggagtctcgctctgtcatcaggctggagtgcagtggcgcaatctcaactcactgcaacctccaattccctggttcaagagattctcctgcctcagcctcccaagtagctgggattacaggcatgcgccaccacacccagctaatttttgtacttttagtagagacggggtttcaccatattggccaggatggttgtgatctcctgaccacgtgatccacccacctctgcctcccaaagtgctaggattacagattattttgaaggctccttcaaaaagcctagaagaaaaaatgtcattcacacttcacactgcattaatggacatcaactaacatgcaaattggttacaatatttttctcccttttggcaataataattcgtttcctttctttcattataatttctacagaaaatacagcaataaattatatattaagctcaattttgttagatacactgataccatattgataagtgcagttaacttttcacataatatttatttttcccattgtgctctagatggtttagatacatatttgcagtttggtttacagtttgtatttgccctctagtacaacaaattgtccctaatccttttcttctatcccttgttattccctctaccagcaccaaaaatttgctagtacattgcaaaacaatgagaattacagataaaatagcaagcatttatatatactctatattgatcaaagtgctttcagagatgagatctctttttgatccttaaaatggtcacgtgagaatatctgaccctgggactcagaggtgggtgattgcctggagtcacacagctagagagggaaagggctagaatcagagggctgattgtctgacttctgttctagtgcatgctcccacctcgctttggaagctgcttcggcatagtgaagcacttaagagcatggatgggttcttgttagccagacgtggaattgaatcttggttctaactgtgtgattttagcaagtttgcttatctagaagagaaggataataatacttccttcttcacagggtggtgatgaagagtaaatcaaagagtttagcagaatgcttcccatatggtaagcactcaatacatgttcttgttatttttattattacatggctttgccttactgaggcttcatcttgtcctctggtccaactacagttctctagcttggcttatcccttcataacctgtacccccagtggcacgatcttggctcactacaacctccgcttcccaagttcaagcaattctcctgcctcagcctcccaagtagctaggattacaggcacctgtcaccacacccagctaatttttttgtagtagagatgggggttcacagtgttggtcagcctgggttcaaactcctgacctcaagtgatctgcccacctcagcctcccaaagtgctaggattacaggcatgaaccaccgcgctcagccaggaattttcattctttatcctcctttgagactcggctctagcatcatttccagtcgagttggtctcccttcctctgcattctgataactgttaaccatcaagtgacttgagcttcccagggaagggcatcatgtctttgtagacatccaataaatgttagtagaagaaaggggggtcctgccaataatcatatgtctttcccacaatttaaactccttttcaccctgttactactttttgcttgtcttccctttgataaacattctacttcttcatcacccattccctcaatttaacatctgatactactatagaaactactgccttgaagatcaacaaacgggttccatgtggaccaacgtcctccttgagaccctcacttggcttttgtgacacagtgcaatatttgctctcttgatgcctcactgaccttaaccttccttgactcctgcatagatttctcaactgtgggtatcccctaagatttaggccatttgccttctcttctttcatctagtccattcatgaacacacccattcctggttttaaccatcacctctgtgcagataatgtgcaaagtttatttctagtcggagtggagtctctgttactctgccaatcaagttctaaatttttattccttctagtgcagcagtggcaaatacctgacactcatgtgtctcactcaagacagatactgtttcacccaagactgatcatgccgctttcccagtcaaggcaggcttctcagaatccttctcatttccgcctctgttctttggcactaatgctctgtctgcccagagttttcattcttcacttgttccaggcacctgcttcctggtgaataatgtaaaacctgctagtcatccttataggagaatatgcactcatttcccagcagcacacccgactcaacgtggttaaaaccaatctaccattcccatatattcagcctaacttcccagtgcagtctaccctagttttataacttgttctactttttccagataactgctaatcatctttgtttgtctttgctttcttttttgcactgtgtttgatatattagggtatcaaatcctacttattcaaatatgtcccttattcattccttctatccttggtgctaccatatttgttctggctcttgttacctcattatgggatataaaaatagcctgtcaactggtctttccattgccaggatctctctgttctaagccaccctgcctccagatcaatcttcctagagtaaaaccttcattgtatgacggtctagctcaaaattccttaatgattattaatcacctcttaaagtccccaattcttagactattagtagggtaaaattatttttgatttggagtcaaaaaattttggacgcaaattttggctactacacttaaccattatgtaacttcgaatttcggcttaatttttattcatcatttattcagtatctatttgtttaacaccttctgcatctcaggctctgtactaggtacttgggatacaatgatgagccaagcagaccttgtccttgctctcctggacctcacaacatggtgaacttgtctctattgctcatgatcataataatcctaagtacaggctgtgcttttttcccttgatacttgtagcttttggtttgtgctatgcagggtattgtaataccatttgcagtgccacaataatcagcatatatgtgttatcactcagccacattgcagcttcactgaagggcaggggctatgtcccatttctcatagcgcaagcacagtgccctgcacataccagctgctcagtgatttctgatgtggtttttgtagatccagggttagtctttggcagtcatgatgcctagtatgtttttagaggctccctttgtcctatcagaattatgctatttaaaaaaaagtcatacctatttagtttatattcattctaaggcctctcctttccaacctactaccctgcctataactattataaggagaactcacaatgtttataacttgtgcaccttaagttttaaatactgaataacaggcccattcatgtttcctcatagaaatactgtctatatgcatacaatgaaatgttaaaataatgttctttttactaaatagctttttgacttggtaatgaacaatatgttgtttttccctgagaagtagttctaggactttagttctgaagattatgttgtattttatacattttcagcctcctgtttttcagttcccagtgatcttacattaaacatttgtctgtctaaaacaataggttaactatagccaaattataaccataccattcctctccacacaaaatcctataaacagcatgtgatcatattgcttctagaatttatgattgttttcttccaaaaggaagctaaatttagcctagtaattctacatgcgctcaagaaaacaatgcctgctgtgatttctagaataaatgaatgtgaaccacagttcctttacttgactaacagagaaagtttaaatatcaacctagtcattaaccacagttattaaaccacgttaaacaaccagcaaggggttaagaaagaaagttgctatgttttttctttcattgctgaatgagtctaacttagttactgtatcaaccttaatacagaacattgtttgcatctcaatggttctctaaaattattcgttcatggcttgagttctaaaattaaactatgtggagtcatgtccaaccgcacaatgcatctttatgtgaaacttgctagagtttttgttttccttctatgtaaaagtccagttgggaagctttatttctgatagattaaatggtataggtctttcagttttctcttcatttctgacaactgaactgctctcgccttgaacctgttttggcagataaacctctcataatgaaggcccccgctgtgcttgcacctggcatcctcgtgctcctgtttaccttggtgcagaggagcaatggggagtgtaaagaggcactagcaaagtccgagatgaatgtgaatatgaagtatcagcttcccaacttcaccgcggaaacacccatccagaatgtcattctacatgagcatcacattttccttggtgccactaactacatttatgttttaaatgaggaagaccttcagaaggttgctgagtacaagactgggcctgtgctggaacacccagattgtttcccatgtcaggactgcagcagcaaagccaatttatcaggaggtgtttggaaagataacatcaacatggctctagttgtcgacacctactatgatgatcaactcattagctgtggcagcgtcaacagagggacctgccagcgacatgtctttccccacaatcatactgctgacatacagtcggaggttcactgcatattctccccacagatagaagagcccagccagtgtcctgactgtgtggtgagcgccctgggagccaaagtcctttcatctgtaaaggaccggttcatcaacttctttgtaggcaataccataaattcttcttatttcccagatcatccattgcattcgatatcagtgagaaggctaaaggaaacgaaagatggttttatgtttttgacggaccagtcctacattgatgttttacctgagttcagagattcttaccccattaagtatgtccatgcctttgaaagcaacaattttatttacttcttgacggtccaaagggaaactctagatgctcagacttttcacacaagaataatcaggttctgttccataaactctggattgcattcctacatggaaatgcctctggagtgtattctcacagaaaagagaaaaaagagatccacaaagaaggaagtgtttaatatacttcaggctgcgtatgtcagcaagcctggggcccagcttgctagacaaataggagccagcctgaatgatgacattcttttcggggtgttcgcacaaagcaagccagattctgccgaaccaatggatcgatctgccatgtgtgcattccctatcaaatatgtcaacgacttcttcaacaagatcgtcaacaaaaacaatgtgagatgtctccagcatttttacggacccaatcatgagcactgctttaatagggtaagtcacatcagttccccacttataaactgtgaggtataaattagaaataagtatcagtctcaaaaagaatatccagggcttcttttgtgctttgtaaatggtgtttatccaaaatagttgcagattttttccaagaaaattgaggaattgaatcttcatttacacctaaaattatatctttaaaatgtaaatggtaactaaaagaaaaatgtttttacaattcagatttgcatgttcgtgacatttcagattatattaaagttatttcccatataagcttttttatatttacacagattttatcagatttacacagattttatcagatttacacagatttttatcacagcagcaattcccataaaacataattattgacatttctatataatctctgcaacatttacaagatgttcaagctaatttgtatgccttaaagaattgttccttatgagattatattctctcactgatacacaactgattaatctatattcttgacattacttaaaggaacttaactttaaaaaacctcttctgaaatgctggtaaataaaacatttttaaatgagctcgtatacttctctaaataacctgtaagagtagagaggaaatgtttgttcccaagtccttcctttagagcttgactttaatcatggacttccttctggaaaagacttgtgtctaccaagttctagcttggcactttacctggttggtatttgttatttataagcataaatattttggttgatgattatttatacttatatgaaatggtattttcttaggagctgttagagatattcttggtgctgtgatttaaatatagtaacagctaccagctatacctggagatttatcctgctagtcagttgatcacctggtctgagtgtttattgtggctttgagtttcttgatctgggccagatttggaatacggacctgactatgaccatcattgaatgaacaaatagtatagcttttctaaagacagtttgactttggcatggtatgtttcacttactttaacaggtttcaatctaagatataaaggttataattgcaatcaggtagaacattaaacatgtcctcagtagcataaagtatataatttgctgaggggtaaaggcatatgaattcagagacatttggttgacttttgctgaaatgtctgggacacttctctagatggaaactatagttaactttttatgatgctaggaaaatacttccaagaaagtcagttcatcttttggtgaactaaaaacaaaacttccttcctctctcttccaaagtctatgaatatacataacataaatgcacatacattccaactaagacttatttccccctacatacatttaatatatgttgcaaagaagcaatagaattccttatgaagctcccccttttctttactagaaactacaaaagaatgaaaggaaacaaaatgattttcagaaacctgggattaggaaataaaaatataatattaatagcattacagagaagatatttttctgcatccagtaagttgattctgagacacaagttttaaaagagtctattaggaattcctccagggctcctagagcacatggatttgctatttaaatctttctttgttaaaaattaaaaagaagggtagggcaagaaaaaaattaaaaagagaattcataaaggtatattgatatctcattttttaaattttgtacatttcaatccttagatgtaaaaatacttatcaattctagaaattctcaaaacacatctgaattttatcctacccttttgacttttttagtgttccaagggagacaaacagacaggattagccaatgaaattcaggtcagttttatcgcccaggaaaaattcccaaaatgcactagccacacctgaaaccattatcactcccatcacaaaaattcttgcgggaaacaagatggaacttgccaacatagtcttcttacaaaggaagccaacttttacactggccaaattccatagacaaataccttcaaacctcctctatttatttgcctgtttatcttctctggttacaaagatcaaaattcttctgagactgagactacacatattctctctctccatataccccatccagacctcagattgttccaataatgagcatataatcatttcctagcttaatgccaaaatgaaggcacctagagccattcatcacacacaaaaaaaacaaaatgattacaagatcaaagctgtttagcaggactctcaagcaataagatgactccattttgtcttggcagatttacttggccagaaatcaagtgacccttttaataatttcttggaactgagtttttactttggcatcaagtttggtgaaaagacacacatattgtagttttgttattaacatctctaatacatttataaagggactcttgtggacaaggttaagaaagctgagctgcagcagtaactttctacttatgcttctgcccagtcctcagtgttgacacattgctgaaagagggatttcctggcactccaagagctctccaccatgtgcaaaaagtgtttctatcacaagatcagataatgggagtgccagggacgggccttttacattttaggggtccagcaggtgtaccaggcctgacttgcttgtttaggatcacatattttgttgcttttcccagtctcacatttcatgaaatatgtctatgcaaactcttcacatgcatcttctcatattgatgacatcacaaaagccctcttttgagtcatttgataattcccagtactcgtcatcttcacccataagctatttgtgcttcagaactctttgtctccacatatgatgctgtttctggaaacttatcccaagccacaaatgcccacttatagaataccagtgttgttgactatgtcagttgttctataagaatatattcttgatcctcacaatgtgtccattttttatgttgcttttgaaagtgattctaaagaatttgtttacagtgacttccaatattgagtactatgagattatacacccacaaataattactaaatctgtttaatatctttacctcctcctttacccattcatcaatcaacctctataagcatcctaaattagtattgattgaagttgttttaggctaatgcatattctctaaatagcatattattattcaaaataaaataattgagaaaattgtcccataatatggatggaacctttgtaaaggcccatatgtagggagaaaaaaccctcatctctatttgaggataagcagtagcaaaaatttcattaacttgtttaaaattaagtggaatttaattttaagactgtggaatctctaacagtcttttacatataagggattgattaatgtgacaatttcaggaaaaaaaggagaatcagtacacattggcccaatctcctacaaatgagaatcaatacagaataagagaattttttaaatccccaaatcagcaaagatcctgttccctaagttatagaatatttattaaaacaagtgaaatcgtacattttagaaaaaattttaatcaaagttgaaattagaaaagcattcttgaaatagctctcgcctctcagaaaatacaattagcacacaacactgtttttcttgaagttctattatcaaagttttgctctatagataagcatttgaaagacctgtagcaagtattttcgccaacatcttgatgaccttaatgaccaaagttggatcaagtgaaggggaaaagcatttggtgccagacacacctgggtggaagtcctggtttactgcataccaaccatgtgacttctgccacattacctgacttcttggaggctgagtctcattggtatcatgcagataacaatacctacttcacaggtttttgtgaaaatttgggataatatatatgaggtacctggcacaagatgactataaatttagcccgttgggagacagcatggactaatggaaagagactaaaatcagagatgttggttcaaatctgaaccccaccgtcttctacctggatggccatgaaagcattatttaaactctgaacccatcgtcctgcgtgcaggactatagtgtggacaagtatattaataacatctgtaaaaggtcccaacttggtccttggcacaaaataaatagcagctattattgtaaggaatacttgcgtaaagaaagacaaattcaaatgattggattattctctggaagaggcacattctggttctattgtttacaagtctttcacttccctctctaactgttatgagtgacctacctccataatggttaatttgtgttatgttgttcttaagattataatagttccaaaaaagagatggggtgaggagtggtggtagtttgagggggcagaggatggggagaaagacaattgaatcaaaactgtactatagtcaagttagaaggtataaattgttctccttcctctcactttcaatcctaactatccatgacctaagatattactcttatgtactttgtcatatcttgcattcaagaatttgcagataatgcagttttagaaaaagtcaacctcataggttgtttgtattgggcttccttgtttttaaatatcatttatactcaaattcaaagagtagccaactgcttcccaaaataaaggaaacttaaggtagtaattttccatctccgtttcacagaatgccaaagttaaagagtcactactcagagccatcaaaggaagaaagcaaagtgattagaacaattttaaaggaggacaaaaatcaaaacaagatgcaaacaaggaataataggaataggcagaaaaataaacatacagtgatgtttctttattatgattataaagatgatagatgagtaaaatcgagttacatttaagttgtaatggaagaaaataattgcagccttccatcaggaaaccacaaggaccgttattgatctgtcatcctcagggcatgtctcgtaatatttaataaaataaacaaagatttataacttttataggccatatatctataatctcccacaccacttgaactgtgaatgtggagtcaatgttacaaataacatccatgtgattatactggtttggcatgccttattccaacaatctagcactctcaagagaatgtattttgtattagggatgaaaaatgtgaagccagattatagagttttttacttattgtgctcaaaaatgagaaaatgttatccaatatgaaaaatgttgttaaggattcttcattcttaatattagacagcctttcaaacctaaatattaaatatcttggccatatgccaaatgtaatagctaccaaagcaaaatcttgcaagaaagaaaatccttgaggtataaagattcaatgtactttttaaaaaatgtaagtaaaaggttattaattttacatttcatttctttttctttcctagacactacttcatcctctcataggctcagggagtcactgcttcctaacttctttattttaattatccatgctactcattccacgaaaagtggcatattgcattattttattaaaagaaatttaaaattagtttctttccagaattttgtaacgccccctgagatcactgggcacacccttggggtgttagaaaacatgttacaaaatgaacctttaattccttttgctttttcccttcctcttgctgactgctctttaaaccattacatggctcattcacaagtctctctaccccaggaaagatgaaaaagcaaaggcatgatgtttttataacctaatagcaagagaacacagtgctgaagctgtcaccaaaactgtgggtaggttttacccgtgggttatattaattcatgatatgattgataatatctctcacttgtgtggggaatgaagcgttaactatgccgcatgcattttaaattaatttgacattattcttaatgtcctttcaagcaggtggcattataacctgtgtcttatttaggtagttgatttctacacggagattcatctgataaaactgatatcgcaaacgggaaggagtttgtacaaaatgaaataaatcttaaagttgatttttgtaaagcccaaatgttaattaaaatctttgaatccacaactctgatacatgatattttcattgacataaacatgattagcgatttctggaagcatgtgggatgctgcattgataaggatatgaacctccttgagtaataatgtatatttttactccgaatactgtttcacattttgggtgttacatccttacttcagacttctgccttatcagtggccatcccaccctatgttcttatctcctcagtctaaaaagaaaaatggggacccatcagaatttggatagaagaccctccaggaatttctgccactgcttattcatgggttggcacagacactgattcagtgggcacacagagttcagaatgattcagagcccagatatgtgccctaagtcacatctccagcgtccagggaggactgtaaagtgctcgttatcaggaaaatgaaaccaagggctcagctactcctgaagtcattaaaactccttcccttgatttttttttttttttttttaaatagtatatgtggtaaccgaatctaggatcctggatacattccagtctgctaattacatatttttttctaactaaaatgttccaggcaggttcatttgcatgtgaattacttgctgagccatgttgacttcctattctaaaagcctcactctgccttgggaagcagtttactgcacttcaccctagacctagtctaatgttggagcagacaaagtgtagctacccatatatacttcaaaaatattttccagtctccccacaagaggaaagaaaaatgtctagcaattgcatgctaatttagaccaaagctttgttttaaccattcttggtgatcacaaatggggaaaaatgatttatgaacagtataactataaaacaaacaaaaaaaaaccattgtgaattcagagtgaagtctgacttcatttgtcttatttgggtaaatcagcaaaatgttcatcagtcagaggacattaaaatggtagatgatacttcaaatcgtgccctagataaaaggagagaattaaggttagttttgatttgtaaaccattctcttcgaaggctgattttataaaaattaagtttgctgagtcatcatctcaaaatatatagttattcatgattagttaaaatttgtgtctgtgtatcaaagaagtaaatttgtatgatattaaattttctaacaatgttttaaattttaaaatgtccgattaacacttgcatctagcaaccagtctactaactaaactataggtgaagtcatgctcaggaaatggggaaaatgcacagattaaattggtctgttagctctgagtgaatcaatagtatttagtgctaatgcactaaggagattacaagcactaatgcagtagcagtcaatagcgaaaactaatatctctaaaaaatatcttgacaataaaatgtgcaatattttccatttatcttaagctaattacattacctgcttgttctttcatcttattagtttaagccaagtgctagaagcctaaccattttatttagtgcataaaagggccaaaaccttgtaatcattgttttcagcaggagacagaggaaaggattaattcatgtaaccaagattcaaccagaaattcaacagatatttatttagtctctaaacctgatagtattacaatggagaatgagctagactgtacctgtcttcaacaagcagatagactagtgaagatgacagtaaacattcagtcacaccagtgaacaaatacatcatgataatttatgaaatgtgctgtgagggaaataaacatctgtgaatgcaaatgagagggaatatctaaatttggtagttgagtcacaaaaggctgtcctgaggaggtgaaagctaacctttatataaagcttaaaactttaaaaaagcaatacgtctttagtacacaggcaaatatataaactaaatatataaactaatagtcattacttatttcacaagctttacatcttaactacaagctgctacattaaatcagctttcttaagtggtttgtggtcattagtgcatactatcttacacttagaaaaacattgcaagaagtagtacaatgctggagaatttaactttttaaaacatttcctgccttaaaataaacagcagtaaatgtgtttaaacattcttttgatttctaaatgaattaagttactttttattatgtggttcttcttcatatgaagaaaataatatgtagattactagaagctaagaacatactttagatcctgctcacactcactgcctttcctggcctgtcaccttaatcagcttctttgaaaatcactgtttcttacataggccaggttgtttcttccttgtttccctcttcttccttctatggccaacccttgggaccccgtttgtcagaagaacatgttcctctttggggaggaggggattgtccttttaccaataagttttatgaccaagagaaacataagaatctgagaacacacaaaataagctcttttgaaactatcaaaattataaacattaatagaattcaagggaatgtgatgctgaagtgatcccaagtcacattgtctttctgcctctgtgcactgtactctgcacaattgcatccatttttagaccatttccttctcatgagaatcatgtgcatggagggccaaaggagagacaagtgctcacaaggatatcatgagcacttatgaatgtacaaatgagtgctctccagtcagtgccatctttatattgttccggtttataggcaatgccttcatctttacctacagacacatgttgcctttctgtttcattttaatcctgttcatctatacatatttaatcacacaaatatctaaataagtttatgtcttgtagggaaggcactttgtcatgcttctttgtacctaagcatatgctttgcaaatcataaacaatagtgttgattttatttgatataaaaacttggattctcaaaagaaatctatgtgttcacacgataaacagagaccatctgaattgccaaagtatgactgaatcataagcagtattgttttagtcatctttacagaccaggaagatttgaaatacaggtgtaaaaagatgtgtgaggcatcaaaagaaatattcacctttctttgtgttcattttttttatttttgcttggccgagaaagaaggggtgttttccaagggaataggaggcttcagggcttattcctgtgcctacaagtcagagaggtcactggcttgccccttcctgaaggctgtaattacaggcagaggactatttattttcccgtaaggcgaccagaatcttgagtgtaaaaaactgtttacaagagtacactgtgtataggggttacacacaacctcaggaaaaataataggaaagtgagactatttttcttcatgtattcaataatatgagaaggtccaagactctggaaatgttctaaagtacaataatagagatgaatatgaggtcaaattaggtgatcctggggcttaaggaactgaattaaatgaataaagaagaggaatttctaatagggcataatctaactgataatttgttaaatgtaaacttatttgtggctccaacatcatggtaaacaagaatgaataaatgtattagtaagagtaattgagaagtatttctaatgtgaaaaacaccaattacattgggtttatctggcgccaatgtggaaataaatgagcaatatttcttactctcaactaaacttactctcactttcagaactgttataggaaaggtattgattcaagtagagttgggcatgcaaagcacaagatcaattctgttactggcctgatattaaggatattagtcagtgtttgaaaaaatgatttgtaatatataagtagtagtttaacaaagtaggtaaaacttgtaattaatttcaaaaggtcaaagcagagattattgacatgtacaaagaggacccgctttatatgtgcctgctttgaaaagtaataccgtagtatggtaaattgtgactaattctgagattttctgtctagattctttttaaaaccaaatgcttaagaaaaaaacatgagacatgagtagcaattacattttttaggctgagtaggtagcataattgcctcatgcctgcctcctgtctccatttgtttttagtagattttgcacagaaaaacatgttgacctcggtactgaaattttggagttcactatttgcggcacagttacagatcacagaaaaaaatgtacaacaggacttcaccacacctaacaaaagaaagttttcttattaaaaaaaaaaccctccaaattattgtgagatctagggtaaccatggtgttaactatatgctatttgatatcttataaccctggtgataagataacaatccaattgaatgcagatgaactcatgaaaaaagaaggattatgaaatatttggaaagtaaacacctaaattttcataagtaaatattaattatttgtgtgatctttagatatgaaagcttcccctgcatgcacttggctcttggaaccagctgttaaaactcccagcaccttagttaataccctgtatgctggtggttcaagaactagttaagaaacagtcacattttctattttcactgccaatgtataataaaatctctgttccagtgaatggctggccaattattttaataacgatgttggcatggcttcattttacctttcttgctattagcaaagctttccttttgtactctgaagtacgggtaaatcacaaattaaactgagctgttgtttgtttaatgctgtgtttcctgctaaccttattcttgtctatcaacctgaacgtagttccccagtggctcagaaaaccctcaattgggattaagtaatagtttacacaaccttgctcagtcattaacctgtgttgactttctcattcttgtgttccagcctcatttaagagtttcttaagcactctatccagttgctggtttggtgacaactaacaatacctatttaatcaagaaatttaatatttccaaggaatcatttatcgtatctcagacttcttcattaacataatctaattcagtcttgtattccttcttcaaaataaagcctggtttcattcatagtaaatatgaagcttaaaaatttttacttcttttcttctctatacacacaaagcagaaagagaaaattgtatattatcattccagacaggtttttttttttgtttagtgtattgacattgatgccaataagataaaactagacctcagtggctcctcctcaactccacccaatctatttgtctccaaagtgctgttggagtaagtaatctttgttaagagcaaacctatttgtatatctgatgataatctgagggataataatatgatatttaaggagtttctgtccttggccctgactatttcctggtcctccttcacgcccagtgatgtgctggtaaatgttaaactctggggggaggggcagcagaagcccctaatttgtagcatttgccaatttctatggtgtaaatatcccactgagccagtttcaaggtaccactgaaacagcgttagtcactgaacaacaatgaggaagagatgtacacacttggctctgtgaactgttatgagatggttcaagcacagcactgccaccctgtcctacacgcaacctgtcattcttgtagttcccagaatccatcagcctccctcacaaccctgccttaacacgtgtagcttggtccacttcagattccctttaacactcattttgtcaagtgaacactttttccctattctttaaaacttccatgctggcattttccttccccaggacatttttccctagccttcaactcatcccctgccccccatattctggatttgttgcgtttcctgagcacaccagtagcactctgcttatttctaccatgtctcttatcacactccgtggtaatgtgtccaacagttccatcgttagccccctgaggggatgaactatgccatttatctccacagtcccagcacctaatacaatagcttgaacaatatatacatttatcggatgagcaaagaagtatgacagagccctgtatgtaaaatatattactataaatagaatgctgattcataaaaataattatttagataaaacagtttttccgtctctcccctaaatccctaaaaactaatttatagaattggggagttttcaagagctaaattagcactggagaaaaactggggagttttactcactattacctatgcccctcccgtcccccccacacacaccctccttcattcaccagtctgcaatgaagattgatcaaagaacaaagaagaagaaaaatgaaagaaaaaggaaagattaagatagggagggtgaatagataggaattccagagttttgtaatcgaaatttggaactcagaattaaagtcattaaaaggagaaagagggaatactttctctgctcccgtaaggttttctcaagcctttcaacagcactcaccctttgagcgggtgataccatctgtaagagggactttacgcaatgctttagtgggcgtggcttgagcagtgacaccagtagagatacccccttgaaactttcatttgaagtccacagattttcactattggtcaccaatccatgatttcaagttgaaaatgatatatgggttaaggaaaagaggccgggcgcggtggctcacgcctgtaatcccagcactttgggaggccgaggtgggcggatcacgaggtcaggagatcgagaccatcccggctaaaacggtgaaaccccgtctctactaaaaatacaaaaaattagccgggggtaatggcgggcgcctgtagtcccagctacttgggaggctgaggcaggagaatggcgtgaacccgggaggcggagcttgcagtgagccgagatcccgccactgcactccagcctgggcgacagagcgagactccgtctcaaaaaaaaaaaaaaaaggaaaagaagttaagggcaaaggtctttatcaacaccatccttcctgtggccacaggatcgtaatcccagtggcaacattcaaaggcaccaagtacgtgcttggtacagagagaagctttcctgagcttggccttggtgtagatgcagtgagaactgagtaagggcctctggcagggaccttggctgctgagaaggggagcccacagatggaggtttctgatcaacaggtcctatcagaaacaaggggagcagataagtaaagagtctcactccacggtggcaagatggaaaggagggataagaggtcatgacagttggattaatggcaggctagaatatagtcatgggcttgaacgatatattgggacacaattgaaggactcttgtttcatccatcgttcatctctcctggccctctgtgaagacatttatcacctgtttctattgaatgtgacactgttaggcacataaacagaccatggctcttaccacctccaagaagaactacttctgttttatttgttagtgcagggtaattggtgttgtgtcttctgaaaatctcttatacttctatgagtaagtgcattgaaattgtttctgttaactaagtagaggaaagcagaaaacctctttgcactaagcattaaaaccttcctaacttggaacaattttctttatgaatcactctgtcactcctggctatgattgaagtgcagtatgaaggctgctaaccaaaaacacatggacacagtctgtttcagatctgattcaccttaggaaatgatgataaagaagcaaaagttttaacacttagaattccaaggtccatatcattgtagaattgattcttttgaattgtggtggtacctcaagagaaaggatttatttatttcatttatatttaaatgcgtttgtatacatatgtatataaacccatatacacatatacataaaatatattctgctccaagtatttatctctcttttctctttactaatccagcttccattaagaactggctcaacttcgacctctgccatgagccttctccagctgtttaagcccacacagatcttatttttttcctagtcttagaggatttactgccagtacagtgttttcagaatgtaactatcaactgagttcttatactttgcatcagttagctattgtacgtgtcaatcttttgtctccctatgtagaggctagacccaaggtagaagcatttgccaggattgacaaacgatagcctgtttttatattctcaacaagtgaaaacttattttgtttatatttttttccctttttatacagttaaacactcacatgcacgcacacacacacacacacacacacacacacacaggccacagggaccctatggccctcaaagactagcatatattctatctagccctttcccaaaaaacatgtgccaacccctgcattagagaatagtgtaaaataatagtggacagataacaggtccacaaattttggagagccatggatgaccttacttatgaacttaagtaattctcttcaataggtgtgagtgtttccattttacagatgatgaaattgaggctcattgatctaaacaattggattttgtcttcataggcattatgagggcttactagaccaacaatagtgataataataactgtttagttgcacaaggcagggatttatgtcttttttatttgctgccatatccttcagcacctagaacagtctgtcacatggtatggtattatattcattttccagagctcccataacaaattaccacaaactgggtggctgaaaacaacagaaatttatcctcacatggttctggaggccagatgtctgaaatcaaggcatcagccagggccatgctccctctggaggctctagggaggactccttccttgcctcttgcaattctggtgtcccaggcatcttaggttgtggcagctttactcccctctctgcctccatctttatgtggcagtccaccatgtctctctgtgtcccctcttcttataaggacaacagtcattgaattcagggcactcactaaatccaggatgatttcatctcaagatccttaactaatcacatatcaaagagcctatttccaaataaggtcacgatctgactttccaggtggacatgaattttgggaagacattattcggcctactgtaggtcttctaaatgaagtgaccatttaatatgtttctggcactggattcatttcatttaagcctcaaaacaaatctgttatgtagatatgtgttttcccactttacaagtgaagaactgaggtttagagatctaggaatcctaaagctgcacagccaggaagggcagggccacccctgacccaagttctctgctaggttagcatggttgtcacaggacaagctgagaaggtatttagggagcattacactaaaaagttgtagaagtcggcttaaggaagaagattctaaaatcaaaggaatcagattgtaggaggccatgtaggcaatttcctttaattcaatagaagagagtataagaatcagccaggcatggtggctcatgcctgtaatcctaacactttgggaggtcgaggtggaaggattgctagagcctgtgaattcaagaccagcctgggcaacatggcaaaatcccatctctacaaagaaatacaaaaattagccaggtattgtggcacatgcctgtagtcccagctactctggatgctgaggagggaggatctcttgagcccagaagggaagaggttgcagtgagccaagattgtgccactgcactgccgcctgggtgacagagccagagcctttcaagcaagcaagcaagagggaaggagggagagagggagagagagagagagagagagagagagagagagagagagagagagagagagagaaaagaaacggagagagagggagggagggaaggaaggagggaaaaagagagaaagaaagagaaatatgaaagaaagaaagagtaaggaaggaaagaaagaaggaaagaaagaaaaagaaaagaaagaaagagaaagaaagaaagaaagaaagaaagaaagaaagaaagaaagaaagaaagaaagaaagaaagaaagaaagaagatatgaacaataaaggaaagactcaaagatggttcagatctcaaacttacggagagggtagctattgatgcattgagaaataggaagctggaagaggaaatcagtttggagagaaaagtgatggctttgaacatcatcaatggcgtattcaaacatagcttgaaggcatttgcagagacagggctggtcctcggaagagatggcaacggggtgtgtagagttaggtcatcaccacgaggctgtgagggcagagccacagtagcttccatcaccttgtgaatcaccagtgctcagcccgtggctggctggccggatgcctgcttatgctgtgctcccggctgtctggctgcacacacaaccgcagagcatgccctctctggctagggcagaaagaaattgaagcctcttaaattttgccccccccagctttgctcccttgctaggacttccaggccatgactattgaagccatagggcaggattacttcctcaagaggcgttagtggaaacagatgtgttgaggaagcctctttcttttcaactgtgccctgagcacatcagatggagtcctcttcatagcacaaaacaacttggtcagattcttagggtttgaccacagcaccctaacagcctggccgtgcattaaggaccccaaagagaaggatctgctttgccagagagctgactcttctgtattttacagacaattctgaattcaatgtcaacatcttagacatctcagtacagacagtaaagagttaaaatatgtctataagaaacagcgccagaccctgaaattgaaagctctgtgcctccctgcgtgcagtcagttccacactgtcctctctcccagttctatttaataaaaaaaacacatgagtgaaatttagggaaataagaattcctgaaattaaagcaattaagttttcagtcaactgtatgaaaagctctagacaaagaggtactttctatttcaaaatatgtatttcccagaaaaccattaccatatctagctagaatttctacaaagaatgattatgaataaagtatatattcaaatgcttctggtaatttagtcatggtcaaagaggagagaaaggtgatacaagtgaactggcaaagattttacaagatagtacatttttaaaaattttatttgcaagactgatttaaattatctatagatgagctaaatctgtcctatagatcaattaaatgaatcactattttaaatatatcacattcttaattacactgaattaaatataattacatattcactgcatacatcataatgttaattaggggaaacattttgaatcaaatatattgagatatatagcacttcaattttctttttataaaaaaagctatatgactaagtcaggtaaaaagaatctggcaagtactcatagaaagctaaaggaagactagattaattgatgtatcacatcaaggcttacaaattgtagaggaattcctattctttaactctatgacagtatataagactttgggctaaggaagcaagtttgcaacaagtttttaaaaaataataaaacaggaggcagggcacggtggctcacacctgtaatcccagcactttgggaagccgagacaggtggatcacaaggtcaggggttcaagaccaacctggccaaaatggtgaaacccagtctctaataaaaatacaaaaaagttagccagatatggtggcgggcacctgtagtctcagctattcaggaggctgaagcagggaattgcttgaacccaggaggcggaggttgtagtgagccgagatcacgccactgcactccagcctcggcgacagagctagactccatctcaaaataaataaataaataaaaattttaaaaaataaataaaataaataataaaacacattgtttaccattgtttctcagagacatacgattattttagaagtggataagccttttttttttatactttaagttttaggatacatgtgcacattgtgcaggttagttacatatgtatacatgtgccatgctggtgtgctgcacccactaactcatcatctagcattaggtatatctcccaatgctatccctcccccctccccccaccccaccacagtccccagagtgtgatattccccttcctgtgttcatgtgatctcattgttcaattcccacctatgagtgagaatatgcggtgtttggttttttgttcttgcaatagtttactgagaatgatgatttccaatttcatccatgtccctacaaaggacgtgaactcatcattttttatggctgcatagtattccatggtgtatatgtgccacattttcttaatccagtctatcattgttggacatttgggttggttccaagtctttgctattgtgaataatgtcgcaataaacatacgtgtgcatgtgtctttatagcagcatgatttatagtcctttgggtatatacccagtaatgggatggctgggtcaaatggtatttctagttctagatccctgaggaatcgccacactgacttccacaatggttgaactagtttacagtcccaccaacagtgtaaaagtgttcctatttctccacatcctctccagcacctgttgtttcctgactttttaatgattgccattctaactggtgtgagatggtatctcattgtggttttgatttgcatttctctgatggccagtgatgatgagcattttttcatgtgttttttggctgcataaatgtcttcttttgagaagtgtctgttcatatccttcgcccactttttgatggggttgtttttttcttgtaaatttgtttgagttcattgtagattctggatattagccctttgtcagatgagtaggttgcaaaaattttctcccattttgtaggttgcctattcactctgatgatagtttcttttgctgtgcagaagctctttagtttaattagatcccatttgtcaattttggcttttgttgccattgcttttggtgttttggacatgaagtccttgcccatgcctatgtcctgaatggtaatacctaggttttcttctagggtttttatggttttaggtctaacgtttaagtctttaatccatcttgaataaatttttgtataaggtgtaaggaagggatccagtttcagctttctccatatggctagccagttttcccagcaccatttattaaatagggaatcctttccccattgcttgtttttctcaggtttgtcaaagatcagatagttgtagatatgcagcgttatttctgagggctctgttctgttccattgatctatatctctgttttggtaccagtaccatgctgttttggttactgtagccttgtagtatagtttgaagtcaggtagcgtgatgcctccagctttgttcttttggctcaggattgacttggcgatgcgggctcttttttggttccatatgaactttaaagtagttttttccaattctgtgaagaaagtcattggtagctttatggggatggcattgaatctataaattaccttgggcagtatggccattttcacgatatggattcttcctacccatgagcatgttcttccatttgtttgtatcctcttttatttccttgagcagtggtttgtagttctccttgaagaggtccttcacatcccttgtaagttggattcctaggtattttattctctttgaagcaattgtgaatgggagttcactcatgatttggctctctgtttgtctgttattggtgtataagaatgcttgtgatttttgtacattgattttgtatcctgagactttgctgaagttgcttatcagcttaaggagattttgggctgagacaatggggttttctagatatacaatcatgtcgtctgcaaacagggacaatttgacttccacttttcctaattgaataccctttatttccttctcctgcctgattgccctggccagaacttccaacactatgttgaataggagtggtgagagagggcatccctgtcttgtgccagttttcaaagggaatgcttccagtttttgcccattcagtatgatattggctgtgggtttgtcatagatagctcttattattttgaaatacgtcccatcaatacctaatttattgagagtttttaacatgaagggttgttgaattttgtcaaaggctttttctgcatctattgagataatcatgtggtttttgtctttggctctgtttatatgctggattacatttattgatttgcgtatattgaaccagccttgcatcccagggatgaagcccacttgatcatggtggataagctttttgatgtgctgctggattcgttttgccagtattttattgaggatttttgcatcaatgttcatcaaggatattggtctaaaattctcttttttggttgtgtctctgcccagctttggtatcagaatgatgctggcctcataaaatgagttagggaggattctctctttttctattgattggaatagtttcagaaggaatggtaccagttcctccttgcacctctgatagaattcggctgtgaatccatctggtcctggactctttttggttggtaaactattgattattgccacaatttcagctcctgttattggtctattcacagattctacttcttcctggtttagtcttgggagagtgtatgtgtcgaggaatttatccatttcttctagattttctagtttatttgcgtagaagtgtttgtagtattctctgatggtagtttgtatttctgtgggattggtggtgatatcccctttatcattttttattgtgtctatttgattcttctctcttttcttctttattagtcttgctagcggtctatcaattttgttgatcctttcaaaaaaccagctcctggattcattaattttttgaagggttttttgtgtctctatttcctcagttctgctctgatttagttatttcttgccttctgctagcttttgaatgtgtttgctcttgcttttctagttcttttaattgtgatgttagggtgtcaattttggaactttcctgctttctcttgtgggcatttagtgctataaatttccctctccacactgctttgaatgcgtcccagagattctggtatgttgtgtctttgttctcgttggtttcaaagaacatctttatttctgccttcatttcgttatgtatccagtagtcattcaggagcaggttgttcagtttccatgtagttgagcggttttgagtgagattcttaatcctgagttctagtttgattgtgctgtggtctgagagatagtttgttataatctctgttctcttacatttgctgaggagagctttacttccaagtatgtggtcaattttggaataggtgtggtgtggtgctgaaaaaaatgtatattctgttgatttggggtggagagttctgtagatgtctattaggtcctcttggtgcagagctgagttcaattcctgggtatccttgttgactttctgtctcgttgatctgtctaatgttgacagtggggtgttaaagtctcccattattaatgtgtgggagtctaagtctctttgtaggtcactcaggacttgctttatgaatctgggtactcctgtattgggtgcatatatatttaggatagttagctcttcttgttgaattgatccctttaccattatgtaatggccttgtctcttttgatctttgttggtttaaagtctgttttatcagagactaggattgcaacccctgcctttttttgttttccatttgcttggtagctcttcctccatccttttattttgagcctatgtgtgtctctgcacgtgagatgggtttcctgaatacagcacactgatgggtcttgactctttatccaatttgccagtctgtgtgttttaattggagcatttagtccatttacatttaaagttaatattgttatgtgtgaatttgatcctgtcattatgatgttagctggttattttgctcgttagttgatgcagtttcttcctagtctcaatggtctttacattttggcatgattttgcagcggctggtaccggttgttcctttccatgtttagcgcttccttcaggagctcttttagggcaggcctggtggtgacaaaatctctcagcatttgcttgtctgtaaagtattttatttctccttcacttatgaagcttagtttggctggatatgaaattctgggttgaaaattcttttctttaagaatatggaatattggcccccactctcttctggcttgtagggtttctgccaagagatccgctgttagtctgatgggcttccctttgagggtaacccgacctttctctctggctgcccttaacattttttccttcatttcaactttggtgaatctgacaattatgtgtcttggagttgctcttctcaaggagtatctttgtggtgttctctgtatttcctgaatctgaacgttggcctgccttgctagattggggaagttctcctggataatatcctgcagagtgttttccaacttggttccattctccccatcactttcaggtacaccaatcagacgtagatttggtcttttcacatagtcccatatttcttggaggctttgctcatttctttttattcttttttctctaaacttcccttctctcttcatttcattcatttcatcttccattgctgataccctttcttccagttgatcgcatcggctcctgaggcttctgcattcttcacgtagttctcgagccttggttttcagctccatcagctcctttaagcacttctctgtattggttattctagttatacattcttctaaatttttttcaaagttttcaacttcttttcctttggtttgaatgtcctcccgtagctcagagtaatttgatcatctgaagccttcttctctcagctcgccaaagtcattctccatccagctttgttccgttgctggtgaggaactgcgttcctttggaggaggagaggcgctctgcgttttagagtttccagtttttctgttctgtttttttccccatctttgtggttttatctacttttggtctttgatgatggtgatgtacagatgggtttttggtgtggatgtcctttctgtttgttagttttccttctaacagacaggaccctcagctgcaagtctgttggagtaccctgccgtgtgaggtgtcagtgtgcccctgctggggggtgcctcccagttaggctgctcgggggtcaggggtcagggacccacttgaggaggcagtctgcccattctcagatctccagctgcatgctgggagaaccactgctctcttcaaagctgtcagacagggacatttaagtctgcagaggttactgctgtctttttgtttgtctgtgccctgccccgagaggtggagcctacagaggcaggcaggcctccttgagctctggtgggctccacccagttctagcttccaggctgctttgtttacctaagcaagcctgggcaatggcgggtgcccctcccccagcctcgctgccgccttgcggtttgatctcagactgctgtgctagcaatcagcgggactccgtgggcgtaggaccctccgagccaggtgagggatataatctcgtggtgcgccgttttttaagccggtccgaaaagcgcaatattcgggtgggagtgacccgattttccaggtgcgtctgtcacccctttctttgatccctgaccccttgtgcttcccaagtgaggcaatgcctcgccctgcttcggctcgcgcacggtgcacgcacccactgacctgcgcccactgtctggcactccctagtgagatgaacccagtacctcagatggaaatgcagaaatcacccgtcttctgcgtcgctcacgctgggagctgtagaccggagctgttcctattcggccatcttggctccgtggataagccttaaaaggctcaatactttttaaaaatttcctataaaatccagaatctatctagatttttgagcagcctgtagtggttggaggaccatgattgtttactcatttggtcacctaaacatcccaagcaatgatttgttctgacagcagactgataacagttttttttactccttggaatcggaaaaaaaatcagcaagggaagcttttggaagccacccggtagagctggaagagaatttcgaaatcaattcgctcaacctctccctttacaggcagaaaatgtgctagattggaggtgaagaccctggagccagagagcctaggcttagtcctagccctgcactgaaggtaatgtgaacactcagtgcctcagtttccttctaggcttcttgttctgagattccatgaattaatatttgtaaaatgcttagaactgtgtctaacacattgtaaacactaggaacaaatgctaaggtcatgcaactcatcaatgcctccctggggtagaaccagccttggcccatgggcatgctcattcttcttttagacaaggctcttaggcatccctagagtgtgggttggccttcctatgcctgtacgtaagaagtatgatgtaatgtaaggaatataggattcaaaatcaacaattaggattcaaatgctaatatttattgactcaactctctgaatcttagtttcttcatctgtaaaattataatgatcataacaaacccaagtcacagacttgttcagaggagcaaatgagataatgtactttgaaaaccataatctactctgcaaatgttatgtaacattataattgtgagttcagcaaagccatgagaatgtttcaaaactgtttaggacatcaagaagttggggtggggaaaattcttaataggttttctccatatcctcattttccatttattcattgttttaaaatttatttttcttatgatatacatatatatatatatatatatacacacacacaaaagaattatgtacggtcctgcattgcttgcattctgagaaatgcatgaataggcaattttgtcattgtacaaacatcatagagtgtacttatactaacctaggtgatatagcctactacacacctaggctgtatggtatgaccttttgctcctaggcaacaaacctgtacagcatgttactctgctgaatactgtaggcaattgtaacacaatggtaagtatttgtgtatctaaatatatctaaagatataaatatgtctttataagtatacaaatatatctttaaatatactagtatatatttatagatacaaatgtataaatatatctatagatgtactagtatatatatttatagactagaaaaggcacagtacaaatatgatattattagcggggtgtggtaattcatgcctgtaatcccagcactttgggaggctaaggtgggagaattgcttgagccctggagtttgaggttacagtgagctacgaacacatcactgcactccagcatgggtgacagggggataccctgtctctcaaaaaagaaactaaaacaataagatagaatcttatgggaccaccataatatattcagtctatcactgattgaaatgtcattatgcagcacatgactatatatatgtatatatatatatatatatatatatatatatatatgggatataaaacaaatactcatatctctaccaccaggctcaaaaagggaatattacctttgaagtcccctgaatatcccatcctagcaatattcctccccctcctggaaaagtgggtaaacaacaattgtaagtcatgtgtttgtctttcctttgcctgtagttgcgctacacaggtgtgtgcccagaaaatattctttattggatgcatggggtttccttcttgactcagagatctcaagctatacggtatcttcctgcagccttatagtgtccaccttattctttgtcactatttccctttcccagccaataaagcacattacctctgtcattcaaatgaactcgtaaagagagattttagaaaagagctggttcacctcaggttcacctgagcaaggaatgggtgtcagtgactgtggaaagtggagcacagctgccagagcagtgcaaggacccaagaaatgggagggtcttgactcgggataaccactctgagattcattggatgtcctagattgtcaccttgccttacaccttaagggagaaaaggataaaaagataaggcagatgtgaaagctatactaaggagcttagacttttcctgcaggcctttgggaagcaactgaagctttgaagaagggaatgacagcttgagactgcttcaaggcagaagagataggagaccagaaggccagtgaggaagcacttaggctgggccaggggtacaggtgtggctggaagggctgcccagaagcaccactgtggaccaggctgagcaggactgagtgactggttagatataggaaatgccagagaaagagaaggtggtgatgactgaaatttcagagttacctaaatgcaagcatggtatgttcataaccaaaataggtagcaaggagagctaggtttgagagccaagctgattagtacagaatgcgagtggttatctctgctgtttccagaaaataaagattaatttcagccttaaagtcagggacttaaatgagatgatctcgaaagccctttccatttttgtaattgtgcaatcctcagaacgttgcccagaatagtaagcagaagcaaaagaaattcaggagtttgaacataagagagagctgttctctgatgcctgctccaatgggaactgggcactgtgactgagccctcggctcactgagtctcctcctgaggagtgtgataaaacctcacagggctgctgtgggtcttattatacatgaaaatacccacctcagtgcctggcacattctgggtgcaggaaaaagtttgatttcctccctcccttccttccttccttcctttttcctccctttgttaccataggagagagtcaggctggttccctgcgggtgctggtgtgaaacctgctctttagactcttctgcagttccccaaagcagctactgtcccagagaactgctttctgccagcaatgctcagttttaccctaagacacgataactcctggctttgagggaagcacaggtagcaaggggacccctgacagcaaatgtgtagttgttcttccagctaggccccagccccaccttaaatgccacatccaggcactgtgtctacagtgctgagataaagcaaccccgtcttttccacacaaatgagcagcaaacatatttgctgattatctttgagggacataatgaatcagactgagatttagtcatatttgcacaatgctttacatctgagatactgaaagcttaatccaaggtttccctgttagttgaagtcctactgttagggctcaaagacagggtgcagctctgtaagccagtccctgatgccttgatcccaatcattgagtttatcaggattctccataggaagacacaaggagcacctctgctgcagcaaatgctggagtgttagtttttcctagaggctagtgcctcaacacctcttctgcagatctcagctatggagaaaatgaaaaagaaaaaggttagagtctcctggcttatgaaatttgaatgccacttgaacctgacatatttattttttagctctaaatcacacaagatcaagaagttctgcagatcctattccaacattgtgcaatgtctctatatttacaaattttatttgatggggggggcaatagagacataatttaatcctattagttcttgaggagatactatttagagatctcactaattcctgtcctgaaggagaagacttgaagtgtgcaatataaatattgcattaactctaatacagagttctacatttacgccttacatgtgtgcaaacaggtgcacagaggctaaagttctggttgtattgctctccctccatttacaaaagatcagtgagttcctgcttgcagattctctgaggagacccttagtttcatctcctcttcattcttctgctggcctgattcagcaagaccaaccacaaagcaaactgagtaggcaaatgggctttatctctggtgactttgcagatgcactaatttttcagcaggctgtcattaaatgcctactgggtgctaggcataatacagggtcctggggataaaagatgataagacaattcctgtcctcttgttgatagaaggcaggtagtttgtggtcaaagactctcattcacacccaccagattgtttttatatcccagtgaatccattatgtctctggcagcaccacacaccaggtcaagtttgaggctttaaagttcccaggatgtcacctagacttagagatgaagaaacactaacaaaagaagaaacaagacaaccacaaaaacctgagcctgaagagctgccacctctataatggaatatttcaaatggccttagatttaaaattggtctttgctcctttaagcagattcccttagctctggctatctctgcaaaatggatgattgatcaccaatagaaacttaattatcaattaatcggttgctatcgaattgctggtacatctcagttatctgctactcctcagagtaatccatagtactttagtgaagaaatacttctaattaaacagggaaatagcacttgctaatatatcaaagtaaatgactagacctaaaacattagtattaattacaagagtcagtgggtttagcatctctaagtttctatttgctaatttattgccactgaaaatgaagaaatcgttgttgatatataaaatagagcattttaggtggtttttaatcataaaagtcagtagatgtaaaaactctggattgcatgtggcagacatttgaccttaaggaataaggtcgctatacagaaggataactaaacttttatttgtttgttcttaaacaataaaatgatttgaaatatactttgatcattttgtgattattatcatatgggatgataatagagaatttcttacttcctaatcattttcctacacttatagttacatacaaagatgtaatgaaatttgctctccttttcttccaaggtatacatcattttccttaatactttctcccgtccccatcgtctaccccagatttaccaattcccagctatctccttaggacagtcaagaaccaaatactcccatttgtcccttataaactcttttaacttccccaatttctggaaaaacaaaaagctttaataatatagttttatatctccatactcatcccccatctacttataattgattcacttgttcattcattcaattaatatttactaaacatctactatgcatgatagttaatcaactactggcaataccatggtgaacgagtagggtccctgatcgcagcgagctgcttgggagaagtttcacattatcttataaatcacgcaagcaaatgttatgttgcagcttgtaactatgttacagctatgctatgggtacacaggtaaatgatattatgagaatctacactagaagcatttgacttagatagtggggtcagggcaggcctcctgaagaaatggtgataagctaagatctgaaggagatgtaggagttaacaaggtgaatgaaggtggaaggagcatttcaagccgggaaatagcatctgcagaggcccttaatgggagaacacgtgacatatttggagcgctgaaagaaggcctgctcgctggagcactaagaacacagatctggagaagttgggcaggggccggatgatgggaagggagccatacagtccatgttaaaaaaatgttgttctttatcctaacagcaatggggaagcattgagtgttttaaatagagagggatatggtcagatttgtgtttgaaaaagaaaatcctgctgcagtgtgaagaacagatcacctggcaagggtaacagtggatgtggtgggtctagttaagaagccgccgcagtagtccaggaaggaatgaggtggctaggatgaaaattgggaggaagggcatgaaggagaagactggatgggtctaggaggcatttagaaatgaaattgttgggaattggtgatggactgtatatgggggcggagggagagggaggaattggagatgacacttagatttctgacttgtgcacctggaggaatggtagagccattcactgaggtgtgtagtgtcctaaggtcaggcaggaggaagattgtggtttctaggatgggcatgttgttgaatctgaggtctctgagacatgtgaatggagatacttgagtgatgttatctacaagtgctgggctctttgtttgtttgttttgtttttattgcgtgggaggtcttccagaaaacctgctagacaaattctaaaagaaatataacactcatgctgggttctattgtgagagatttatataaactagcttgtttaatagttacacaagctctataaggtaagtactatttttttagttctctctactttacagattagggggaataaaacacagaaattacatgattttctgaatacagaaagattattacataaagcaagtaagcattaggggccaggatttgatgccagcacttgggtcagtgctctgtggcctcccagtgagttatccgttaaccaccactccctaccatctctctgcacaagaatgcacaaaggcacacatttaaaaatataatgtcagaacatgcctctaacatttattattattccagttgaaattcatctcatcagacttgcctgctagaagcattacctttgtgtcaagggctgagacatttaaaagttttgtttttcttataatagcagcagctaagttccatttttaggcgtgcacatattgaaccatggtgtgaattgcgatagtaaggttttagagtctataaataatgcctagtgaaattggagccattcagtccctagaaatatttatgcctatctgtggctatttgtctatttgcatgattatccttgccattatcctccaggctctgaaaatacacactgaaaggtttcttaccagcttgttcatgtctggattcacattaactctatgaccatattttattccagacacttctgagaaattcatcaggctgtgaagcgcgccgtgatgaatatcgaacagagtttaccacagctttgcagcgcgttgacttattcatgggtcaattcagcgaagtcctcttaacatctatatccaccttcattaaaggagacctcaccatagctaatcttgggacatcagagggtcgcttcatgcaggtaagtgctttctgagagtagctgtgtctgttctatctggtattgtgcaattaatttgttttcgtttttgcagtaaggtatttgcaaatactgtaaagtccaaatcatagtagaaactggaacacagactgaaagccaaacaatgaagcctggtctactttctgttaaatgtgtggtctctttttattaagttcttgaagctttcagtttgaatctgtttgctttaattttctcgtccagaatggtgtggcattttttttccatttataatttctgtcacgtgattggaaaataaaatgaaacaaagcacttctaggcaatttttttttatttcaagggaagctacagatcaaaggagagctattgtgtgaaccatgcatcttcatgagaagaaacattcacatcattgagaaatattggcaggagttaggaagggacaacattatcatcaaaatcccattgtaactcaagctctcctgattctgtaaaatggtagggttggatgcaaataagttcagatacaaaaaaaatccagattttattaagaaatggttttaatggatagcaacagtatttctgtacaacaaaagtttccatttcaacttactgtgtttcctagatacaagaaccatagcactttgcagaaattaaaagactctcttgttgggttggtttttgctgttttgtagttattggtgcctttaacatgagttgttagtagattcttgatgaggaaagaatgacaatagcatctatggaaatcttgaacttctgtgaatactagaaatttcttttaaagggagatttcgtaattgtctgatgtagttagtaccctcatcagacaataacctctagtaaaccaactgagaatgataagcttttcctataacttgcctgtctatacatcctatatgtgtattcttctacaaaacatttttttaattaccactctctttatagcagcctggatattgatcattgccatattttaaaacctgtaagttatgtttttcttgtactaaagggcatggtggaattttttcaaggtcaaaaaccatgtaaataaaaccttcctagctcaaaactaatcatacaggtcctgttatctaattattcccctagtaatctcccttctattgcttcacattgaactacgccttttctccccctttcctctgtccattccactgtgcttgtttatccaactcatccatcttgaccatttaattctatccttaacttctcaaacctgaaggagggaagccccgcccctcccacagagacatgcactctaatggatttgaaatatgctcatatctattatgtgtaaaatgtgtagtattgttctgtgtttatacatgtttttaatttacatcaatggcattctatacaattgcaaaaatacaaagaaggactagaaaagctggcatctattgatttcctaatgtgttcattatgttgatttgcccccttttatctttatttctgcttttttttttttcaaaatcgtccattacctcaccaatccagttttgtatgaataagctttttatgattactttagctccgactttttttaacatcaaaagttccctggcctatttccacattctaaagttgtaatacaattccttatttaaatatgttgctttattaactgagtaaattctgctgtgtgacagagtcaatcgcctgagggatatgtcacgcatcagtctcattatagaaacgctgtagcaaatgttttattcttgtctcctagcctttgtgtaaaagaaactatattttgcctattaactatgcatccaaaacaaaaggtaaaaaaaatgcttattttatgaaaagtactggtatcactgattttttttaaaagtggcttttaatttatcaaataagtatcaagaactacctaactttgctttactatacaaacgaatgaagcaaaggaaacagtgacacagaacttacctttaagaaattaaattttagtaggaaagatacctgataataatagtacctacagacaaagggctattcgaaaccacagagaatctatttctctgacgcttgcctaagagaatttcattccattaaattttataaagaaacctaaagcatttgaaggatcaaacaatcaacatcactgaagtccatatatttacagtaaataatagtgcgggaggagtcaggagtggagcacagatatggcaacctcccactttaatctgtcagagcagtgacttcctacaaagttctgtaaatgttttgactgcaccacagtgttaaatgtatggctaggcctgagtttctacaactcgtgttttagtaaatacgatgaagtttctgttacaaaatagaatggacattttttttccccccaaagacagctgccctacacaaaagggaacagaaagatgattttacttccttcctaccctgaagcctaatggcaaagttgctttgcaaatttttttctcccaagagtttgcagctgtttctgtctttcctattgtgcttatgttcagctctggctgggaacacaagctacagccccagctgttgggtgcaaagtgaatcaggtatttcacagtggtcatttgattagaaagaattatattgtttagctaacaacattttgtgtatggcagggaagacatttttgacatgttcctaacatttaatgatgtgtaacttatcttgtacaggtgcagctatatctgaaaatactgatgcatacatatatttaagtctcaatatctgcagagccatgtcaatgtagatgaagatttaaaaataatttttatttgcatgatcactctcttgggatacttcgaagtaaaatagtaggataagcaatgtttgagatagtgtaagtgaacaatgagaacgtgccttcttacagactggggaaggagatgtagaacagagtcagacttgggaacattaacacagtgtacacagctacgtgggagagggaagagggattctcatgaagatcacaggactaatcacagggattgtccacgtctcccttctgagcgcctcgtctaatctacatccagaacaatgcttccttgattttttttaacagcacttgtataaggcttttaatctctaaatgcaaagcattgctattaaaatatttgtgcatgactgtcaggccagggagagtgagtggatcagggatgcgagagggggtggggaggccctttcaagaattgtttcaagttcagctccacaaatactcactgggcaactactatgtgcactacactgtgcctgctcccaatggccacagcctgggcactgtcactgctgctactgggctccgtggttccatcctagctcttcccgcatgcccctttcgcctctccaagttcctaaatgttgttaccacccactcatcactcctgttctcttctgcctcttaactggactagttggatcttaagtaagaaacccaaggaggtagagatcacctaaaaagatgtcccatgttcaagatcattacttatgaccactacttaaaggactgtgttagtaatcagtgaacctaagaataattactcacttccaataagaaaaatttgtttatctgttgacctcctgtcttcaaattccttcagttcccgtgcccccatcgtggcatgtcagtgctttctgtgagaagcctgtagtatgcatcatgtttggaattactgccattttagagtatgtagatgcagatccccaattcgtcaatgttgtgaacatctggcagagacacagctgaaggaagcttcaacttgaacaatgattctctttagggatttctaacttacccatctcttttataaaataatcagataaaaatattatctgcctttttgtgtgtgtacatcattaacttagttttaaccctaaagaatgttagctttggctttttttttttttttttcacagtgtctcgctctgttgcccaggctggagtgcagtggtgcaatcttggctcactgtaacccccacctccagtattcaagcaattcttgtgccttagcctcctgagtagctgggattacaggcacgtaccaccatgcccagctaatttttgtacttttagtagagacgggtttttcgccatgttggccaggctggtctagaaatcctggcctcaagtgatctgcccgccttggcctcccaaagtgctgggattacaggtatgagtcaccgtgcccacaagatttggtatatttctttagaggaaaatacactcaagggttctgaaatttcttttgtgtaagaaagaactttttataaataataatttcagttatgtccataactaaaaatcaaggattccatttatatgaaatatctagaataggaaaacctatagagatagaaagtagattagtggtagtcaagggctaagaggatatggggagactgggaatgacagctaagggatgtggggcttctttttgagataatgaaagcattctacaaccctgtctcaaaaaaaaaaaaaattaaaaccgttcaattgtccactttaaaaacaatgggggaggtatacagaaactgcatacaaacatcttatcttaaattgtattcatcattcttaaaatttaattctattaataaaacggtttaattaaagataaaactgtatatgggaggtaaggagatatggcctttacatatttgtggatatctcacacaaagttactttgttcaggtttacagatttgggggcctagccacaacagttttatttgtacatgtatttcttccccatgtcctatctacaaggggctatgtgagatcaaaaccacaaccatttggtaaattcagattctgccctgccccaaatgtattagtcctgtattttcaaggccattaaagaaaaaatatcctgtgacctaattactaaagattagttgttgaatagtaggaactcaaagataattgttggtcttctattttatgcgaattcttctaagattcccaggttatttatcataagaattacatttacatggcaaatttagttctgttcctagaaatatctccatgacaaccaaaaggaactcctaatttctggcacacattacttcaggggtattttgagagttaaagtggttaatcgattatttagaatcctagcaataagagaaagaaaagaattaagggtagaaaaacatttatagcagtaggtatccctgcagagaacgggctaatgatcaactaaaaaggcatttgcatctgtggtacagcctctgcgcaaaattccaaatggcattctcacttccaagtcacctcacttctccatgtgccttcctgtcttctcatcttcatcccattttctatagcaagcaacactcatgctaactcgtgatcaaaagtagagcttggcggagtgtgctagtaacattttctctatgccctcaaaaactagttagatgcagagactttctccttaggcacacttaacttgtgcagcaaaaattactgaaacacggagtaactggcgaggcaaatatattgtgaaatttgttttagtacttttactcacgagtggctcttgggagctcagagttgaagctttttcaatggtatttactctggtgctccaagagcctagcagttgagtgtttaagaggtcaagcacatggattctggcctcagataaagctctgtggaaatctgactcatgtactttctagctgaaattctatgttgtattttttttaaggaaaataatagtacctaccttataggagtattgtgaggagtaaataaaatctccatttaaagcacttggcacaatatgtgactcagtttcctgttatgaaagtacaaacatttggtgcttttcagacaaagctttttaacagaggatacacatatcaatcaatccaagtccagaggtgcaaagagcttccgaaaagaaagagaaaggttaattctttctgggaaaggactatttggatgggcttcagatatttcataaagtcaaagatgatgacctagtaattaagaagggattgcttattatagatttgggaaatggtattaaaaagagcaagaaggtaggagaaaaaaagggctctaggaggtgattgttatgtagccggtctaagtagaacggaggaaaccagggagacagacacaaaatgcaggtgtccattgcaaggttcatagtgatgaataatcttcagtgaagtgcaaagcatagaatgagctggaaaacaaagtcagggtattaagacagactggtgttctgtgttgcttttgacctgtgtgtgagaaaaggagtttttttgcttttgtgtttttgtttttgttttgttttttgttttacctttgcagtttgaagtgattggcaacagccaaagaaatatggggggtattgggcaggagtataggaaaaatgagatgtgatgagcccagaagggagttaagattgcaaaattgggtaaccaaaatctggagaatttgtaatagaagctttagaagtctaacatctgatattctgcttgtaaccagtacccaaagggaggtgggactggtaattgaatttctgttcactttgcctgcaaaggtcaccaatacctattgggccctaactttaggaaataacaatagtttccaacctttcccatcctgaccaagtgacccttcatccatcacttaacttctgtgcaaatataaccaccctttttaatggagatgttttgaaagcgttgagtgtttagagtagaacaaacattagagcacaaatgtcatgatgtttaacttttacagctgtatgtgagcttggttagtttctctatcaacaatccactctctgagaacaaattaggtactttgagaatcttcccaaattgcttcaggatacttggctcctttgttatgctgaagaaaaaatttacaattgttccccagaacatttatatgttgtatgtgtttgttagagtacaaagcagttaattattgctgtaattttcattcccattatacgaatgagaaagctgaggtagagggagtgactatgtaatcgtaatctcacagatgtccatgtttgtcctgtgatttcatacccatcgcgagtaaatgcatgttcaatgcaatgtaaaaggctattagagatgttgggcaatttcacaaagtagatttcaagtctagggctgtgctgagcctcctccaccttcatgtatatgcaacccagtggcctacttaagagtgaaagtttctctgagaactccaacaccctcctaaaaatctaagtgttcatgtaagataatcatttggattttatcccaattgttgtcaattatgctctgaactttattattactgggttctaggaacaggacagatggaaattagatagctgggaaacatcccaaattttaaaaacctgaaagcaaaaatgacatcaatcatcaaacctcatttcccgggcattgttaaaaccatcaggccttattttaaagccagaccaagaagcagagttttataatccaagtaataatatattgtgggacagtggtttataaaaaaatacaacacatcatttcaaagtagctgggggcctgttttgacctgaaaagatctataaatgtggcttaagagtagcacagctggaactagctccagtattccagactccgcgtccactactcttaaccattacatcaagggaaactgcctggcagggaggattaagaggatatatttaaaaaataatccagattcattgtagcatgtgtggtgtcttctttctggagagagttttggttcctccattttccaatacaattgcagggatttgtctgtatgtgctgccaattgattgaaagatctctttcccttgaaaccattaaaagatcataggcaaagtctgtcttgggggttcagataatttggcttcaaggcaagagattagaagatgacatattgatttacaatgaggggaactgttgggtcttcagttcaaacacccacaagccctgctaatctgttattaccattatcatctacattttccacttatatttaaactgagcttgttggaataaggatgttataacttttttgctgtttaggttgtggtttctcgatcaggaccatcaacccctcatgtgaattttctcctggactcccatccagtgtctccagaagtgattgtggagcatacattaaaccaaaatggctacacactggttatcactgggaagaaggtaagctgttcccacagggaatttccatagacgtggtttttcccaaatgcatatttacaaccagtgtcacttggccctttataatgtctctcttcatcttaaatttacccctcctccattaagttctttagtgagtattccagagatcttctgaaatctagttaatttgttctccaagaaagactagacctaagggaggtctttttcaaaacttctccttttgtcctatatttctcaacaagaaaaataaacacacagaatgagaattacagtcctaatgacagagctctagtgcaggcagataaatcctggaaatgtacattggaatccgactccaaccaataatcccttttctcctagagaagaaagtgcatcttgatgccagaatgacatgcaactttacttagaattttccagagattcaagtgtgttttcccaccacttaaattatactctcttgttattttaaaatcatctcagacagggcacaatgtccctactatgtagaacctctaacattgtgtggcaatgctatgctcactggacaataatgttactttttcacatacctgctaacaataaaggaaaggaaggaatcagatttttaaaattttaatcaccgttatgacaggatttgcacacatagttgctaagtctagaaaattccatcaaatgatatttacatgtaccttttgtgtacttactttataattaattaacaaactagatacccctctggaagctctttccaccccttctcttcacagatcacgaagatcccattgaatggcttgggctgcagacatttccagtcctgcagtcaatgcctctctgccccaccctttgttcagtgtggctggtgccacgacaaatgtgtgcgatcggaggaatgcctgagcgggacatggactcaacagatctgtctgcctgcaatctacaaggtaggaatctctaacagctggcatacatgtttttgtttggtgttttttttttttttttggtttggtttggtttgttttttgtttttttagatacaaatcccactaatgaaaaaaatttaaaaatcaatttactcatttagctgtgagtcatcagctaaagcaccatctctctcttggctttatccctcgggcagggagggggtggtgtttgggcatccccccaagtcctgcacctgaagtgcttgcttcacattgtctaggttctatcgctgggcagctgctcacctttagtgccgtgtgaataaaagagtggtggtgaataagcaacagtgctccccattttctcacactggggcctgttccctcctgactcacccactctctgattcctcgccacttcctatataggccaagtgcccagacatgagcctccatcacagaaacagatctgttcatggcatatcctggaaccctgagctgaatcctgcaaactggtgatccctgccatgctggggcacacaggacagttttcttcctgtccgatgcatagatggtggccttgtctgttcacagatgagactgaagattatttcccggggtgaggtgggcaaggcaagtggagggtcaacacccatgggtggctgtgagtcttccttcagtgttcccagaaaaaaaagcaaaggctcaacggatgactatactaacatctatacttctgtaagccatgccactctttaattcattccaaaaatatttattgagtgcataccatttagcaggctgccctctagtccctgaggagatatagtccagaacaagatgagcacatctcttgctgatagagaactcagtttctggcaatggacattggctctaacatcgcagccatgctaactgtgttgccttatttgcttaagcatatattcggcactatgaaaatctccacgcaatttttaaaaatttcttagtccaaaacatcttgcttaaaaacacttccctggtgagaacccagtgtgtatttttctctgtgtgcatgtagaaaagttggactttagtaaatagttcttatgaaagattcaagttaaaggtctcggtcacctggttcatgcccaagtaaacaaaatgtgcgagtcagaacaagaaccacccccaagtgcatggctgttttcatttagttacggtttggagcaagatttgtagtgggtgactgggttttaaaccaagttattttctgttaggtgtgacacagttattaagacttagcttgattgaccagagaataaactaaagacagtgacaaaacaaatttaaatctatactgtagtatttgtgtacttttttgttgttcagtatacttttggaaccgtatgcaattttatacttttataaacaaacaacttcagcaatttgagacactaggaatctgaactctgctattccatgaaatagatatggaaaatatatgtgtgtgtgcccatgcaattaaatcacaacaatttcatttcaaaaataaccaagctggtattttaagtaaagaaaatggtttgataacctgtacaaatgaaacatttaatttttactaatgtgcttccttttactaagcataaaagctatactaaaatgcttaaaaataaagtaaatatttcagaattttctggaaccagagaatctcttgcaatatttaaatgtccctcctctctcacccttcttaactctagcattctatagttgatgattctcaaaggttgcgtgctaccatgcacaagtcagtgaggcttaagctgcagttaggaaggcagggcagctgagtccataaatccctctaggttcatagttgttaggaagatttcatgctgcaccagactgtgacagttagcattcttcctgcaaaacataagacagactcgaggtgggtgttaagatggccgagtaggaacagctccggtctgcagctcgcagcaagatcagtgcagaaggcaggtgatttctgcatgtccaacagaggtacacggctcatctcattgggactggttagacagtgggtgcagcccacagaggttgagctgaagcaaggtgggatgttgcctcacctgggaagggcaagggattggggaactccctcccctagcaaaaggaatccttgagggactgtgttgtgaggaacaatgcattccggcccagatactacacttccctatggttttggcaactaacagaccaggagattccctcatttgcctacaccaccaggaccctgggtttgaagcacaaaactgggcggccatttgggcagacaccgagcaggagttttttttcataccccagtggtgcctggaatgccagcaagacagaaccattcactcccctggaaagggggctgaagccagggagccaagtggtctagctcagtggatcccacccctacagaacccagcaagctaagatgcactggcttcaaattctcactgccagcacagcagtctgaagttgacctgggatgctggagcttggtgcagggaggggtgtccaccattactgaggcttgaataggctattttcccctcacactgtaaagggtacagcttcagcagacttaaacattcctgcctgctggctctgaagagagcagcaaatcccccagcacagtgctctagctctgctaagggacagattgcctcttcaagtgggcccctgacccctgtgcctcctgactgggagacacctcccagcaggggtcgacagacacctcacacaggagagctctggctggcatctggtgggtgcccctctaggatgaagcttccagaggaaggaataggcagcaatctttgctgttctacagcctctgctagtgataccctggcaaacagggtctggagtggacctccagcaaactccagaagacctgcagcagtgaggcctgactgttagaagaaaaactaacaaacagaaagcaatagcattaacataaacaaaaagaacgtccacacaaaaaccctattcaaaggtcaccaacatcaaagaccaaaggttgataaatccatgaagatgaggaaaaaccagcgcagaaaggctgaaaattccaaaaaccagaacacctcttctcctccaaaggatcacaactccttgccagcaaggaaacagaattggacagagaatgagtttaacaaattgacagcagcaggcctcagaatttgggtaataacaaactcctccaagctaaaggagcatgttctaacccaatgcaaggaagctaagaaccttgaaaaaaaagctagaggaattgctaactagaataaccgtttagagaaaaacataaatgacctgatggagctgaaaaacacagcatgagaacttcatgaagcatacacaagtatcaatagccaaatcaatcaagtggaagaaagaatgtcagagattgaatatcaacttaatgaaataaagtgtggagacaagattagagaaaaaagaatgaaaaggaatgaacaaaacctccaagaaatatgcgactatgtgaaaagaccaaacctacatttgattggtgtacctgaaagttacagggagaatggaaccaagttggaaaacactcttcagaatattatccaggagaacttccccaacctagcaagacagcccaacattcaaattcaggaaatacagagaacaccacaaagatactcctctagaagagcaacaccaagacacataatagtcagattcaccaaggttgcaatgaaggaaaaaatgttaagggcagccggagagaaaagtcgggttacccacaaagggaagcccatcagactaacagtggatctctctgcagaaaccctacaagacagacacaagacagggatgccctctctcaccactcctattcaacatagtgttggaatttctggccaggacaaacaggcaggagaaagaaataaagggtattcaattaggaaaagaggaagtcaaattgtccctgtttgcagatgacatgattgtatatttagaaaactccatcgtctcagcccaaagtctccttaagctgataagcaactttagcaaagtctcaggatacaaattcaatgtgcaaaaatcacaagcatttttatacaccaataacagacaaacagagagccaaatcatgagtgaactcccattcacaattgcttcaaagagaataaaatacctaggaatccaacttacaagggatgtgaaggacctcttcaaggagaactacaaaccactgctcaaggaaataaaagaggatacaaacaaatggaagaatattccatgctcatggataggaagaatcaatatcatgaaaatggccatactgcccaaggtaatttatagattcaatgccatccccatcaagctaccaatgactttcttcacagaattggaaaaaactactttaacgttcatatggacccaaaaaagagcctgcattgtcaagtcaatactaagccaaaagaacaaagctggaggcatcatgctacctgacttcaaactatactacaaggctacagtaaccaaaacagcatggtactggcaccaaaacagagatatagatcaatggaacagaacagagccctcagaaataataccacacatctacaactatctgatctttgacaaacctgacaaaaacaaggtatggggaaaggattctctatttaacaaatggtgctgggaaaactggctagccatatggagaaagctgaaactggatcccttccttacaccttatacaaaaatttattcaagatggattaaagatgtaaatgttagacctaaaactataaaaaccttagaagaaaacctaggcaataccattcaggacataggcgtgggcaaggacttcatgtctaaaacaccaaaagcaatggcaacaaaagccaaaattgacaaatgggatctaattaaactaaagagcttctgcacagcaaaagaaactaccatcagagtgaacaggcaacctacagaatgggagaaaatttttgcaatctactcatctgacaaagggctaatatccagaatctacaaagaactcaaaccaatttacaagaaaaatctaacaaccccatcaacaagtaggcaaaggatatgaacagacacttctcaaaagaagacatttatgcagtcaaaagacacatgaaaaaatgctcattatcactggccatcagagaaatgcaaatcaaaaccgcaatgagataccatctcacaccagttagaatggcaatcattaaaaagtcaggaaacaatatgtgctggagaggatgtggagaaataggaacacttttacactgttgatgggactgtaaactagttcaaccattgtggaagacagtgtggtgattccttagggatctagaactagaaataccatttgacccagctgtcccattactgggtatatacccaaaggattataaagcatgctgctgtaaagacacatgcacatgtatgtttattgcagcactattcagaatagcaaagacttggaaccaacccaaatgtccaacaatgatagactggattaagaaaatgtggcacatatatgccatggaatactatgcagccataaaaaaggatgagttcatgtcctttgtagggacatggatgaagctggaaaccatcattctgagcaaactatcgcaagaacaaaaaaccaaacaccgcatgttctcactcataggtgggaattgaacaatgagaacacgtggacacaggaaggggaatatcacacaccggggcctgttgtggggtcgggggaggggggagagttagcattaggagatatacctaagtaaatgacaagttaatgggtgcagcacaccaacatgcacatgtatacatatgtaacaaacccgcacattgtgcacatgtaccctagaacttaaagtataataaaaaatatatataaaaaaagaaaccctacaagccagaagacagtgggggccaatattcaacattcttaaagaaaataatttccttcccagaatttcatatccagccaaactaagcttcataagtgaaggagaaataaaatcctttacagtcaagcaaatgctgagagattttgtcaccatcaggcctgtcttacaagagctcctgaaggaagcacaaaatatagaaaggaaaaaccggtaccacctactgcagaaacataccaaattgtaaagaccattgacactgtgaagaaactacatcaaccaatgggcaaaataaccagctaggatcaaattcacacataacactattaaccttaaatgtaaataggctaaatgccccaattaaaagacacagactggcaaattggataaagagtcaagacccattggtgtgctgtattcaggagacccatctcacgtgcaaagacacacataggctcaaaataaaggggcggaggaagatttaccaagcaaatggaaagcaaaaaaagcaggggttgcaatcctagtctctgataaaacagacttcaaaccaacaaagatcaaaaaagacaaagaagggcattacataatggtaaagggatcaacacaaccagaagagctaactatcctaaatatatatgctcccaatacaggaacacccagattcgtaaagcaagtccttagagacctacaaggagacttagactcccacacaataataataggagactttaacaccccactatcaacatcagacagatcaaggagacagaaagttaacaagggtatccaggacttgaactcggctctggaccaagcagacctaatagacatctacagaactctccattccaaatcagtagaatatacattcttctcagcaccacatagcacttattctaaaattggccacataattggcagtaaaacactcctcagcaaatgcaaacaaacagtctctcagatgacactacaatcaaattagaactcgagtttaagaaactcacttaaggccgggtgcagtggcttacgcctgtaatcccagcactttgggaggctgaggcgggcggatcacaaggtcaggagatccagacatcctgactaacatggtgaaaccccatctccactaaaaatactaaaaattagctgggcatggtggcgggcgcctgtagtcccagctactcgggaggctgaggcaggagaatggtgtgaacccaggaggcggagcttgtagtgagccgcgaaggcgccactgcactccagcctgggcaacagagcaagactccatgtcaaaaacaaaaacaacaacaacaaaaaagaagctcactcaaaaccacacaactacctggaaactgaataacctgctcctgaatgactactgactactcggtaaacaactggtacatttgttatttttcaagttaaataatgaaattaaggcagaaataaataagttctttgaaaccaataagaacaaagacaaagacacaacatatcagaatctctgggacacagctaaagcagtgtttagagggaaatttgtagcactaaatgcccacaggagaaagtgggaaagacctaaaatcaacccctaacatcacaattgaaagaactagagaagcaagagcaaacaaattcaaaagctaacagaagacaagaaataactaagatcagagcagaactgaaggacatagagacacgaaaaaccccaggagctggttttttgaaaagatcaacaaaattgatagactgctagccagaatcatcaagaagaaaagagagaagaatcaaatagacacagtacaaaatgataaaggggatatcaccactgatcccacagaaatacaaactaccatcagagaatactataaatatctccatgcaaataactagaaaatctagaagaaatggataaattcctggacacatacagcctcccaagactaaactaggaagaagttgaatccctgaatagaccaataacaagttctgcaattgagacagtaattaacagcctaccaaccaaaaaaagcccaggaccagacggattcacagccgaattctaccagaggtacaaagaggagctggtaccattccttctgaaactattccaaacaatagaaaaacaagggactcctccctaactcattttatgaggccagcatcatcctgataccaaaaccagacagagacacaacacaaaaaaagaaaatttcaggccaatatccctgatgaacatcgatgtgaacatcctcaatacaatactggcaaaccaaatccagcaacacatcaaaaagcttatccaccacaatcaagttggcttcatccctggaatgtaaggctggttcaacacaggcaaatcaataaacataatccatcacataaacagaaccaatgacaaaaaccacacgattattgcaatagatgcagaaaaggccttcgataaaattcaacaccccttcgtgctaaaaactctcaacaaactaggtgttgatggaacatatctcaaaataataagagctatttatgataaacccacagccaatatcattttgaatgggcaaaagctggaagcattccctttgaaaaccagcacaagacaaggatgccctctctcaccgctcctattcaacataacattggaagttctggccagggcaatcaggcaggggaaacaaataaagggtattcagataggaagagaggaagtcaaattgtctctgtttgcagatgacatgattgcatatttagaaaaccccatcgtctcagcccaaaatctccttaagctgataagcaacttcggcaaattctcaggatacaaaatcaatgtgcaaaaatcacaggcattcccatacaccaataatagacaaacagagagccaaatcatgagtgaagtctcattcacaattgctacaaagagaataaaatacctaggaatacaacttacaagggatgaaaaggacctcttcaagaactacaaaccacaagcaaatggagaaacattccatgctcatggataggaagactcaatattgtgaaaatggccatattgcccaaagtaatttatacattcaatgctatccccataaagctaccattgactttcttcacagaattagaaaaagctactttaaatttcatatggaaccaaaaaagagcccgcatagccaagacaatcctaagcaaaaagaacacagctggtggcatcacgctacctgacttcaaactatactacaaggttgcagtaaccaaaacagcatggtactggtaccaaaacagagatatagaccaatggaacagaacagaggcctcagaaataacaccacgcatttacaaccatctgatcttttacaaacctgacaaaaacaagcaatggggaaaggattccctatttaataaatgatgttgggaaaactggctatccatatgcagaaaactgaaactggaccccttccttacaccttatacaaaaattaactcaagatagattaaagacttaaacgcaagacctaaaaaccataaaaaccctagaagaaaacctaggcaataccattcaggacatatgcatgggcaaagacttcatgactaaaacaccaaaagcaatggcaacaaaagtctaaattgacaaatgggatctaattaaagagcttctgcacagcaaaagaaactatcatcagagtgaacaggcaacctacagaacaggattaaattgttgcaatctattcatctgactaagggctaatatccagaatctacaaggaacttaaacaaatttacaaggaaaaaaaccatcaaaaagtgggccaaggatataaacagacacttctcaaaagaagacatttaggtggccaaaaaacatatgaaaaaaagctcatcatcactggttattagagaaatgcaaatcaaaaccacaatgagatcccatctcacaccagttagaatggtgatcattaaaaagtcaggaaacaatatgtgctggagaggatgtggagaaatagggaatgcttttacactgttggtgggagtgtaaattagttcaaccattgtggaagacagtatggcgattcctcaaggatctagaatcagaaataccatttgacccagcaatcccattactgggtatatacccaaaggattataagtcattctaatataaagatacatgcacacgtatgtttattgcagcactactcacaatagcaaagacttggaaccaacccaaatgcccatcaaagatagactggataaagaaaatgtggcacatatatgccatggaatactatgcagccataaaaaaggatgagttcatgtcctttgcagggacatggatgaagctggaaaccgtaattcccagcaagctaacacaggaacagaaaaccagacactgcatgttctcactcataagtgggagttgaaccatgagaacacatggacacaaggagggaaacatcacacataggggcctgtcgggtggcgggggtctaggggagggatagcattaggagaaatacctaatgtagatgacagataatcttatgtgtcttaaactttgcaggcacaaaatccagctaatgtatggagtttcactttctaatacatgcaagttaacctgcttttcaaggtacatgatgttcagtggctaaaattctttacagttctagatatgagagatttcaggactgtaagcccattattttgcttcaaacatggtatctgatctcatacttaaagagcaatgagaaatgcttcagaaaagggagagcactttttaatatattctgaatgtattaggatgcagttatcatatcttgtaaggttgaaaattcaggccgggcgtggtggctcatgtctgtaatcccagcactttgggaggccgaggtgggcagatcacgaggtcaggagatcgagaccatcctggctaacacggtgaaaccctgtctccactaaaaataggaaaaattagctaggcatggtggcaggtgcctgtagtaccagctactcgggaggctgaggcaggagaatggcgtgaacctgggtggcggagcttgcagtgagccaagattgctccactgcactccagcctggatgacagaacgagactctgtctcaataaaaaaaaagaaagaaagaaagaaaattcaaccccagtgagacaacagaactattcattgatcagaatactcagaaaagcagtattatatagggataggagggtaggcaggcagtatactgccaccagtaaatatatttgtgagttctactaaagaggaaaggagaccccttttggagtttttttgttctgttttgtttttgttttttagttttctcatgttttatcctaatgggttttgaaagcatgatcatttaaaatactgttggaatgggcccatcagtgatgtgatctttcacctgtgaaaagacaagggctacttttgtggctgtatctcccctatccagacaggtaggagacccagcctctgtggctttatgccggacgctcatttcctgcccacagagtttctctgcccttcaggataactcagagtttgccagccattgttgggtctatccaagggtgtgtagttcacaactgcttccttcctttttccctagaagggtaaaggttaccccataagctaaggggaaaatgcccagcccagagagaaaagctaagcagagcgagcctcttggatcctgagggtctagcagagggcttataatatctcttcctattgccagtgccccagttgcgcagctctctgcgtcttttctcaaatcatcacccaatccgtttgccttttatagaaagtgatggtaatgatgtgtgtagagtgacagacttcagtttttacatagaaagacgggatgtaggcagtgggatcaggccaacatcagccttgggcagcgttttcagtggggaagcctcctcattagaagagccggcagcagctgtgtgactgcctcaggctgaagagagtcctgggagggttggatgtcttgttctctcctactggatttctaccataataataataaacagatttatttttctagtagttctcatttgactagacatggatgaggtaaattttcaggaaaggcacaacagtgtaatggatttttatgggtaaaatggctatcataaaagctttaagctaaaactttaaaggggtttgataacgagggtacattaagactttggtttgcaattatttacttaggaaggatggaaatgtttgcaagtttgaatttggctaaaagcccttcttaattgtaaaagaatcacttttagatgttcacaagctgagctttagcaaatacctttactggttcttgagttgcctctatcttagttttcccaccattgtactttacagcacaatttacaatatgtccccacccccaaaagagcatttcctttctcaattgtcacaaagctgctgagaagaagcttatttttaacttggaaatgtgttttgttttaatagttttagcctgagagcaattatcttacacactttataggtgcctaatgcggtcttaaatcatgactgaccaaggtttatcaataaatccattgataacataccagaaatgagtctgcaataacaaaatgagtctgttatttgcttaacatcaaccatcagggggaaaaatttaatcctaaaaatgagatataaaacaataccaatgaagataattaggaaaaattgttacaatactgattttgggccctctctggttccgtttttatctatttctaaaagaaacaacataacacatgtattaaatattacataatttttaaaaggctgagtgtgtcaactaaccagcctggtatacatcaaatagtgaccatatttaaagaacaaggaaaaatcttcagtcattaataaatgtgaactaataggtaaaaagaagtagattcacttttcatttgttagtgcctggtgcataggaggtgctttattaagaaataattaatgaaacctgggcagcataacaagaccccgtctctacagaaatttaaaaattagctgggtgaggtggcgcacacctgtagtcctgtctactagagaggctgaggcgggaggattgcttgagcccaggagtttgaggctgcagtgagctaggactatgccactgcactgcagactgggcaagagtgagacccccatctctaaaagtaaataagtaaataatgaatgaatgaatgaatgaatgaattattggcagatatgtgttccaaaaccatctatatgtttcatattatgctagctgctgaatgcaactgggcaaacactggataccaaatgaggtatttttactgtgcaacttttgtctctgggtggggaataccatagcaaccagaatgtagtgcacgcagccagtgcacagagcaaggcgtataatggctggaccttggcttatagagcacatgaaggagtttgataagagctcagtccgaaggctgatgaagagttacaatcagagttatgagcaagtaaaagtctgggcccaacgtgtttctactcctaccctaaagagccctagaagatgaattcacttcagaatggcccaaaaagggccaggtccaatggctcatgcttgtaatcctagcactttgggaggccaaggcaggaggatcacttgagcccaggagtttgagaccagctgggcaacgtagtgagaccctgtctctagaaaaaaaaaaaatagccaagcatggtggcccacgcctgtgatcccagctactcaggaggctaatgtgggaggattgcttgagctcaagaggttgaggctgcagtgagccatgatcacgccactgcactccagcctgaacaacagagccagactctgtctgaaaaagaaaagaaaagaaagaaggaagaaaggaagggagggaaagaaaaagaaagaaagagagagagagagaaagagagaaagaaagaaagaaagaaagaaagaaagaaagaaagaaagaaagaaagaaagaaagagaaagaaagagaaggaaggaagcagagaaaggaaagaaagaaagaaagaaagaaagaaagaaagaaagaaagaaagaaagaaagaaagaaaagaaagaaagaacggaaggactcgaaaagcccctttattcctaccaagctgcatctgctctttgtcccatctttggatctcctgaaaacaacttgtttcattaacatgtcatgtagttttaatgtttgttccagatgctctgaaatttgtgacccttttccctttagtgaaaattaaatttttactaaattgtgggaaaatgaaagaatttcagactatttaaggatatacattttgtttgttcgttttccatatatgtgaaaaattataatatattgggtttttttaaaagttctatgttgtccttgtaggttttcccaaatagtgcaccccttgaaggagggacaaggctgaccatatgtggctgggactttggatttcggaggaataataaatttgatttaaagaaaactagagttctccttggaaatgagagctgcaccttgactttaagtgagagcacgatgaatacgtaaggatcttaaaatgctttgctggggtgtgcttggaaaataggttttgtttttgaatgaatatttcttttaaaattgctcaagaagctcatctcttgaattaaaaagggtcttggcctgtcacatgccttgtgggtctgttctgttttgttcttgtaatcccatttactcattggatttgaagagagagaaaggtgacatggcctaggtgaagagaagaggccagaaatgggagtttctcaaccatttatgcgacaagtcttcaggtgttgtctgagtagatttgcaagagtagcactagttgggatcacttcatccttggagtcttcaaatgtagagtctccaaaggctttttctacagaaatcagtaaacagctcagcatggatcctctcttttaaattcactttctaaacctcagaaatgtagtgaggcagctgaatcacgtgtttgagacttttttagatgagttaaaatttatattcagcttatatttactggcactgcaatatatgggctgtatctcactgaaccatccccacggtcctgggagggagcagtatcattcctataatataaaagaggtacctgaagttcagagagatgaagtgtggcttcacagaggtaatccagagagtaagagctgaacaagccttcagctcagctctgatcatcttctgatccaagacccgtgctagttctactgtattctacatgtacccttctacaagctttgaattccataatcatcagagaatccagaaattattcattatcacataataacaacactcaaatatttaaagttttatggttgaatctttatgattgaacccattctatcaggtggttattttatatctaatagaattcatttcagggttacacaaaggtccgaatctatccattttactgagaccaaaacactaatgaaggtaatatttgttagctgaatggcaaaacaaattttttctagaaatctcccttgtaaaatctccaaaactcttaatcattgcatataaatcaggacctgtaaaagtaaagcataattcattctctcctttaaaaagttatttaataaatcaaattgtatttaaattttctcagaactatatgattattcattcagaaataattctatggaaagccatcacaatttcattatcatttaagtaatttaaataagcatgtacaagtataaccacagaaatgtacctgttgacatactttaatgaagagattggcctatttgtagttagcccattgtttcatatgcatctgaagtggaccaaagattatccccaaatattaatattatccaaacttagattattatgcactattcaactggtgaggtctttatggataaggtctgatatttcctgtttgtctgtataagtgctatagtaccattaatgtaaagtttagtataagcagggtgcagtggcttacgcctgtgatcccagcactttggcagaccaaggcaggaggatcacctgagcccaggaattcaagaccagcctgggcaacgtagtgagactccatctctaccaaaaaaaaaaaaaaatttttttttaattaaccagatgccgtggcatgcacctctagttccaactcctgagtccagaggatcccttgagcccaggagttcaaggctgcagtgagctatgactatgccactgccctccagcctgggtgacagagcaagatcctgtctctttttacataaaaataaaagttaagtttatcatagtatagaaataggattatataatttttggccttaatgcttatcttgaaactctgcttgctattcaaagcagtcagctcaccatttagagttaatgtcacttcctataaaacaacctaaccagaaaattccttggatttgtcatgtattaaactttgggttttttttccagattgaaatgcacagttggtcctgccatgaataagcatttcaatatgtccataattatttcaaatggccacgggacaacacaatacagtacattctcctatgtggtaaggaagattctatcctatcatgtttgatttttacttaatctatttaaattataagatgaacaagttactttgttttgtttttatctcccctccaggatcctgtaataacaagtatttcgccgaaatacggtcctatggctggtggcactttacttactttaactggaaattacctaaacagtgggaattctagacacatttcaattggtggaaaaacatgtactttaaaaaggtgttgtaaatttattttttgttgcatctgtcaatttgaattaatatctgtaccttaaaaattaagcagattgttttgtgtgtgtgtgtggagaagaaaaatcaagatgtttatttgtttactctcctactgacaaaacttcctccttccaaaattcatctactccttttgctgatttttcttcctttctcttgttttttagcaatcctacttttcagttttgtcttcccatccaccctctttattgttatagcttaggatcttagctatactatgagctgtgagagtctggtcattgataataatttaaaataaacattttcatcaagatttgtaattagactaagtcactctggggaaggaagaaatggggaaaattgggtctggaagacagttatgtttctgcttcttagagttggaagagctcagtttaatcaagtaccaaaagtactttaaaggtttttttttcaaatctcaaatgttttccagtcaaggatagcttgtccacaacaaaggtaagtttgagatccagtcagattaaacagcctacactagaaaaggcttccactcaggaaattcccacttaggaaccattgagttatatccttttgatttgtggatataattctaaaatatgtgtatctctaatagctaaaattcacttccttaattttttttgttcagtgtgtcaaacagtattcttgaatgttataccccagcccaaaccatttcaactgagtttgctgttaaattgaaaattgacttagccaaccgagagacaagcatcttcagttaccgtgaagatcccattgtctatgaaattcatccaaccaaatcttttattaggtaagtagaagcttctgatgggtataagaaaacaatgaatacaaggatgattttgctgtagaatagtcaagaggaattgcagttttatctctggctttgatgctgttatgttgcttttgaaggcttctttccaattcaggagagaaaactatattcaggttctgagtgtagtttgacttatcaatgctagttcattccaagaagtatcttatcctgttctattacatttaaacagagtatagcaaaatagtttaatgtggcattgtagtatacatgcacttacattatgtacatatcaattctatactaaccttagtgcccagaagtggaattaccttttttcttccattctctagatatgtttttgtcctgcctgctttacacacagcttttctttatgccagactctctttgaattgatatctcattggacccagttcaatctgccttgtttccgttaattctatcagtctagcaacaatagttaagttcggttttctttgtatttttttcagaggtgaaatatttattttgtgtaattcggtgaataaaatacaaatgcatttcttaagcttatgaaatatgcattttaaaaatattttcaagttaaataagttgtttccaaagaacagttacccatgaacttccatttgatgttgactgtgcctctgacctgtaatcagtgcaggtgattaaattgaatccctctcttacagtacttggtggaaagaacctctcaacattgtcagttttctattttgctttgccagtggtgggagcacaataacaggtgttgggaaaaacctgaattcagttagtgtcccgagaatggtcataaatgtgcatgaagcaggaaggaactttacagtggtaagtcctttgagcaatggttctactcagagctctgcatctttgcctctaaccatgtggctttcatggtacctgagacatctcagtttcgcctttaaggtttgctagttaatttccttgcagtgtagccaagtagtattttttatttaataactgaaattatctagagtcttgggctaaccatgtggaaaaaatacatacacatacacacatgcacatataatgtttagacaagaatgaagattaccaatttgagacagtgtttttttatgtttgttggttggttggttttgagggtttttttgagacagtatctcaccctgtcatccaggctggagtgcaagggcacgatctcagctcactgcaatttccccctcccaggttcaagcgattctccacctcagcctcccaagtagctgagactacaggcacgagccatcatgcctggctaatttttgtattttttggtagagacgaggtttcaccatgttggccaggctggtcttgaactcttgacctcaaatgatctgcccacctcggcctcccaaagtgctgggattacaggcatgagctactgtgcctggcctgaggcagtgtttttacagacagtcagtacaaatggaaatcacagcatttccctagtccctttttaatgtgtcatagaacatggacccttttgctctaataaaatccttggaaaaggttgctgatcttgcagcagtattcttgcatttctaagcagctgacgtatgctttcttacagccccctgttcttcttatcattcttcttgtccctttgttagctctttcttgaaagagctaacaaagaaagagcattagaatatttatgttatgtcctaaagtgtgaatgttatttgctgtttctccacctatccttattttatataggtcacattaaagtggtagttttagtttagaccttagaaagcttggagttatttccaaagattccatacattttgttgatgtttttctctaatataaaataccataatctagtaggacttgagcactcaactcagaatgaaagttctaagtgctcttgctcaagcaaggtcttgattggtcaggtgatagattgaattacagcacttccttttagattctccatccaatatttcttgaagactaaagccacaatgttctttaattacaaaaaccaatttggggctaaaaatgtcaagccaaatcaccaaataataaggtcatttcaaataagatttttcttggccttctcaatcagccacattgcatcacctctagagagtattattagatttttatcatattcctgagagattgtactctagggagtcaccatatgaagcaaagcattttgaaaccaatccccacacatggccacaaacaaagttagagtaccactgctattaatttaaaggacatcagttctccacaactaagcataacaatgtttcattaaccaaataagaataatagtgaccctctttggtgttggtatgagaccttttaaagtagaaatctgagaaattattagtttatctaattaatgctgagcctccattattaagataatgactgaatttcctttcttctccctcattggcattaaagtgacactcagaatgccttagcttcagtcattcatttgtaatcaaatatttattaaaaactttttaggtgtcacacatgagagttacatatcccaaggatgattcaaacaatggtagacgataaaaatcttatttgtttatatatctggaaatataaacttctgttgttttagtgacaaacatgttagtacagtagaactgtacattagaatcggacaagagtgaaaaattcagtggatctattttactatttactatttattttactgtcgtttgtgaaaagtactttataaggagatatgtattcattccatgttccttgccacttatagaatttaaagctgaccatgatgaattgaacccatttattatttaacaaataaaaactcttggtcaggtctgatttagatatataggtccagccacaataactttaagtccaataaacttgaatcctttcaaaacaagaacaatcatcttcataacaaaatgtatattaaattgttaacatgtgcattatgccctaggagcctgcagtttattgtgtagttctcaaatttcttgttatgtaaacaattattgtgatgacagttaaattgttcatgtccatcaggaataaataacttttagcattataatattaattttatataaaactaaatagtataattttatccatattatatctctatcagttttatctgctgcctatatacatttttaatgtaagatcattttttaaatgattttttaaagaaaatagcaaataacaaattctgtttgtcctttttatgtatatcctgagtcctttttctattgtgggcataagtaattgttttatctccaactatacttgtcaaagaaaaggaaatctaagggatgttgttgcttgtttgtcttttccttgggggaaaaatgcaaccgttaaccttagatgtaccactatgtgttgctggtttagtctaagtacaatcaagaggaagctacattttccaaaattccataaatcagaattccaaagaggaagatttgaaatgagacatgaaagggcatgaaataataatagcagaggctttgtaaaatagagagcataggaaaaggtttcagtataaaatatgtcatagacaaaaagatagcatgggagtgaagacactgaattttggagttaatggcctaggatttatattcgctattctgccactccaagctgtgtgacctggcctaatgacataagtttgcaaagctcagtttcttcatttgtaaactgtgggtaatcataatacccacctataggattatcaggagaattaaatgagaccaactttgtaaagtattttgcacagaacctggcattcaataattaatagcttaaaagacactaataagattacctaacaacatagttaattatcatgttcaccatatggtgcttggtgctttacaaagcactttaccatgtggtatccaacatggtaaatagcattttcatcttaattcctaaatgaggaaactgagttattcagtgtgggccctaccttagttcccatagcttgggttaaagctaggagatgagccaaggccttctaaccccacaaagctgagctcccagtctgcctgactgcctcacacaacaaggggcagttcctccaggtgactgtcctgtcttcttaaggaaaataaaatgatgagatgaaggccagcttcagatagatcagcacagtttatgctgggcaggtggagctctgtgtttctttgaagggtgggttgtttggataattttgcatgtatcgtgtttccagaaatgtgtagtctaacattaggaagttaaatacagattttttcaaaaattatatattttcaattgattggggtggtaaattataaagttgctatggatgttgccaagctgtattctgtttacagtggataattgtgtctttctctaggcatgtcaacatcgctctaattcagagataatctgttgtaccactccttccctgcaacagctgaatctgcaactccccctgaaaaccaaagcctttttcatgttagatgggatcctttccaaatactttgatctcatttatgtacataatcctgtgtttaagccttttgaaaagccagtgatgatctcaatgggcaatgaaaatgtactggaaattaaggtaagaaatgctttaaacactgtcttaaatcatcagctcaaacttaattgacttcatagctatgtgaatacaattgttgtacttggccattgtatcttatacaacaccagcaaatatataaactctgaaaaacaaatctttttggcataaaactaaaagataagaataaccgtggactgcattttaatgaagcattaaaaaaccctttcttgtgtatgtattaaaacgtagcaaatgtgggacacaaattatccattaaagaggatccgcgtcatgcattatcttgctgatgttatacatttccccggacatgttacctaaatgtgctcattataagataaaacataagagctgtgaaagtaaatgcatcaattgtatctccgttcttccttgtaatacttggaattttgtatctgggtatggtcatctctaagctaatttgtaaatggaactagatatctgccaccttaggaacatattagcttctaaatgtaatttaatagagaataacagatcatcttttctaaagcaagcctgttgcaaacaaagaacactaagacccagaaaggttaagtgattgacaagtgacaaaatagtggcagaataataaagactagagtgcagcttttttatgtcccttcagtagtttctacttcaaataataacacaggcaaaatgctcaagacttgaattattcatagctccagtcactagaaacagcaaaatatttatccttcaacatgttgttaaaacatttagaattttttttcctgaaagatgatctgaatgcaaatatgaacaaacataaagcaataggatagtctttatttggttgtaatataggctttcatgggtcatctccatctaagtaataatatgtttccattgaaatttttctgactttttcaacaaaaatttaactgcagcccaacttatgcatatgttcacgttcatacaagtttactaacctcattattgtgttttgtacaataattaagcaagcccagcataaaattgaatggaagcccgcttcaatgaacagtgtgtttacaaaagcaaagttctttcatctgcttctttaattagttttagaaagggagaaataagcttttatcacttctttttttttaataaaactaatctagtgtgaccttttgctttcaacaattactgtgtttgccatttgaaagattccatttggtttttcttgatgataacaaaggtttatgtgcaaatagttttacactcacagaaactctatttttctgttcctgtatctatgatgaagggattagagataaacggttctttatctacccttccaagcacagtctttatggaagagaaaacttctctttccataaattaaatacccattattcaacatcctacaaaattgttggaccaagaaaaacataatttggcatcatcctcggcctgtcaatggtattcccaacatggcgaaagggtcttctagagactggcaaaaaacactttattttcttgcctatatatggaataactctttctctaacaagtgtatagcacctgccacgtgacagaatagtaatctagtgggagcagtggcaattcagggagattattttagtatcatggttcaatattttttcatacttcatttttcttatgtatgagaggaaagcaaaggcataagagaatatttgttgtgtcagcaatctaactctttatcaatacgttaagttgatcacattaaaacttctacctctcagccaggcacggtagctcatacctgtaatcccagcactttgggaggccaaggcgggtgaatcacttgagatcaggagttcaagaccagcctggccaaaatggtgaaaccccatctccactaaaaatacaaaaattagctgggcatggtggtgggtgcctgtaatcccagctactcaggaggctgagggacggaggtgacctgagtcctgaaggcggaggttgcagtgagccaagatggcaccactgcactccagcctgggagacagagcaaaaaaaaaaaaaaaaaaaaaaccacgtacttcatcaatgaaagtgttctggagagaatcatgtgtttagaatgagatatgctctttattgccaggaagatttcatgctcctcatgcagccatgcatgcaagagttcctagggtgaaaagagattgtgatcattccctgccctagttgtgagagtccctcaattcatagtaagcccagtgactacaccatgggcaaaagggcgagccaggtttggatgagggaacacaataggggtcaagcataagtcacccctcagaatgaatcctaagccccatggatggagaaggaagtttttggccaaggcttcaagtcccccaagagcagtcgtagacagtggtcatcaaaagtaggtacctctttgtgggtatacatgactccccaaatgcctctatcaacaacagctcatgtttgtatggaattttacagttgacactgtactttggcatattttatttcatttgagtctcatgtggacccatgaggttgggaggtcagtgatgattatccccatttatagataggtaaacaaaggtttaggaagattagctgatttgtcttgggtcacccaggaagcaaagagcagaactggggctcacactcaggcttcttgattccaaatttggtcttctgtcactgcatacactaaattacagtatttcttatattaactctcatttaatgtatactaaaataccattatagagacacttttctatcatatgctatttatatatctatgcagttctttagagggaatagctcttaactttttataaatatctaaaaatttattctgtttaaagaaactctgtatttctccctgagtgtcttatttctgactttttatgcatgagcatatcttatgaaaagtagaaaagtattctgtttcatgctggaacaaggactgcctgacattgccttgggggtttatcttattctgcagcatataggaacatatgagaataaagatgcttcaaatgttcaatctggagaagtcaggtcaaacaggaaaaagaagcacaggaagatgagccagggcagggagcggggacttggtctatgacactgtcatcacaggaacaaatgctgagagctcaggaggaggtgaagcatcagtgtgtgggcattggaaggatcaaaaaggaagcatggttttgaaccatcctaatccacctgctgcccagagccagccagatgttgtccttctccctttgaataatttatgtgcaactctacccctcaatctcagtcaaaaccaccatgaactcagttctgagtccagacaggataaaagtgaagggttcttttttcagaggttatttggcccagtgtcgaaacctgttcttattaatggtgctcaacgcttactctcaaactagtatttctttgtgctgcccaggttaatgggcattctgcaaaatatatatatattctttttccagggcagtttcatagtatctaataataaagatagtaaaaaatatattcctgtggtttcatggtacctagtagtaaaggtccccaactagccagcaaagccaccagtttaattttggtttgcccagcttttcccaaatggccagggaagttttccccaaaatgcctattaacatctggtggaactcagttctgaagctgtctgtgaggttcgttgcttggttcctaagttgagggacttgtgtcctctatgtgaagtgtaaatctcaccccctcaccaccacctcactaatttcctactgctgatctccctggactttggaccctcagcctggctgagtcctgctgccaaactgtactgacttgcccagacccagcctgtggccacctgggtgtatgaaaacttgaaggaccctcctctcatagtgttatttttcagatcctacccacttccactcccatctgctcggttctgtaaccatctcagacatgagtccccgggtgtgaatactcaatagaaacatgtcacacctggccagggttggagaggaaagagacatggtacatcctgatatagcacattgggagtaattagttttcatttttgaaatggatccattttgacattgcagtgagaggaagaaatccttactcatctttatattctcagtgactagaactgtgtctaacacacagtagacggtaagtagattttgtgtcaaatggaatttgatttgcttcatgatctagcccctttctggataatagttctccatatgtaaagcagaaatgacaataatacctacttcagggggagtatctttgcaggataatatgagatgattataactaaattgctctatgtctgttggagattaaagatcagaaagctctctctcttttgttgctttatttttaaacccacatattaccattttagtgactgaaatcaccctgaagcagttgaatgacttttatttaataatagttaatattcaataataaatattaatataattaatagtaaaatttctaaatataagttttttagcatctcaataaagctatgtttactttcttttattttaaatgacaaaaattagcctataccttttaaaatttttccttttttgggccccattgttatatagaagtgagctaccagtatcacttttgtaatatctgggactttacgcttctaatatgcatatatatatatatgtgtgtgtgtgtgtgtgtgtgtgtgtgtgtgtatacatatgtgtgtgtgtgtatatatatatatatataactgatagtagttgcttatataagtcactacttaccatgtgtcctttggtatctacatataaaatgagacacagtggatgtgtgatctgtttttgttttagagaagcctttatgcaacaaccagggagatcctaagcctgaaaccataagtattggaaacacaaatgttgtacattcatcccttcccccaaccttagttattatctaagcaagcaagacacattttagaccttttctcataaatcaaatcctacagctctttaatctcttttctttgtcattccctgaattccctccaatatgtggataagggttttatcccccttcagacctagccaacaagttgtcgtttgaagccctaaagtcatctcttagattgctgagcttctgtgttgtgttggcctgtgtggctgacctggttcaatggactacacatactgcttctagaagtatcataaggatagggtttgtctatatccattttatctgaaactccaacatcaggttataaagaagtattttcttcccacttcttttcctagaataataactgcctgaccaatcaatctattgagatccgtatgagaccatgtatgtgaatggagtttgccgagtattaaagattatataaaacaaaggagcagcattttagctattatgggctgctctttgttagtaagaagaatagtaatatgctttgatatatgtcacctcaaaataatagcttgctcaataaataactgtactcattaagtcttgatatgagaaattatacctaggtttgcacttctttcgcaaggctaattattggtttctcaaacaaaacgttgatatttttaaaatgcctgatggtaacttcagttaactaaatatgccacattaactaatttttaaaaaatttttgtgtaactatgtaattgttcaaaataatggaattgtgctctcaaattataatagtcatacagcatctcacataaatttcttttaaaatgaattcacttatgtataggactcaagtgtgcaagaaggatgaaagtaaactacccaactcaaacaaaaaaagaatgtattaatattaacataacataatacagtgttaatacattaacaactatttaacatcagatctctggagatgagacccggacatcagtattttttaaagttttcacggtgattccaaaagcaaagtcaaggctgagaatctctgcattgggcagtgttagatagtgcaacaactgaatctctacattgcgtcttttttgccaaacattgataccccctgaggacaatggtgaggtgatgataggtaagacatcattccacatttaaggatgtgaagcaagaacctctttccttttctttaaggtccaatttgatgcaaaagctatatgctataattcctaactaacacatgccctgaaatggtcatgctcccctttagccatcccaattcccatgaaaattagtatcatagaatcgtgtgccttggcaaacaacatggcctgtgtttgcagtatatttatattcctttgccattgttagcattcctgcagaactgtgaagtgttaacaacctttttttttttttttcctttcagggaaatgatattgaccctgaagcagttaaaggtgaagtgttaaaagttggaaataagagctgtgagaatatacacttacattctgaagccgttttatgcacggtccccaatgacctgctgaaattgaacagcgagctaaatatagaggtgggattcctgcattcctctcatgatgtaaataaggaagccagtgtaattatgttattctcaggcttaaaataaatcattaaagctcatttatgtgtgggttttggctcatcaactcagcctgcattcctagttgttattttagaaatagtgagctttttgccacattgtctccttccccaagcctgggaggtagatctcaaaagttctttctacccacactgcttctccatcacgccacactcttcccaaaatttgctgtaattctcagaagaaataaggatgcatccaagagtgtccttctactgcctcccaccaccccaggaggccagagccagtgttccactgccaaccactgtgatcactaatgcatagagtcccataaataaaggaagatgcatgcatcaaacaaagtaaaataaagattaaactactttacagtaacttttttcgtgtagacaactgaatcaaacaagctagaaccaaagcgagtgatctttttcattctttttttagcagctttattgtgatgtaattcacataccatgcaattcacccattgaaagtgcacagttcaatgggtttcagtatattatattgtcaatttctttgaattgaggtaaaatatacataatgtaatgtttgccattttgaccatttttaaatgtacaattaagttgcattaatttcattcacagtgttgtataaccatcagcattacctaattccagaactttttcgtcaccccaaacagatactctataaccaataagcagcagctccacatacccttctctcccccggctcctgataacttccaatctactctttctctctagaatttgcctattctagatatttcatgtgagtggaatcatacaatatttgtctttttatgtgtggcctattttacttaacataatgtttatccacgtggatgaacataagattcatccacgttgtagcctgtgtcggtacttcattcctttttgtggatgaataatattccattgtatatatcccacatttatccaagagtaagtgatttttaaagggttcctgaagtcttctgaagttataaaatggaaaaacacacaaaaattagaaaatcaaaggctgaatcatgagatcagagttggaatttcagaaggaccataaatcctaaaaatcataaaatgttagagccagaagggacttcaaagatttctgctgtgtatcaaaactgaagtaaaaatattctgagactttattgttccatcataacagtacaattatttacctcttatgggaagtcttctctgccctccaccccaccgtccaggacagaattaatgtcccattgtctctgttgattactgtttagtcatacttctatggtacataccacactgtactggaatcatttatttatatgtctgtctccccttctatacttcagttcctgttttttgtacatctttttatccctaatacctagttacaaatacaaacagctaagtaccacataagtacttaagggatcagtgtcccctaattatttgaacactggagcataattgaggaatctcttattatcctgaaggcagttatgccatttgtagaatggtaataaccagttggtatttgggacccaaagtgctacaacctgtgtagtacaaatatctatcatggctaaatgctgacttttctttatttgtcatttttagtggaagcaagcaatttcttcaaccgtccttggaaaagtaatagttcaaccagatcagaatttcacaggattgattgctggtgttgtctcaatatcaacagcactgttattactacttgggtttttcctgtggctgaaaaagagaaagcaaattaaaggtgcatttttgttactgttcatttttagaagttaccttaagaacacagtcattacagtttaagattgtcgtcgattcttgtgtgctgtcttatatgtagtccataaaacccatgagttctgggcactgggtcaaagtctcctggggcccatgatagccgtctttaacaagctctttctttctctctgttttaagatctgggcagtgaattagttcgctacgatgcaagagtacacactcctcatttggataggcttgtaagtgcccgaagtgtaagcccaactacagaaatggtttcaaatgaatctgtagactaccgagctacttttccagaaggtatatttcagtttattgttctgagaaatacctatacatatacctcagtgggttgtgacattgttgtttatttttggttttgcatttatatttttataaaaacctaaaggaagtatttacctctgccaagtaagtatttgacacaaaattacatggctcttaattttaaaagaacccatgtatatattacattatgattttagagtccataagctctcatttcacaaaaaggttaatttgagcaaaagtaatttgtttatcatctaagtgcaatagtaagaaattgcgaagctctcttttacaatccaggaagagttaagttacaaaatatacttatttaaatgtaagttggaactgctacattttttacctgttgaagcccaaacattgaaattatactgttagtaattcttcgaagtgttttcaatgaactgttagtacacagcctttttcccaccatattctaggacttgaatgtattttgagacttagccaaggaaaaccttcaattatgccatgaaaaaaaggaggggtcaatatcatcagctttgtaaaacactatgcctagtaatgttcaggttaatcagagttttcatgttgttttatttaaatctcctggtaaaagcaaaaggtctgtattgtatcagctccattatctttagaagttacaggatgtgagtcaagtacaagcatttccttggttgaatatttaccattggacaaataaaatgagtcacagatcattgaggatactggaaaagttagaagttgctcatccaaacaagttcaagagcaatgaagcacttaacattttaacattttcaacacttactacctcttatgttttgaagtttatgttatttctatggagatacacatagtaaacattgtctttgccctgattccattcacctttaaaaatccattcgtttaaccgtgtggaaaaatcaaacctagtttattgttttgaaatttagatctatttagtattttatgtgcacatttagtgcatctatttagtattttatatgcacatttcatagttctaatctgagatcattaaaatttacaaattttctttgaaaaaaaaacttacctaatcttctttgaacctccttactcaccaaagctctgtcatcattgctaagaaggttgagtttcacactcttttctccattgagcctgctccttggagacatgaaaagaaaacaggtaaaagagggtcatttagagagaatgagaaaataggtgcacagccaaaacctaatgaagaggcaactgcagagctttcctctctacatctggtggggacagcattctcatcagactttttcacggagacctagagtgctatgtggtgtgacatcagggtggcacactgatggtttcaattggtttctgcacatgttggaatttagctgaagagtcacgttttcatgccaaagggcttttatccatgtctcaccaaggatttccctcaatctgtgcacccttaagcatttagagccctgatctccagatgcaaaggctttaggaagtgagaatgaaagacctgagtttagagaggctgattggcattcccaatcccctggggaaggtttagagaccctgactccttggaattaagggagcaagtacccagctaggctccttccttcctcactcacccaacatttcaggtacttcactgatgttccacatccttctttaaaggttgctcttgtcttttttctggctagtgtctactataactgtaattgatgcccaacgcttttctggaaccacttttggccaagttcatttattattaatcaaactgtccactgtagaaaatactaaaaatgctcaagtgggattaggaatagtcaaggtactaacagcattctttttatgcccttctctcagattctgattctcctgcttatttgcaaacaaatgatacattttggtgctaatgaggaacccccacataaccttctccctgtgttacatactaatacatttcaatactatgcctagtttatcttcatgtcagttgctgtggctatgatgccccctccttgatatgtgtgaattcccagtggaaagagaaagggaaagtggaaatgccctatttggcattaagaaattgactatcagcaccatttcttcccctgaaataaaaaaaaaaattctccttgcaaaagggaactttgcctgaggttcttacagagctttggttataaagatcaacttataaagaatgcttacccctttcatagtgtccttaactaaacaacaaggatggtccactaaccgagatctaacctgccttctctaaacaacagtaacactaaatccagtgccatcactgcacagtggagaatttaccactaatgtgaaaagctttcagttttgggaatatagccattatttatttctaatcatatgtgtatttttcccttggccaggaatccataggttttgcacaatagtaattaattccattaacaaatagtagtgtctcaaaaggcatctttttcattttcttatatttgagctggatttttgtgagacgaggcaattgctcaactacctttgctgctaccactgcttccattcttaaggacatagtatattcaaaaataaaccataagcatggctttttgctattgataaagagagaaatgtctaaggaaatgagggtaaaaagctttcaaaattaatacttagtctacttaaatgaaaatctgtaaacatctaatgaaatgcttgtatatataacttagtatcttttcccaatttattatcatttttatcaaactaattccattataaaagctcttcctgtttcagtccccattaaatgaggttttactgttgttctttaataattttccttcatcttacagatcagtttcctaattcatctcagaacggttcatgccgacaagtgcagtatcctctgacagacatgtcccccatcctaactagtggggactctgatatatccagtccattactgcaaaatactgtccacattgacctcagtgctctaaatccagagctggtccaggcagtgcagcatgtagtgattgggcccagtagcctgattgtgcatttcaatgaagtcataggaagaggtaagtatttccactcagctttttgttaaatacgattttccagtaagcattttatctttggcctttgcagattaggaacttagacaatggtgaaagcaactgacagagcagtgataacaagtgtacttgatttctgttctatagaaatgtagccctgtaaatcatatccgtggggatttgcccttgtgcatggaagcaattggataatcccccaaatatattagaactaaatcacaattcgtcctcgtcctgtgtgtactagcaattatagtttcttcaaaggtgccatttactttcttctaaaactcagggccaggcgcagtggctcacacgtgtaatcccagcactttgggaggccgaggcaggtggatcacctgaggtcaggagttcaaaaccatcctggccaacatggcaaaaccccgtctctactaaaaaaatacaaaaattagccaggcgtggtggcgggtgcctttaatcccaactactggggaggctgaagcaaggagaattgcttgaacccaggaggtggaagttgcagtgagccaaggttgtgccacagcactccagcctgggcagcagagcgagactccatgtcaaaaaaataaatacttataaataaataaatatcactcctttaattttgagtatttttattcaatctctctccagtctttctttaccctgagaacagtgacaaactctatgaagcctggtttatagcagtttgtacactgctggacagcatcagaagacagagaatttatagcattctcctgatctaaagcaacatatatcatctctacaatgcactccaatttctttatacaaagataaatgaatatttgtaataagctagccaaagcagcaataacagctagcataaacagtatttgtggaaatatttagcaggaaaagaaaccaatcaaaaaccgggaaatgaacttcattcttcttgttgtttttttttttctaaaaagcttttacccttaatactaaatggcctctgatcccttttattctatatgtgctgcaagaggttgtacaggcatctgccagtgtgatacaagagaagctgatggcgtgatttcccttatatgaacacaaggccttctcactttcctgtggtagcatccacacattcttctgtcaaacaccccagagcgtaatcctttgtgtgctccttcttccccaagagtggcttcactgttaacaaacatctttccatttctcttcagagtaatatatagttctgtcataggcctataaatcccagtaattgcatcaattttagagtgtgtggactcactaattgtgttctaattctacacatttggaaaactagaattttttatcatgaaaggtactaaaatggcaattatttctcttttgaagttataatcattaacagctctataaatattagctactatgtatttatatgtttttctgcaggagaataggagcactcaaaagcataagttttattttattcttctttgcattagtagagggcagcctaatgcctgacactcacatactaggcactcatggtgtcttggccagctggatgaattaattagtgaatgacttacacagctatcagacatttggcacctctgggggaaattactgccactggataaaaggctaccattgggaaaatgatgtggttaaagccagagagaactggatgaagtgagtcagggtgaatttgcttcatctgggcaactgcctttcagtttctgccaacctggattacgtattaaccagtgactaatggggaaatccttattctataatactaatcctatttttaatggtaacatttttatttcatttcagcttattagaatatagagaacttattttattatagttcttcatgtgggttaactttattttcatattttaaaatactatgtcatcctttaaaaaaatttatttgatgaggccgatgttactcaccttttcagtggttccactgtggttgaatattttattaggttaggctttaatatgagtcatatcatctacaacttattcatgaattaaataatcacattgcttatatccttgggtgaaatgtgttgcatctacatatatatttacaaacacacctacgtacctatagtggtattgttaaaagtattttttaaatgtactcttttgctgtatagaaagaagaaagaataaaatgaagctcataaagggtttgataaataattatttcataattaaatgttacgcagtgctaaccaagttctttcttttgcacagggcattttggttgtgtatatcatgggactttgttggacaatgatggcaagaaaattcactgtgctgtgaaatccttgaacagtaagtggcattttatttaaccatggagtatacttttgtggtttgcaacctaataaatagcttataataaaacgttgatttacactttccccttgtggaaaaatcagctaccactgaaattatgggcctaatcctgaaaatttgttttgttctagacttttattgaactacttcccctgaaatgatccctcagagccctcattagtaagggggtaggagaaatgaggttcttggatgaactgagtatcatttaactataactatgtttggtttataatatttgttttgcaagtgacatttctggaaactattggaagcatgttggcacctacagtagtaatgactcattttacccagaggcattactataattattttttaaccacaacttccattaaaaagataaaaaatgaaataagacaaacaggagaaaactacgctggccaaaaattgaaaaatcataagtatggtaatacctcatttatccacatttttggagagtgaggcattccacatacatgaacttcctaaataaatgaaacctacccctttttaatgctggaacattacttaaaattttagctgttattgagaaaatctttttaagatgaaatgcatactctgtttaagggaatgcttccaaatacaaactaagtctttattggtgaccccaagccataattacagccataaattactatattacacaaacagtgtactccacatacatagtgttcctggctccgcctgtgttgacaggtctcacatgcttgcgttttctactcccatttctcattttctgcttgcaaattgcagcagcctgaaaaatgttaaccagctctactacaaactttatatgggacttaataagctttaagtgcacaaatgaaagattttcctgcaagatactttactgtcacaattatttcagtctttttaaaatataaatcaacatgctaagtagtgttctacatggttaattttgttggaagtctgaccatgagggaaataaatggacagtctttatgaaacctaagtataacctttgcactaagtttataggagacaaactggtggctggttggactctatcttgcaaaagtgggcataggtggtgactggaaggcacagtgcacggtggcatcattcactcagatgtgatgtaaaaagaacactctgcagtcaaaccctcaggacaagatgctaactgtgtggtttaccatttcattgctcttcctatctaaatttgacaaaagtattcactgttccataatgaagttaatgtctccaccactggatttctcaggaatcactgacataggagaagtttcccaatttctgaccgagggaatcatcatgaaagattttagtcatcccaatgtcctctcgctcctgggaatctgcctgcgaagtgaagggtctccgctggtggtcctaccatacatgaaacatggagatcttcgaaatttcattcgaaatgagactcatgtaagttgactgccaagcttactaactggcaaactagctgtaagccagccatcccttcaaaataggcctgctctgagtctttaaaaagctagtagccaaagatgcacatttaaaatgttagcatcattcaaatgcacctcaaagtcttctatcctggtgggaaatagtgacacctggaagggtttcctggagcaatgattcttacttgctctgcaagcaaccttgctctaccttccctctgatagggacatttagtcatctttgcatgtctactatgtgccagaaactgtgcacagcacaggagaagtggaagcagagcaagcctcagcccatatggaatgttaactctacaaggcattgaaaaattaactccagatgcgttccttgctgttccttgtccttgccatccactctcacacctcaggaactttgcacttgtgctccctcagcctggaacactctccccgcaaatagccacgtatctcacttcctcatcttcttcagcttttggccgtaatgccatcttcaacataagccttccctaatctgtttaaaattgcaactgaccacccaccctcatggcttcagactcctcttccctgctctattttcccccatcacacttaactgtcatctgatacatgcatgaagctgcctgaagctgcccaatactatggccatgagccacatgtaaaaggaggctagttcgaactgaaatgtgctgtacggtgtagaatacatcccagattctgaatacttagtattaaaaaaaaaagaaggtgaaatatctcactagtagttgtttatattgattacatgctgaaatattttggattttgggggttgaaaaatacattgtgaaaattaatttcacctgtttctttttacttttgagtatggctactagaaaattttatattacatgtgtgtcttgctttatatttctattgaatagcactgtagtagataataaacaaataaacaatagctatatagatgtatatgtatgcatatatatgtacacacaccctcatcccattagaatggaagctcatgagggtaggatttttgtgtattttgttcactgctgtggctccaacacctaaaacagtgtttagcacatagactcgcagtaaataattgttgaatgaatcagctaagggttacaaaaaaaggttcttagcctcttgcaagtggtagatttttttcttgacatttatgccaggacctaaaagtcaccaggccaggaccagggagggtgggaataagaatctcaagaactgaattcatagaaggcctcaagctccgtctcggttcctgctctccaagtctctgtgggaggtaatgaagttgatcaaaagcaactttataaatatggggtcaaattatcagagaaaataagctctaggagagtaatgagatattactcagccaaaagaataaaacattccctggcagtgaacttttgcagataaggcgaattgaccttacaaagcacacagctgccctgacagaccccactttcccacttcaacttttgttattaccctgatggattaatgtggctggaggtgctaccttctctagggtactgttaccccaggattaaagcatgatagagatttcctgttatccagaacggaatagtgccatggccttttttaatccaaggagctgatactgagagcaaccacaaacccagatgtgtcttaaagagaaacctaaaaccaggaactggcctttctctatgctgtgtgcattgagtggggctacagcccttttgcagggtccccactgactacatcttgcactgacaaactcctcagtgactgttgaaggggaataccccattcctgattgccagccagtgacatcaccagacttgacagctgagtggtttggggtgatttctttctgagcctcctctattcactgtgcttctgatgttctaacatcttgggccttactaaccctggaggaactgtccctcccaaggctagctaattcctgcaaatagtaaacagcttgccttcaaagcatacctgtcatgtgcaaaccaaccaatccagagcccttatctaacctcctcctttatcaggctcttacactttgggctactatccacctgccctaatcaccccagggcccagttccagacaactagaactatcctcggagcctgctgaaatactccagattggccagctccaaacctgcttaccctgccttaccagtttcttcccagggaaactgcaatgaaggctcttgctcatgtttttcccctctctctctctgcctctagagcccagggcttcccccatgtgaccctgcatgacagggtgtgcctcctcctcttgcaaactgtgaatagcaaactatcttttcaatggcagttgtctcctgttctgttggcctcatcatacctggaaaataataaaactacattttaaaacacctccattttcccatctggaaaatggagcctgtaacacctgcctgacagaagtgtagaagtagctgtaatttatgaaaacaattagcctggtgtgttgcatacaataaatacttaacaaatggttgatctgtcaatggggcacactttttgttgttgttgttttgttttttgtttttggagacaaggtctctgtcacccaggctggagtgcagtggcacagtcatagtgcactgcagtatccaactcctgggctcaagcaatcctccttcctcagactcctaagcagctgggactataggtgcacaccaccacaccaggctaatttttttgtgggcggtggatgggagtaaagacaggatctcactgtgttgcccaggctgatctcaaactcctggcctcaagccatcctctcgccttggcctctcaaagttctgggattacaggcttgagccattaagaccaaactaatttttgagacaagataattttttataaataaatatttcagaattctaaggtcaaaattagaacagtagatgcttagtttatgcttttctaactctctttgactgcagaatccaactgtaaaagatcttattggctttggtcttcaagtagccaaaggcatgaaatatcttgcaagcaaaaagtttgtccacagagacttggctgcaagaaactgtatgtaagtatcagaatctctgtgccacaatccaaattaagtgacaaggaggaatctgtttcccactgttcaatgctagttaagctgttttctcttcttatgcaaaagtcctttatttctgttacaatcttaaatcgatgtgtaagccctggggatgtgggtgggactttcagactttatccaacagagaatttaaaaggattctccatagggggtcttaaacagctgttgtgtacttttgcttttctcagtccttccctccagtagctctcaatgttgtggtttcacactgcattagtgttggggagggagaatttgatcttcagcatttgacagtgaaaaggagagggctgggaacacaaataccaacatattgcaacttcccaagagtggatttgaagccagcctgcagaagccctaccaaaaatggtatttggcaatgaatatacaaagaactttatttgtgtctggctgcctggctatgtaatacaacagtcaacagtttgtaattgagttcatgttttcccttgcatagcactgattcatgacttatggtatgtgtgaatgaaaaagggtgtgctattaatttcctaccttggttttggtcactgtaacaacataaaagccagcttaaacagaggatgcatagccccagatagcggaaattgatttttgttgaacttcgctgtttttcttagatgctttactgtgtatcctagttctctattacctcagtggtgggatatatgagttttgtgtgctaacctagctcatttaagaatgaaaaagtaaagtatcagtcccctgtcatgctctcccataaaactgagtatcgctaatcagttgacaagcgaagattggtgattgcttgggtagttaattagcatacttcatttagcaaccaaagtaaacccacaggggagacagccttactactgcagatctacattaaagcaaaaaggactttcttatgccatacaattcatgatctctttcctcagcctgttgaattggcaatgtcaatgtcaagcatttttattcaagaattctgttgtaatttagtgttagtcaatagaggccagatgaaatacttccttcagaagttatggatttcaaatactgaagccacttgtttaatctgtagatattcagcatcattgtaaattattctatttcagccacgggtaataatttttgtcctttctgtaggctggatgaaaaattcacagtcaaggttgctgattttggtcttgccagagacatgtatgataaagaatactatagtgtacacaacaaaacaggtgcaaagctgccagtgaagtggatggctttggaaagtctgcaaactcaaaagtttaccaccaagtcagatgtggtaatgtattggttatctctgagtttctcctcttttactttcatatccaactttttttgaagttttatcactacttaattttttaaaaaaattcaacaccaccaattccagttttcttcatatgtaaaaatggacttgtctgatacgtacacattgtatattttcataaattcactcatttgttcaaaaatatttgttgagtggggcaacataccagctccttaggaagcccagagctgaaccaggcatgaaccctgtcggccaagaactttggctcagaagggaagagatgagatggtcaacaatgactgtgacacaggtggcctggaatgggccctgattctcatagccccaggcgagcaagaattccacatcaagaaatctggaagctgtaactgaggcagtctagcagtgagggcatgatccctgggcctagctagtaaagtgccttcccttatctgcaaaggccatccttcttgcgcagaacaagctctcaaaaggcatgcacctgagtgctgaggctgggagaaatactcacctgggcagccagattcaccacattccccttccaccatatggagaagtggcatttgaattgggttaaaggacagcaggtttggagttgggcagctgggcaatggaaataccgatccaggtgtggcagaagagcaggaaagtataagcacctgtaaagttataaggaaacagtacttagttatttggcaagaacagaacacagagagggaagttatgagaataaatggagaaaaatatacttatactaggtcatagagttccttgaaaactgaactagagagtatggaatttattctctggtaatgtggaaacaaaaaagtaatcagattagactgcaatctttcatcattgtattagtccgttctcacactgctataaagaaatactgagcctgggtaacttataaaaagagatttaattggctcacagttctgcagactctacaggaagcatggctggagaggcctcagggagcttttacccatagcagaaggcaaaataggagcaggcattttacatggcaggagcaggaccaacggggctgtgggaagtgccatgcacttttaaacaaccagatctcctgagaactctatcacaagaacagcaccaaaggaagaaatctgcccccatgatccaatcacctccaaccacgcccctccctcagcattggggattacaattttacatgagagttgggtgggaacacagagtcaaaccatatcattccgccctagttcctcccaaatctcacgtccttctcacatttcaaaacacaatcatgccttcccaacagtcccccaaaatcttaactcattccaacatcagctaaaaagtccaagtccaaagtctcatctgagataaggcaagtcccttctgcctatgagcctgtaaaataaaaaaacaagttagttgcttacaagatacaacgggggtacaggcattgggtgaatgctcccattccaaacgggagaaattggccaaagcaaaggggctccaggccctacacaagtccgaggccctatgcaagtccaaaacccagcaaggcagttattaaatcttaaagctccaaaataatttttttgactccatgtctcatatccagggcacgctgatgcaagggatgggctcccaaggccttgggcagctctgctcctgtggctctacagggctcagccccatggctgctttcatcggctggcattgagtgcctgcagcttttccaggcacacggtgcaaactgtcagtggatctacctttctggggtctagaggatggtggccctcttctcacagccccacctggcaaagccccagcactaaggggaggtctcagggagctttttacccatggcagaaggcaaagcaggagcaggcatcttgcatggcaggagcaggaccaagtggggggagggggagcatcttatatggcaggagcaggaccaaggtggtgacaagctttcaccaaggggagaggtgccacacacttttaaacaaccagatctccgtagaattctatcacgagaacagcaccaaagggagaaatctacctccatgatgcagtcacctcccaccaggcctcagctcccacactggggattataattcaacatgagatttgaatggggacacaaatccaaaccatatcaatcattctccaagacaacttgaaaggagtagaagcaggaagatgaagtgagaagtggaacttgaaataagacacaatgagaatggaaaggaagagatgaaaggaggagcatctcagaggtagaatcagaagtatttaccaaggaattgataaaaagtcaaagattagcaaagatatatgctcatgcaataacacatatatgaagcacagaagcaaaagctggactcagaacaaaaatagcaagttgagccttaaacacactgagtttgccttgggagtagaatgtccaggcagagaagtccatcaggcaattgaaaatgtgaatctgcaacttgtaaaaaatgtattattcagcctgggctgtcatacaatagaccacagactggttggcttaaacaacaaaaatgtatttctaaccattctgaaggctagaagtccaagatcaggatgtcagcatggttgggctctattgagggctctcttcctggcctatagatggccaccttcttgctgtgtcctcacatggctaaaagaataagagtcagttctccagtatctcttcttagaagggcactaatcccagcatgaatgcccaccctcatgaccttgtctaaactgaattacctctaaatggccccatcattaaacattgtcacagtggggcttagagcttcaacatatgaatttccggggaacacaattcagtccatagcaggggtcaaggctgggaatatgcttttgagagtccaaaagcaattattcagtagtccaaaagcaattattcaactacatatataaagtgaaagagaaaagcagtgaggtaagggacccagaagcaaagaccaccatgaaagtcagagtaagagaaagtttcaaggagaaattggatgctcaacagagtccactgctactcagtacaccagaagggtcttggaagctgagtaacttgagtgatttggaggtctagagtgtgcttaggagcacaggtgttgaatggaatggagagtacacttattctattcacatgttgtaagtcagaggactgtgatgtctgaagatagagaaacatttgatgtttcagtccttaaggatgacaactaaaaaaggaaaatgtgcaaacaaagtagtcagaaaataatgttcatgggggacatgcacttgaagagaaagggttggtagcttttgagagatgatgggtcagagatctgagtgtggcatgggaagcaagaagtcatctcatccacctctctgtgaatcagcaagagggagaggtgtgacccctattggcaagagttgcaaagaaattgtgacttcaactgaaagctgagtttcagttcctgtgaggaggtaggggaactattagagaataagacgaggtgactgggagtttgttttcaatgagtaagtaggtcataggtcatggtggaggaccaggacttcagcatgcatgagattggtaagagaaagtgatagtgccatgtagagcttaatgcctgggattttgatcctgaaagattctgaaagaggtgaaagaagtgggtgctagagagggagactggggacatgttagtgacagtggcaggtgaaggcaaaagatagggagaattaacccatcctccaagaacatactgttcattcagacttgagggttagtctgccattaagaagccagagccaacccttacaactcaataataagactgtcttagtcgttttgtgctgctataacacaataccacaaattgggggatttataatgaacagaaatgtatttggcccacagttctggaggccaggaagtccaagatcaaggggccacatgtgctgaaggtcttcttgctgtgtcataacatggtggaaggcatcacatgggtgtgagagagtgcaagagagagcaagaggtgaacagattctctaacaaacccccttccacaataatgaactgactcccaagataatgacattaattcacccatgagagtagagcctcatgacctaattacctcttaaagatccctcctctgaacactgttgcattgggaggggattaagtgtccaacacatgaactttgggggacacattcaaaccatagcaaaggcaatattactcaatttttttaagtaagcagaagatttgaatagacattttaccaaagagacgtaagaatagctagctaatgagcacatgaaatgaaacatatgcccacatgaagatttgtacatgaatgatcacagtagttttcttcataatagccaaaaaccagaagcaatcttaatgtccatcaacgggtgaatggataaaaaaaaaatgtggtgtgtccatacaatggactaaaccattcatcaacataaaggaattactgatgcctactacagcatgataaacctcagaaacattatgttaagtgaaaaaaaggcagataaaaaaattacatgttgaatggttccatttatatgaaatttctagaaagaggcagaactacagagtcagaaaacaaatcagtggttgcctggggccaagagaaggagtgaagataaaccacaaatggacatgagggaattttctggaatgttgagatgatctaaaactggactgtgatgatatgatagctgcacgtctatataaatttactaaacatcatttaatcactttaatttactaaacatcaccaatcacttaaaattggtgagttttatgatctataaattatacctcaacaaagctgatttataaaaaaagagcctgatgaaattttggatgtttagggcaagtgttgggattctaagcttcttgacagccacatacatgcaacaatacccccacctccccaacaaacacacacagacagcacagaggccaaggcttccaccatagccacagtcactcagatacttgactggaaatgtacatagatttctgcagataggatggtgctatttctttctcactctcatcgaaagacactattttgtgctacataaaggctgaacctgaataatctgtacataatgctgctttgggaaatggttactgattgcatggataaatttgcacagtgttttacttccaggacagcgcaatcttgaatgttgacatggaacatttccaaaagcatgcaatgagctatgtgtatgttgaaacctgcgaccaaaaacttgcctgcttgtagattgggttttctttctagaaaatgcccaaatggagtttggctaaaatctgaatactctttaagtccattcaaacaaaatcggagtgtcactacactggaaatcactcacaccctcctctgaacccttttgcaatgggtgttgtaattgtattatacgttgtttcacacttaatacaagttcttccattaaactgtgtattgacttccttgttctcagcccttatctgcctcatctttctgaagtgtttaacattattgtaaccctcatttttcttgaaatttcctcttcctttggtttctgggacactgaaacttccagttttcctcctgcttctaggttgttttctttatcctcaatggcttctcttccttctgtcttccttctctcagatgtagctgtctcccaggatttttgtctttaggggtcatcctccaccaacagttggaaccattcccatcaataaccacctttgattctctctacctggatgtcatcatcagtgtcacaaatttaccatgttcagaatcaaactctttcctgccaaaccctcaatttctcacctcctggctttgattaatggcatcaccattgtgtaatttacccactcctcattcttttcagtgttcggtttttcaggttttgacaaatgcatgcagttgtgtaaccaccaccccaacaatcaggacatagaacagttctatcatctcagaaaatttccttatgctcctttgtagtcaacctctaccctatccccaggacctggaaatcagaaaaccagatttattttctgtctctagagttttactttttctaaaatgtcatataaatggaatcatgcagtcagtagtcttatgagtctgtctccttttacttcgcatattacatttgagagccatccatgttgtcgtatcagtagtagtaacgtatcagtaattcattcctttcttattgtggcaaaaaaatacataaaatttaccatctgaacgatttttattttattttaagttccagggtacatgtgcaagatgtgcagatttgttacgtaggtaaacgtgtgccatggtggtttgctgcacctatcaacccatcacctgggtattaagctcggcatgcattagctgcttttcctgatgctcctcccctccctcgataggccccagtgtgtgttgttcccttccctgtgttcatgtgctctcattgttcagctcccacttagtgagaacttgcggtatttggttttctgttcctgcgttagtttgctaaggataacagcttccagcttcatccatgtccctgcaaaagacatgatcttgttcctttttatggctgcatacaaccatttttaaatacacagtacagtattgttaactatgtgaacattgttgtgcaatagattcctagaactttttcatcttagcaaaactgaaactctatatccattaaacaattctctctctcccccaggccctggcaaccacaattctactttgtctaagagtttgactacttcagatacctcatataagtggaatcatgcagtatttgtctttttaggaccgacttatttcatttagcaaaatattctcaagcttcatccatgttctagtatatgacaagatttccttctttttaaaggcagaataatattccattgtacatatatgccacattttctttatccattcatctgtcaatggacatttaggtttcttatacctcttggctattatgaatagtgccgcagtggccatggatgtaaaaattctctttgagatcctttttttcaattcttttgtatatacacacagagacaggattgctggatcatatggtaattttattttcaaatttttggggacctctctactgttttccacagcagagtagttcatctctttttatttttgagtagtattccatcgtacagatgtaccacattttatttatccattcaccagttaaagaacatttggggccaggagaggtggctcacgcctgtaatcccagcactttgggaggccgaggagggcagatcacttgatgttaggagttcgagaccagcctagccaacatggtaaaaccccatctccactaaaaatacaaaaaattagccgggagtggtggcacatgcctgtaatcccaactattcaggaggctgcggcgggacagttgcttgaaccctggatgcagaggttgcagtgagctgagatcatgccactgtactccagcctggatgacagagtgagacccgtctcaaaaataataataataaagaacatttgagttctttccattttcaggcaattacttatacataattgtaatggctatgacatttgcttgaaggtttttctgtgaacgtaatttttatttctcttgggtgaatatctaggtgtaagagtaactaactgggttgtaagataagtgtacattcaactttatgagaaactgccaactatttttcaaagtggctgtatcattttatgtccccaccagcgatccataagagttccagttgttcagcatcctctcccgcacttgacattgtcagctttctgattgttagtcattctaattggttgtagtgctgtctcattttctttttaatctttatttcccaatggctagtgatgtcgagcctcttttcatgagcttatttgccatccttatatcacctttagtaaagtgtctactcaaatcttttgcctatttttaagtatttattaataatattaatttagttagggtttattttattggcttgtttttgtttcttattgaattgttcgagttctctgtatattgtggatacaagcatatcttatgcgatacacttttgccaatgcatttttttttcttttgggacgaagtctcactctgtcacccagcctgaagtgcagtggtgcaatcttggctcactgctacctctgcttcttgggttcaagtgattcttttacctcagcctcgccagtagctgggattgcaggcatgagccaccatgcccagctaatttttgtatttttagtagagacagggtttcaccatgttggccaggctcctgacttcaagtgatccgcctgccttggcctcccaaagtgctgggatcacaggcatgagccaccggtgacacttggcccacaaatgcatttttctagtctgtggattaccttttcatttatttaatggtatccttcaaaaagcaaaagtttttgattttgttgaaaattttatcagtttaccaattgataaaactttatcaatttattttttttcttttatcaatcctggtgttgatgttgtatctccatgcatctactcttgaatgctcagatttgcctatcatccttccttgctcacttacctcagtagcaaccctgtctatcacttttcatagcttacaaccatctttcacatttaatcatttctttgatcatcaccttcagtaaagttaggccagatattctccagatgagcttattgctggtgctcaaatgctcaaaatggcttgaccaatgccatacagtaagcacggatgatagcgctctcatggcttgaaactaaaactgacttgtttcctaatgcacatgaattgtacacctccctcccctcacccccgaccccccctcaaccgacagacacacacacacacacacacacacacacacacacacacacacacaccagcttctctcttcttggtcatcatcctaatcagcatcacctcctctttcactgtccctcccctcaccctgctgtcagccccacaatgctttcaggggagtgtggagtgcagacaatacaatgctcttcctggaaaccttcttcctcttacctccctgtcccgtgagtcctccagctattttctgatacccagttattgcccacgtcctttaattccttggaaaattacccaactccatcccccttttatgtgactttgtctccagacaaatctacatgtagcgtagactgtcagatagggagacctgatcacagaactttggcttcctcatcctaaaataaaaccaattacatcacaggattgtaaccaagtacaatccattataaggattaaataagatgttttgtaaaggatataatgcctatgcatgaatcattatatgacaaatacactctttcactaccttaattccagagaaaagcctcataggcttccgtattgtaggtatgcaggagtgtccctcacctattcttattcagaaacctcctaactggcctccatattgtgaatcagcttctcctttctgttctaagcttggcgcttacagatgccatctccctgagcacaactcagaactcagccatgtcccattgatttcagtctaacgcactttctttttttttttttttgagacggagtctcactctatcgcccaagctggagtgcaggggcgcgatctcagctcactgcaacttccacctcccaggttcaagcgattgtcctgcttcagcctcccaagtagctgggattacaggtgcacaccaccatgcctggctaatttttgtatttttagtagagacagggtttcaccatgttggccaggctggtcccgaactcttgacctcaagtgatctgcccacccccgcctcccaaagtgctgggattacagatgtgaaccaccttgtcccgtcctgtctaacccactttcaacatttaaaaacctccacagcacagtcccatttcaatcttatgggtccctaatcccttcccctactccaacatgtcaagcaacgtgaactattatactttatggtttaataagaacacatatgcagccaggcgccgtggctcatgcctgtaatcccagcactttgggaggccaaggagggtggatcacctgaggtcaggagttagagaccagcctggccaacatggagaaaccccgtctctactaaaaatacaaaaattagcctggcatggtggcaggcgcctataatcccagctactcaggaggctgaggcaggagaatcgcttgaacccgggaggaagaggttgcagtacaccaagattgcaccacttcactccagcctgggcaaaagagcgaaactccatctcaaaaaataaaaaaggaaagaaagaacacatgtgtactgttactcctggccccaccccctccacccaaaactctccctctgccctcatattacctgcacctataaaacaaagtctccctgttcctcaagacccaccttactgtcactctcttcctgcagcctttctcagtaccctactattatctctttgacttttggcaacctttgtacctctttgatattactgctctatattacagctattatcttattgtcctgtgtggcagttatctgctcaattctcttaaccctgttcattcagccctgggacctatctagtaacttgaacagtaacctactcgtatgtgatcaagggtcaattgatacttgttaaattgattttaaatgttaatgcatattctgggacttgaaagttaacacgatgatgttgtcagaagtgattgttgattgttaagattttcagactttgaaaacttctactttgcaaagctgaattagacagcaaagttctgtagctccctcctggcaaggggtttgagttttctgttgggatcaaggcagtcagcagccatcaagggttcttgcacttgggcaaagaagtcattaatggtaatttgtatcagcaattacagcatctacctcatttctttctttcagtcgcagcgttcaaaggcaggctttattctccttcttgctgggtactgcaagctacacttgcctctcagttttatgtcttcctactccagctgtctggtgtggattttccttctgctccaagcttccttcatttcttcctccttatgcttcctactcttagagtggcctggaagtgttgctgggccagaactgcccccctgggtcctgtccacaggggcggcctctgcccatgctgactctcctcgtgtcattcttgcatgggcacatgtccagggggagataatatgtatgacctggtctatcctgagcacagtgttttaaatcaagaaattgcatgtttattgaagttcagtagaccaaacaagacctaagggtcaggaactcttaaatgtttatcccagtgtggactcagatgtattggggaattttagcaagtcacttaacctctccgtgtccctgtgatcttcctatatagtactgatacggctattttatatgaatctagtactttcacatcttcatgtgacagttttattgaaattaattttcaatagagaaacttgttgccttgcagttttttttatttctgatttttaatatgtatttttacttatgttgatttagaccttcccatttaatagtaacctttcaatgtggttacatttcttaaagagtatttatgttcagtttgaaaccacacaaatttaaattttgggaggctttcttcttcttttacaagtaatgtaaaattgtagtgaagctattggaaaagaaaaggatagaaacatgttagtgctttgacacagcgggagagaattttggaagagatattctaccaactacagatggaatcttcatcatcatgtagacttcagatattcttttagaaaactttacatttacttataatctaaaccttacttgtttaaacaagtcatgaaatgtatagcttaataattgcctttaagaaaattgttgcccaaaacagaaaccgtattgagtatgtaaagccaagtttagttaccaagacctactgatttcctttcatatatgtatggtcacatctctcacctcatctgtcctgtttcttgttttactagtggtcctttggcgtgctcctctgggagctgatgacaagaggagccccaccttatcctgacgtaaacacctttgatataactgtttacttgttgcaagggagaagactcctacaacccgaatactgcccagaccccttgtaagtagtctttctgtacctcttacgttctttacttttacagaaatgcctgccttcaaagggtctcttacagcatgtctttctttttggaacagatatgaagtaatgctaaaatgctggcaccctaaagccgaaatgcgcccatccttttctgaactggtgtcccggatatcagcgatcttctctactttcattggggagcactatgtccatgtgaacgctacttatgtgaacgtaaaatgtgtcgctccgtatccttctctgttgtcatcagaagataacgctgatgatgaggtggacacacgaccagcctccttctgggagacatcatagtgctagtactatgtcaaagcaacagtccacactttgtccaatggttttttcactgcctgacctttaaaaggccatcgatattctttgctcttgccaaaattgcactattataggacttgtattgttatttaaattactggattctaaggaatttcttatctgacagagcatcagaaccagaggcttggtcccacaggccacggaccaatggcctgcagccgtgacaacactcctgtcatattggagtccaaaacttgaattctgggttgaattttttaaaaatcaggtaccacttgatttcatatgggaaattgaagcaggaaatattgagggcttcttgatcacagaaaactcagaagagatagtaatgctcaggacaggagcggcagccccagaacaggccactcatttagaattctagtgtttcaaaacacttttgtgtgttgtatggtcaataacatttttcattactgatggtgtcattcacccattaggtaaacattcccttttaaatgtttgtttgttttttgagacaggatctcactctgttgccagggctgtagtgcagtggtgtgatcatagctcactgcaacctccacctcccaggctcaagcctcccgaatagctgggactacaggcgcacaccaccatccccggctaatttttgtattttttgtagagacggggttttgccatgttgccaaggctggtttcaaactcctggactcaagaaatccacccacctcagcctcccaaagtgctaggattacaggcatgagccactgcgcccagcccttataaatttttgtatagacattcctttggttggaagaatatttataggcaatacagtcaaagtttcaaaatagcatcacacaaaacatgtttataaatgaacaggatgtaatgtacatagatgacattaagaaaatttgtatgaaataatttagtcatcatgaaatatttagttgtcatataaaaacccactgtttgagaatgatgctactctgatctaatgaatgtgaacatgtagatgttttgtgtgtatttttttaaatgaaaactcaaaataagacaagtaatttgttgataaatatttttaaagataactcagcatgtttgtaaagcaggatacattttactaaaaggttcattggttccaatcacagctcataggtagagcaaagaaagggtggatggattgaaaagattagcctctgtctcggtggcaggttcccacctcgcaagcaattggaaacaaaacttttggggagttttattttgcattagggtgtgttttatgttaagcaaaacatactttagaaacaaatgaaaaaggcaattgaaaatcccagctatttcacctagatggaatagccaccctgagcagaactttgtgatgcttcattctgtggaattttgtgcttgctactgtatagtgcatgtggtgtaggttactctaactggttttgtcgacgtaaacatttaaagtgttatattttttataaaaatgtttatttttaatgatatgagaaaaattttgttaggccacaaaaacactgcactgtgaacattttagaaaaggtatgtcagactgggattaatgacagcatgattttcaatgactgtaaattgcgataaggaaatgtactgattgccaatacaccccaccctcattacatcatcaggacttgaagccaagggttaacccagcaagctacaaagagggtgtgtcacactgaaactcaatagttgagtttggctgttgttgcaggaaaatgattataactaaaagctctctgatagtgcagagacttaccagaagacacaaggaattgtactgaagagctattacaatccaaatattgccgtttcataaatgtaataagtaatactaattcacagagtattgtaaatggtggatgacaaaagaaaatctgctctgtggaaagaaagaactgtctctaccagggtcaagagcatgaacgcatcaatagaaagaactcggggaaacatcccatcaacaggactacacacttgtatatacattcttgagaacactgcaatgtgaaaatcacgtttgctatttataaacttgtccttagattaatgtgtctggacagattgtgggagtaagtgattcttctaagaattagatacttgtcactgcctatacctgcagctgaactgaatggtacttcgtatgttaatagttgttctgataaatcatgcaattaaagtaaagtgatgcaacatcttgta

SEQ ID NO: 4 - DNA, 21780 bp, Homo sapiens
acatctcccggcggcgggccgcggaagcagtgcagacgcggctcctagcggatgggtgctattgtgaggcggttgtagaaggtatgaggaggctgtgcggtgactgccgccctcgctccgggccgtcagccctgcccccgctccctgcgttctcccaggccctgcgcccgcccgggtacctgcccggtctggaaggcggagtgtttgttttgccacctcgcccgggcgggggcgagcagtgaagcccgcggagcgagagacttggcccggaggcgggagcctgggccggggccggggaagccaggcagcgggttaaggcttttgatttagggagagggacctgggggtaacctaaggaaaggcctcaggtcatcggaggggagacctggcccgggggcgggaggctgggctgggaccggggaggccgggcagcgcgaggccgggccggggaggccaggcagcgggaggcctggccaggggaaccgagcccggggccgggaggtcgggcacggggcaccgagctccgagggcgggagacctggcggccggccgagtgccggaaggccgggtcaggcggcggaaggcagcggcaagctgggaaacggacggcgctaccgccggcggaggagtggccccgggaagcggtgctgcgagggctggggcggccgggtgctgactgtgagatactcgccctgggggctgatccttccaattttggacgaggcttccgtctctgctgccttccatgcctggggcctggattatcccgggttgacaatgtggtttagctcttccagagagatagttgcagggtttaaactccaattccttttcggccctgcagagtttcgtgagtgctcgcagctcatacctgtggctgtgtatccgtggccacagctggttggcgtcgccttgaaatcccaggccgtgaggagttagcgagccctgctcacactcggcgctctggttttcggtgggtgtgccctgcacctgcctcttcccccattctcagtaagtggcacccaagcaggaaaccggaaaacatcgttcgcagccccctctcgcccacccacttcttttcctgcttagtcgccaagccttgtcgaccttgtaaatgtctgccagatctgtccgcgtctctctatctctgatttcagccgtctgaccacagcagcctcttccctggtctctccacttccagacccgcctgctcctttgcagtccactttttacagcacaggcagagggatctttatgaaatgaaagtctagaaagctcgtcctttgcccttaggttaaacccagcacttaatatggctaacaaacccctgcgtgtgttgggtcctgagtgcccccacccctccttatctttagcaccggttcgatttctgcacggcaatgctgaccttcatacctagtgtctgcctgcaacacctctgcactccctttctcccgccatcacatttgattagaagagctgctacttaaatttctgttttcattaaacagtttaaggttaaatcttcctatgctgtgttctttctgcagccagcattccctaagagagatgtgtcatatcctttgcagttgcttgtttactatcttccctgctagatttgcaagcaaactccaggagggacggacttggtttatcttggtatccttagtgtcttgccccaaatgcggggcctggcataacacagtgaatgcccatccattgtatttttacttttatgccctatctagaaaaagtagacctggtttaggattattcagcaaataataattagaaaagaaatggtagaggtgacatacggagtcactgaaacgatgtaaacctgcaagatagctgaaagagggccaggcaaggtggttagaccagactgtatcaaaatgggctcagccactgtgaatgtgcgtgctgtggttacataatctctaaaaatgaaatataaagcttaaatcatctctatcacagcccgatgcttggactttggttttgctttgcctttttgcaaaagaaggtttttgaaagtgaaaattattttagtgaatggatgaacagtttattggagtatggcaataaaacctgttcaaagtaagagacattagacattgtacctagttaaatcagatttgcttttgctatcctgaataaaggccttgcctcttgccatttgaagagactggcatctgatataggcaattataatgcttctttactgttttgttttcaaacctcgtttaacacaatctcctactgcttcatccccctacaaagcagtctttattttgatgaatgatatattacattgcttctggtgcctactattagatctttaagctctgccccaaagataagaagcactggtgtttgggcctaaacaaagatgggagaattcttagatttatataatattctttctctgcatgttttgttcttaccttcacatgttgcctgtagagcttctttgcattacaataatgaaatcaagctacctgatatgtattggacacggtctggcatctgccttgttgagccacttttgaataccagtgagcatcggtataagccctgaatagagatagggtttgtctcttccactgcttgatacactcagggtctagtatagtactctgcacacagttggtgttcagtaaattgttatggtgcaaatatcaaatgaataaatgctactgaatctgagttttggcagtttcagtcttcctgacagcaggatttcttcaagcggttttaaacttgaatctgattctgcaaagtagtcatccttggtgggagtgctgaggctttaaagtcatctgtaatttttataaaaaggcatccgagatcctccattttacacttatatcatacaaatcatttagatctgtgaaggctttcccattttctccttttgtccttccaaaaacaccatcttaggacttcacctggcacagggaagacagatcgtttgcacatactaagtgcccttctttctaacttgtgtcataaactcagaggctttgaatagtggagagtgctctgtactgtcttcctggtcacgtggcccttgccagaggaaaggaaaggatggtttgtttgtatagtacaatggaacttatttcaatgtattctgtatttgattttacattcctgttctcatatttttaccttaattacataacaaatattaaaagattgacttcaccaggcccagttacaatcgccagtttgataattcttatacgtactcaaatgaattcagagaccagatgggaaaagattttgataaaacctctggtacatcacaactgaagtcttttcttgtccaaactattgtgaaacagatgttctttctgtttcatttgctaaatctggaaacgtgactgcttttgagactttgtcctctctgacaggtaataaatataatcctgatatttttcaagttgtttgacagaagtgtaatctccccagaagtcctgctggacaggcttcacttttcctttggaggaacacagagatacagggaatatgttttaatgacatatacctaacgctgaacatgaaaccagttattttacttttattattattatttttagaaacagccttgctgtgtcacccaagctcaagtgcagtggtgcgatcatagctcactgcagcctccaattcctatgctcaagtaatcctcttgcctcagcctcctgagtagctgggactacaggtgtgtgccaccatgccaggctacttgtttttactttgttatagagatggggtctctctgtgttgcccagactggtcttgaacacatgatctcaaccattcctcccaccttggcctcccaaagtgctgggattacaggcgcgagccactgtgtctggcctatttcactttagaagtaaattgaatgccacatgcgaagtttgttaaatttttttaaaaaaggaaagaaaacacaaaagtaaactacctagtcgcatcagaaatgccatagtcatttttgccattttttcattcattagaattcagtgcattatgttattttgttatctctgcagtaactttctatcatgttatttattttctttgtcttatttaaagcttctgagattatggatttttgtttccttccctgaagttaagtgttatcattcctatatagtactaagctgtctacagaatagtgggagtctgccctcttgagttgggaagatcctagtttgaatcttggctgtgcgactttaaagttcattaacttctcttagcctcagtcacctgaactctgcagtggggatccttatgcctcagagtgtcattgggaggactcacgaaaatacgcttgtactttgagttcagtacctagcctgtatgagccagcattaagagggacagtcatcacgcagcgctttgcacacagctctcacgccacatcctttggctactgttttggtaaatctttactagtaaatgtttcttaaaagcatttacattcatggacatgattcagaaactaacagttgttttttaggtctcactttgagatttaaaaacccttagggcagagaccagattttatttcttacctcagagtttccctgtaggacaggaaccagcaacagcctaatgagctgattaagaattttagagatttaaaatttaaattaggattgccagttttagagactggcacataaatgttttcatttaaggcagtgactgtttcctttaggatatgattttttatctttctaagatgagatcaccatcctcagaataatttgtaccccgctgggcactagctaatggaggtgatgtcatgctaagcagcacttcagtgagttttgcgggaaccaaagctctgctcccaggagtgtggatttggtgctttcatgtggaaaaagcggatgatgacaagtagagagcaaatgtgcgcatgtctgatgctgtaaggatttcctttaccatcatataaatttttaaagtatatcaaaataaactgataactgagaaaatatatgttgttcagatactaataatgaagttaatgaagtccactatagtatttgtccctgagaaatctttatcaaatattttaaatcctattgtaaaataatgtattttttctttcagttttagagactggcaatcctaatttaacatctccttttgaattccccaccacaggcacactttcacacattcactctttaataacaggttgtttcaaattgttaatactttatagcttaatatagaaatttcactttagaaattaatttttatttctctgccttaatgctatagatgttgtagtctgctttacttcagtattgtaatgagtagttggctaaccaccatgtaaatagggagaacattctagttttttacttgtgtaggaaaacacagcttgaaatgtctaagtatctattttagagtgaagtaaatttatactgacaatatttttttgtgtttgaagacctgactgttacagcgttggtggcaagtgttaagggatccaggaactagacaagtgattctgagacctgagttccaggtttctaagtaatatcagttggtctactgagaactttgccataaacatatgtgttcagaaatttcctttcttagcagcagcatcctgaattgaacagaattacacacacatcagcccagtaagaaacaattcatgttaagtccattgctatgccaggataaatcttttaaatcacaattatttttcctatttatattttgtcaaataagaatgttctaaaaaccaaaatttctgttttcttttttttttttttttttttttgagacggagtctcactctgtcgcccaggctggagtgcagtggcgcgatctcggctcacggcaagctccacctcccgggttcacgccattctcctgcctcagcctcctgagtagctgggactacaggcacccaccaccacgcctggctaattttttatatttttagtagagacggggtttcaccgtgttagccaggatggtcttgatctcccgaacttgtgatccgcccgcctcggcctcccaaagtgctgggattacaggcaaaatttctgttttcatttaaggcagtgactatttcccttaggatgtgatttttttatccttctaagatgagatcaccatcctcagaataatttgtaccctgctgggcactagctaatggaggtgatgtcatgctaagcagcacttcagtgagttttgcgggaaccaaagctctgctcccaggagtgtggatttggtgctttcatgtggaaaaagcggatgatgacaagtagagagcaaatgtgcgcatgtctgatgctgtaaggatttcatctaccatcatataaatttttagaagtatatcaaaataaactgataactgaggcaatgtatgttgttcagatactaataatgaagttaatgaagtccactatagtatttgtatagtatttgtatattacagtactctgaaaagctggtcactatttaaagtttccattaccagtcacaaggagagaataattttatcccacaattttattgctggcaaaagacacaagtttattaaaagtcagtatttcagtgtaagagttactagactgtttgcagaagtgttcaaaagagatctttaggtccttggttgtctgtggaagctgatcagcatttaggggttcctgagcacagactgtgaaccctgcatttggcacatgcattcagagagccaatttgaggcagactgggggctagaaaggatactgccaggagctccaggttcagcttccgaagttattaagtcttatttcccagtttttaaattagacttcattttttagagcagttttaggttcaaaccaaaattgagaagaacgtacagagacatcctgtatcccacctgccccccaacacgtgcgtagtctcccccattatcaacatcctgcaccagagtagtacattcttacaaaggaacctacactgacacgtcatcatcacccaaacgccatcgttcacaatcaagttcactcttggtgctgtttatcctatggttttggacaaatttacaaggacttgtatccaccattatattgtcacactgagtagtttcactgccttaaaaagtctccgtgcgggccgggcacggtggctcacgcctgtaatcccagcactttgggaggccaaggcgggcagatcacgaggttaggagttcgagaccagcctggccaacatggtgaaaccccgtctctactaaaaatacaaaaattagcctggcatggtggcatgcgcctgtaatcccagctactcaggaggctgaggcaggagaatcgcttgaaacctaaaggcggaggttgcagtgagccgagaccacgccactgcactccagcctgagcaaggagcgaaattccatctcaaaacaaaaaaaaaaaaaaaaaaaaattctctgtgctgtctccctccctcctagccactggcaaccactgatctttttactgtctccatagttttgccttttccagattgtcagatagttggaatcatgcggtatatatggccttttcaaactggcttctttcacttagtaataatgcatttaaagtgttcatggcttgctagctcatttctttttagtgctcagtaatattctgttctctggatataccacggtttatttattcattcaccgactgaaggacatcttagttgcttctagttttgacagttatgaataaaactgctataaacatctgtgtgcaggcttttgtgtgaacataagttttcaactcctttgggtaaataccaaagagtgcgtatttaccatatggctggatcatatggtaagagtatgtttagttttgtaggaaactgccaaactgtctttcgagttggctgtaccattttgcatttccacgagcagtgattgagaatccctgttgctccacatcctcaccagcatttggtgttgatggtgttctggttttggccattctgctaggtatgtaatgatacctcattgttgctttaattagcatttcccattatttgcagtctgtgtatctttgatgaggcccactggattttcactttagattttctatagattggccataaagtcttgaaacaaagatattttctcatggattataatgcaatatcagtaaactattatgtgttcacctacgtttccagacttgttagctaccctgtactgttctctcagttaatcaagttaaccacaatttgtttctcaaccacaggtggctaatgattttgtatgtggtctgtccgctttgaattgatgtgcatggggcaagttggtctctatgatattcatggttcaaggaagttcgagatttcctggtacctaatacatgtttattgtacatatgaaagaaaaaagggcagatagaggggaacatggtactgagcatgatagaggcaaggaagggtggctactttgataggagaatacccctatttttgtcactcttgaaacagggccaagagttgaaattggctagaacaatcctgacctttgttgatattattttatagaataatatttgttactgttttctcacttttaaaaaatgcagatgttatagaaaaattagaagatatagaggaatgttaaggagtaaataaggtgtcagtaatgccatcacccagacagccactgttaataaatatgttaatatgtgaagacatactaatatgtaatatgtactgagtgactaatggcaggtcacttagtagctgtctcgattatcagatcaactgtcatggtatggcagtgtttatgttcaggtacccgtattagttattgttgttaatccctttctgcgcccaagttataaactaaactttttcataggtatgtacgtataggaaaaaatatgctgcatataggctcagtactgtatttggtttcaagcatctactgggggacttgggaggtaccccctgcccctgccccacaggtatactactgtataattattcttctatctaaagtaagatctaatggaagataggaactttgtcttgtcttccactctgtcctatttcccaggatgatacctggcacaaagtatttgtttactgacaaactaaaagatgatttatcccaattatactcacatcttcccttgattttccagaaagcctacaggaagtaagatggtagaaaagcaaagtcttcgtagaaatgcagagcatagactggctcttggagaaggtcaaacatcaccctctcctgtggttaaattgagatggtggcactggctgtcttctatattattgctgcacctttcctcaccaggggtgcacacaaaactgggagagaggggaggaaggagcttagctttgtcttaatagaagggaagaaatgatgttttccaagagaccttgaaattggggaccttggtaaaggtttcagtttgggaagataaaaaagtcctgggatggattccaacagtgtaactgtactcaatgccactgagctgtacgcttaagagtggtaaattttatgtctatttcaccacagttttaaagattaaaatttttaaaagtgggggaagttacctaggactttctagaaggacttttgagggtgagcaagttctgttataggcttgtgtattattttggtatttctgattttatcataggagtgaggttaaagttgtattttgactggaatttttgacattgtcagggtttctagagtgtggagaaggtcactcagtattttttgtttttgttttttgttttgcctttgttcttgttttcctctatttagggaggtggattgccatgggaagtacctttgcttcgaaaagccagaaaatgcctggtagaactccagaaaagtagtaaggagctggcttcttcagaggcagcatagcagagtgggaagagggccctgtcacttagattgtgactgtcgacaaagtcacttaaccaccagaagttgggttttctgacgtttagaattttgaaaagattaaaactgagtgccttgcaaagtacctggtatatattaagtgctcaataagtgatagttgctttgattctaagaactggttcaccttgtgagatataattgtgtaatggaagaatgaaagcagaaactttagtttctacttttacatttcctgggccattttactaccctaaatgagaagctgggcttccaaaacccactttaaaagtaaagactaggccgggtgcggtggctcttgcctgtaatcccagcactttaggaggcctaggtgggcagatcacttgaactcaggagtttgagaccagcctgggcaatacagcgagaccgtatgtctacaaaaaatacaaaaattagccagacatggtggtgcatgcctgtaatcccagctactcgggaggctgaggcgggagaatttgagtccaggagatcgaagctgcagtgagccgtgattgcgccgctgccctccagcctgggtgacagagtgagaccctgcctcaaaagaaaaaaaaaaaaagaataaagattaatggagatttggaacatcttgatactgtatcttgggaatctaagcattgtagaattgtgttatgtgagttataccattgtggtgggaagtttttgatttttgttttaactgtgttgagttgcagttcttagaaatgacccgaggtgttgtcttacaaaagaaataaactgtaatctgtatcttgatctgatgagggtatgtaaatataaaaaatcgagctgtatactttctatatgctttatgtagttcactatatataattcatagctcaattaaaaagagagagagaggctaaattgtatgtaccattgcaaagaaatcattatccccagaactgactcacatacacctttaacagtagagggagaactgaggtattaatttggaaaaataatcactgggataattaatataatgcagtggttttatgactgattttttattaacttctattttctttgtattctagttaataaaggtatccatggagaacactgaaaactcagtggattcaaaatccattaaaaatttggaaccgtgagtatttaaattgaattctttataatcagagaaagatggggatgtgtaataagcaaacctcgagcagtggggcaagaggaaagagagtggtctctctctcaggccagagagaccaagtgacttcctacctcagacagctgtgtggctttgcataaactgacttttcttctctgaacctcgtctttaacatggggctaaaactttcacagaactgaagggaagatgaaaggaaaggcctagtagggtgtgtgacccatagttggaaacctagtcctggaaccaaaaggacaccacaggagaggcaggactcccaagcgccggtgctttctaccctcccgaatcgctctataggattagagggtttaggtttgggaggagtttcttgacctcttgtttatgagtttttacgactaaaatgcaatgccagttttcagtccggggacaaactgcctagttatggatgaattttaccctttttttccccgtgtctttttggaatattctgcttattaatgcttccaataactagcagatggaaaaaggaaaaagataaaactcaaattcactttttaattcttgtctgttattatttatttgggatctctcgtaatactttaaattctgaaagtttatttctgaaacccagtattgttattctcggctgccctgaatattacaaactaattttattactaaacaatatgattacagaaatactattaacaagttaccactaaagatttcacaattttgtttagcaaagggatttttctagaaagtaaacttttaaaatgcagtcccattttagagagttgttgctgtcatttaaatcattttagccagtgcagtggcttgctcctgtaatcccagctacgtgggagctgtggcaggaggatcacttgaggtggagagtttgaaaccagcctgggcaacataacgagaccctgtctctacaaaaaaacaaaaaacaattagtccaccatagtgtgtgtgcttgtagtcagtcctagctacacgccagaggttacagtgaagtaagaccccatctcttcaaaaaaatcctttgaaagtgatttacacattttcctactattttttttttctttcttttttgagacaggctggagtgcagtgatctgattatggctcactgcactcctgggctccagtaatcctcctgagtagctaggactacagacatgtgccaccatgcctggttatttttgttttttatttttgtagagatgggggtcttgctgtgttgcccaggctggtctccaatgcctggcctcaagggatcctcctgcctcggcctcccaaagtgctgggagtacaggtgtgaaccaccctgcctggccctaccttttcatgtcatgcagaacaccacttcaataacaagttgcacggaagccccagacaggtttagggttgtttcgatcctttggtaagttgccctcacagtcccggctttcacagcctctgccttttattaggagtatcccctcgtggactagctatcatatgcttgtaaagtacctacctccttaggaggcacccagagcacgtggggaaggggtgtcgggagctgggagtcataagtcccatgatccatcatctgtaggactcaaaggtcaagtcacgctttcaggatttaacttcagtctgtaaatgtgaggctgttcacctctggttaaaaatcataactgttttctcacgttgactcctttaatttactacatttaatctttttccaacagtatttttggaattgtgtataatgtgagatgctcttaaggttaagtgcatgagtatatggactgtaggtgttagtgtttggtagttcctagacctgtttttgcctgactcttggtctagatcagggatcaagcttaaggcctgtttttatcaactttcgttggaatataggcacatccattcgcttacatattgtcctaagcccgtttcaccagtataattgagcagctatggctgggcacagtggctcacaactgtaatcccagcacttttggaggccaaggcaggaggatcacttgaggccaggagttcaagactagcctgggcaacatagcgagatcctgtctctaaaaaagaaaatacagaaattagctgggcatggtggggcatgcctgtctgtagtcctagctactcagaaggctgaggaaggagtatcactggagcccaagagttcaaagttgcagtgagctatgatggcaccactgcactccagcttgggtgacagagccagaccatgtctcaaaaaaaaaaaaaaaagaatagaattgagtagctgtaacagaaaccagatggcccacaagcctaaaacacttaatatttagcccattaaaaaaaaagtttactgaccccaatctagatagcagaggtttttttagataagtgacttccagacagatattttcaattatttacaataatgcttttatatattaataaattactaatttgtttagctcatggggtttaaggaataatttatgaattgtgataaatattgtgctttgagttatatttgcattttgttgatttcccatcatttcagggtaatttttaagatttttactcttacctcaaaggataaaatatttcacaaagttaataagtaatttttaaattataaaggtatttgatgaaattttgaagaatttagaggaaaatgtaaaacatggaagttaaaagcctgaactctgaagtccaacagatgctttccttccttcttggctgtgacacaatatttgcataacctttagcacattacttagcctcacgtcaggtcattttctcatctgtataactgttgatgtgaaattgaaatgaagacagcctggtttataacattcaacaagtgttaactgttactgtgagttataaaaattgcactaatataaacagaaggcgtggtcatttctacctttgtaaagctattatttgatttctaaacagaaagatcatacatggaagcgaatcaatggactctggaatatccctggacaacagttataaaatggattatcctgagatgggtttatgtataataattaataataagaattttcataaaagcactggtatgtgtcttacataatttttaatccttttcaaatgtttgtgccatttacatttgatataatattaaaagcagtattattgaggtattagacagtaaaccgtgacacagactagctgtgaagtagagattgggcaggacctacaggtcctctgatacactgtgaacgcgtcactcttctgcccaacttcatagcctcctcttgctggcctcctatctgtatgcttggttgcctctgccctgacttctctgtagcccttgcttctttttcttctttctgcttcctctttgatcccaatggaaggttctcaaaaaaacagttaagtggtagtatttattttttccccagaaactgcaagagatatcacaagcattgccttatttaatttatgacaacctggaaagtaacgatgagattctgaaaggttaaagacctcgcgcagtcacacagtatggcggcagagctaggtctgtgtggctccaaagcccaagctctgaatccatcttctgttctgcttcacttccttgtatcctcatgtgctctgttgcctgtcttcccttaccctacgaagctccccatcttagagagacctttcttttactctgttccttttgattcctttgatattttgtctccttcccttcttccttaaattttgaatacatgtagtttaagcttgtactcttcatttgtttccattccttcttgagtctttttccattttctgtctctactactaaaactgcttgctttaaatttaccatggccttgccaccagatccccctctcgatttctgtactatgtacaacttgaatgtagtactacatttgagaatgtttttttagaaatatagataataaaatccttcacagtgccaaaaaagctaattaatatttggtgtattgttattttttcttggcagttctttttaaagcttgattttattcataacgtataagcaatgttgtcttctgcttgtttcacttaaaggaatagcatttttcatattgctgcataattttcatatctgttataatgattatataatactgcatccccaaaactaccattcacttaatttgaataatttactgtatgaatgaacattatggctgtttcccttttaaattgatgctatgataattctttgaattggcctattaatcatattagagttaatttttaattagagaagctgtagtagatctaaggtgggccagtacctatcagagtggtggtggaaatggaaggaagccagattacactgggaagatagcagggtttgtgtcagattaattataaggagtgagaagagaatagttgaaaatggagctctaaatggcatcagttttattgcttttggctataagttgagatgccaccttcaaccattaacttaaaaacacaacaccttgtttacttttgctttacgcatatttgaaaatttacttctagatattctgcctcacatttctagttaggatacctccttcctatagaattttgcactgttggctctattgtttcaaaaaccaaaaacaagcatattattccactaccaccagcacctccccccacatatttagaccagcagtctgggttttgcccagtgagctcctttcctactttgcaatgtaaaggtcaggttctcatgagatctctggcaggctggtgttgggccaggcgccatggctcacacatgtaatcccaacactttgggaggccaaggcaggaggatccttgagcaccaaagttcaagatcagtctgggcaacacagggaaatcccatctctacaaaacagaaaaaaggtagcagggtgtggtggtgcgcacctgtagtcccagctactcgggaggctgaggtgggaagatagcttgaatctgggaggttgaggctgcagtgagctgtggttgctgtactctagcctgggccacagagcaagatcctgtctaaaaaataaaaataaataaaaattaaaaggcagccaacacatcagcaccagaagccagtgaccttgtcacacagctgagataatcaacaacattttggagatacatgtagactttctgtatttaatcttcatacccatcaaatttactcaattctgagggatgtttcccaccaagatttagcattttgaaatctgagtgcatcatgcagtcaatctgtacgttaatgtggaaggttctctaaaggagtggtagaaagcccaggagccctggatacaggcccagcatagctttgtcactttggactggtttgttaactctgctacatgtcccacatctgcacaagtgaaactagtaataatatgactctcatggtgattggaaggattagagattagccatagcagaatacctgatgaacagtaataatgtttgggggttttccttgaaggcactataaatgttgtaatgctatcttaaaattgttgggaagttagagtcagagaaacgcatttcctctgagtgtgacagatgtgtgtatgtattataggatcgtattgttttctagtcttatttttttaaactgatgattttcccatggcaacattttatctgtgaaaatgacaacatagtatatcccattatataagttagtatagcttgtctaaccaaacccttattgttagacatttgtgtttttcactacctaaaccgctgtgaaagacatcattttggctataacactgatgagcttatattatgaagtatcttataagctacaaaattgaagaaattttgttcaccatgttcaaaatagttagaattctcttaccatttaaaaggaagaatttattgtggacttctgaattgctgagtagttaatttcatttcaaagtagttattctttgttttccatacaattaaaagtaattctttctgttccaaggaatgacatctcggtctggtacagatgtcgatgcagcaaacctcagggaaacattcagaaacttgaaatatgaagtcaggaataaaaatgatcttacacgtgaagaaattgtggaattgatgcgtgatggtaagaagaaacaattagaatgaacttcattgtacaattaattttatactatggtctagcaataattatatgtataataaaatatgagaattgtggaattatactgtacataaccctaatcttacatactttagtaagaagtttaaaaaaagttatttatgccaacttcctaaaatggtttgagatgtgttgccgtgccccaggttaggttaagatgacctcttagttttagtctcagtttcttcatcatgttcccatacagtatatctgaagttgttgaataaagtcatggattttttttccttttatttgcaaatgtctttacagtttctaaagaagatcacagcaaaaggagcagttttgtttgtgtgcttctgagccatggtgaagaaggaataatttttggaacaaatggacctgttgacctgaaaaaaataacaaactttttcagaggggatcgttgtagaagtctaactggaaaacccaaacttttcattattcaggtaatgtctaactgagtgatttggttattgacgattaagcaggggttactattctcaactgtaaattatccaaaggataatttttttcctgaagctaatgaactattgttacttttcatttatttaccacttaaaagatatagagtaaattttaattttatacttatatcaaaaagactcagcataattaacatccttttttttttttttttttttttttttagacagagtcttgctctgtcgcccaggctggagtacagtggcgcgatctccgctcactgcaagctctgcctcctgggttcacgccattctcctgcctcagcctcctgagtagctgggactacaggcgcctgccaccaggcccagctaatttttaaatttttttttaatagagacagggtttcaccatgttagccaggatggtctcgatctcctgacctcaagtcatccgcccgccttggcctcccaaattgctgggattaaaggcgtgagccaccgcgcccggccaattaacatccatttttacatagcatttcaattttttagaactaagttatgtgttcacacacaaatttttataaataaatatttattttctaacacccaggcctgccgtggtacagaactggactgtggcattgagacagacagtggtgttgatgatgacatggcgtgtcataaaataccagtggaggccgacttcttgtatgcatactccacagcacctggtgagaacgttacacataatgaatgttacatgtggattttaaatgaattaactgtgactgatcatagaattatacaatgaaaagtgtgtttcagagactgtcaagattttgatatccctaaagatatcaaaacttgtctatattttagggaaccttcatcaaagagaagtctcaaaaagttgtctttagccaaaagtttggctagaaaatatgcatatatagccaggcacagtgactcacgcctgtaatcctagcgctttgggaggccgaggcaggtggatcacttgaggtcaggagttcaaaaccagcctggccaacctcatctctactaaaaatacagaaaaattagctgggcatggtggcacacgcctgtaatcccagctactggggaggctgaggcaggagaatcgcttgaacctgggaagcaaaggttgcagtgagccaagatcgcaccactgcacttcagcctgggcgacagagtgagactccgtctcaaaggaaaaaaagaaaagaaaatatgcatatgtagagtagactagcacgatgtcattcattggactttatcaggtagatctccgctactaatatcaggtagaatattacgtggcaacagaggccaagtcagagcttcccctgcatcttagagaagaagagaggtacgtttctcaggagttatttgaaaggtagtaaataaaaaagataaacatgactagtatacaagaggatagatgtggagtgggagaaaagaaggtaaaaaacgatacatgaatgtgccgttaacctccacgtttttactgttctgctgcacacgtcatcatctaaataaacatttgtggattataccaccatttactcacacagctaagggtgtcggagagtttggaaactttaggtaaatgtattcttaagcagtgttgcattttaaaatatgctcaatatggtttatcttatcctctaggcatctttccaagcaaagtacctctaagttaaaagcaatgggtctaatagttaacctagaaaaaaaagtatgataaatatactattttccctttttggaccaatacttggtagtgtgtttattatactttattcagatgctctgtagacaagtaggacactcaaagcaatttgtttcttggctaagtcagtattaaaataaggtgaaatctgattggaacactgtgctacttacaatgatcctttttatacatctttacttttgcatcttaccttctgcgtgtttgctcttcttgcctattgaaaggggagtccagaaagtaaaactttcaataattcagtgttcgtgaagctggtccccggccagctttgctgaaagcagggggtgtacgcatagcacacattcgtccttcagcatcatttcttctgaaaccaaaggtgtctttttttttttatttgtatgactaataagacttatgtaagtttatgcttatttttgcctttatgactacataataatttatagaatcaactaaaatcagctatccatggtattttgcttgtattttgccttttaggttattattcttggcgaaattcaaaggatggctcctggttcatccagtcgctttgtgccatgctgaaacagtatgccgacaagcttgaatttatgcacattcttacccgggttaaccgaaaggtggcaacagaatttgagtccttttcctttgacgctacttttcatgcaaagaaacagattccatgtattgtttccatgctcacaaaagaactctatttttatcactaaagaaatggttggttggtggttttttttagtttgtatgccaagtgagaagatggtatatttggtactgtatttccctctcattttgacctactctcatgctgcagagggtactttaagacatactccttccatcaaatagaaccactatgaagctacctcaaacttccagtcaggtagttgcaattgaattaaattaggaataaataaaaatggatactggtgcagtcattatgagaggcaatgattgttaatttacagctttcatgattagcaagttacagtgatgctgtgctatgaattttcaagtaattgtgaaaaagttaaacattgaagtaatgaatttttatgatattccccccacttaagactgtgtattctagttttgtcaaactgtagaaatgatgatgtggaagaacttaggcatctgtgggcatggtcaaaggctcaaacctttattttagaattgatatacacggatgacttaactgcatttttagaccatttatctgggattatggttttgtgatgtttgtcctgaacacttttgttgtaaaaaaataataataatgtttaatattgagaaagaaactaatattttatgtgagagaaagtgtgagcaaactaacttgacttttaaggctaaaacttaacattcatagaggggtggagttttaactgtaaggtgctacaatgcccctggatctaccagcataaatatcttctgatttgtccctatgcatatcagttgagcttcatataccagcaatatatctgaagagctattatataaaaaccccaaactgttgattattagccaggtaatgtgaataaattctataggaacatatgaaaatacaacttaaataataaacagtggaatataaggaaagcaataaatgaatgggctgagctgcctgtaacttgagagtagatggtttgagcctgagcagagacatgactcagcctgttccatgaaggcagagccatggaccacgcaggaagggcctacagcccatttctccatacgcactggtatgtgtggatgatgctgccagggcgccatcgccaagtaagaaagtgaagcaaatcagaaacttgtgaagtggaaatgttctaaaggtggtgaggcaataaaaatcatagtactctttgtagcaaaattcttaagtatgttattttctgttgaagtttacaatcaaaggaaaatagtaatgttttatactgtttactgaaagaaaaagacctatgagcacataggactctagacggcatccagccggaggccagagctgagccctcagcccgggaggcaggctccaggcctcagcaggtgcggagccgtcactgcaccaagtctcactggctgtcagtatgacatttcacgggagatttcttgttgctcaaaaaatgagctcgcatttgtcaatgacagtttcttttttcttactagacctgtaacttttgtaaatacacatagcatgtaatggtatcttaaagtgtgtttctatgtgacaattttgtacaaatttgttattttccatttttatttcaaaatatacattcaaacttaaaatta

SEQ ID NO: 5 - DNA, 29375 bp, Homo sapiens
aggttcaagtggagctctcctaaccgacgcgcgtctgtggagaagcggcttggtcgggggtggtctcgtggggtcctgcctgtttagtcgctttcagggttcttgagccccttcacgaccgtcaccatggaagtgtcaccattgcaggtacggctcgcgggggggactggcggtggagcctccgcgcggcccgggcatctctctggccgcccgtgacgggtgaagctctggggctgcggtcaggccggcgaccggcttgggagcccatattctccattcccggttccggggtgatcgtggagaggcggaagccccttctggtgctagtagtgaagtatgacccggcttccagggtgtcgtgcgttgttgccctgtttctaggggcaggagtccgttggtcccgtagtggatccatgttacagcggcccgggtgcgacgttattgagtcgcgcgtacagatgctttcccctcctgcccgctgcttgaaaacggtcttgaatgtccccgatcttggaaagggcagagcctagcacagtgtttctctggagcagctggccagcttacaaaagcgcccccttcctgagttcacaacgctcaggtggccaagggattgaacggatagccgcccaaactgctgctgccgaactagaattatttacggtgtcgtgtgctcgggacaccgtaaataatttataataataggcactcggtaaataatgtatgcaggaactgaaagaagtgggtgtattttattgatgacatctaccatgttgctcaagaaaagaggtttccagacagacccacttggtgagataatatgtgtctgtttaacctgacacctggggacctggccgcagcgaatttaaattgtcctatttgtacaaaactggcaactccaccactgcctactaacagattgcaatgcatgttgacatctcactatggtaggcattttgttcctagtttagggtaaacttatgattaaaaattcccttctttctctctttttttttaattgctagcctgtaaatgaaaatatgcaagtcaacaaaataaagaaaaatgaagatgctaagaaaagactgtctgttgaaagaatctatcaaaagaaaacacaattggaacatattttgctccgcccagacacctacattggttctgtggaattagtgacccaggtaaaatcaagctcatcaaaggcagttaacctagtagttgaaatggatactcttctttctgtacctttcatgtactgagtgtgacctttctgtatctctcatgtactgagtgtcactggaactggcctaaatatggtaatacttaatatgaacactttatggtaatcatgataacagaacaatgaatatagaataaaaataacagtatttctttgccttatttctagcaaatgtgggtttacgatgaagatgttggcattaactatagggaagtcacttttgttcctggtttgtacaaaatctttgatgagattctaggtgagtaaatcctttaatataaagatctggtcaaatctttcataagaagtatcattccaaataaaaatttaaaaaagataaaagtaaaaacaaaaagtatcatttctaccaaacctgctgtagccagggctcctgtcatttcaatcagttgataaaggtgagctggtttcctggagcccaggaggttgagcttctcgtagaaacagtactatggacaaaaattgctaaattaacaccttgttaatgccactcctgtgctgtttgggaacttttttttctatatcttacttagagttacagaatgtttcttaaaacactaatttcttacaaatgtatattttattttctttcagttaatgctgcggacaacaaacaaagggacccaaaaatgtcttgtattagagtcacaattgatccgtacgtcttttgcttagtttttgttatgtagctcgttgctattgttagctgcatgtattttgattactggtgaagttggcttttcctaaacagaagttgagaaaagtacacaaaagcagaatgctaaaatgaaaaacctatggatacccaccacctagatccaacagttgccaacgtttttccatattttctccatcttttttttaattagttaatttttttagaggaaggggtcttgctattttgcctgggctggtcttagaactcctggcctgaagcaatcctccagtgttggcattatgggtgtgtgccatggcacgcggcctatttgctctggatcatttcaaaataaattacaggacttatgacacctaatccctaaatatttgagcaagcaccttcagtaattgctttaagtattctggcatctggagttttaactttttctcatgatgctattcaaacagtaaaccagtaggtggtggtagagaataatttgatctgacatttctgcttataaatgcggggtgtcccttagtgggtgatcagggtgcttatttcacttttttgttagtctgattgattatgacaaagtatacctggattttcctaaggactcaatatcatagtctttaaaaaatgttgagctagggccaggcacggtggctcatgcctgtgatcccagcactttgggaggccgatgcgggcggatcacaaggtcaggagatcaagaccatcctggctaacacggtgaaaccctgtctccactaaaaatacaaaaaattagccgggtgtagtggtgggcgcctgtagtcccagctactcgagaggctgaggcaggagaatggcatgaacccgggaggtggagcttgcagtgagccgagattgcaccactgcactccagcctgggtgacacagcaagactctgtctcaaaaaaaaaaaaaaagttgagctaattttaattagttttttttatagataataagtactatgtagaacaagaaccataatgtatatcgagttattaactaaaatatagtaccatccaagaattaacttaaaataactgaaataagttttcagcattttatttgagagcaaggcagtttatgattgatattggttttccttttttttttttttttttttgatggagttttgctcttattgcccagtctggagtgcagtggcatgatctcggctcaccgcaacatccacctcctgggttcaagcaattctcctgcctcagcctccagagtagctgggattacaggcgcacaccaccacacctggctaattttgtattttttttagtagagatggggtttctgcatgttggtcaggctggtctcgaactcctgacctcaagtgatctgcctgccttagcctcccaaagtgctgggattgctgggattacaggcgtgagccactgcgcccagcctgtttttatgtactttgttgagtgggaacgagatgtatagatgatcctcttgaaaggggtataataggcatgatgactcactcctgtaatcccagcactttgggaggccaaggtgggaggatcagttgagcccaggagtagtttgagaccagcctgggccatatagtgagaccctcatctctacaaaaaatttaaaaattagccaggtgtggtgatggacacctgtagtcccagctattcaggaggctgaagtgggaggattgcttgagcccaggaggtcaagactgcagtaagctgtgatcctgccattacactgcagcctgggtgacagagcgagatgctgtctcaaaaaaggagtgggagtggtgtataataatgtttccagattgtccttttctttccattgggcataaatcatttccctctgtttatcctaacattttaaaattttgtattttttcaacattatcagtgtctattcaggtgttggaaaaggtttttttttcctcttgactcctatttcaggaatgtcaggaactaagcatggtgggaaatgttcctgctgaatttcagaaggtatatatgaaaagtgccaaaaaaattgagggctgggtatggtggctcacatctataaccccaacactttgagcagttctcctgcttcagcctcccaagtagctggaatcacaggcatgcgctaccatgcctggctaattttttttatttttagtagagacggtttcaacatgttggccagaactcctggcctcaagtgatctgccctcctcagcctcccaaagtgctgggattacaggcacaggccaccgcgcccagcctgaatatacatattttagaaataatagtatttaaatatttttaaatgttaagcattcgtttaatgtgttgtaaaatacaattttcaatctttttttcttagggaaaacaatttaattagtatatggaataatggaaaaggtattcctgttgttgaacacaaagttgaaaagatgtatgtcccagctctcatatttggacagctcctaacttctagtaactatgatgatgatgaaaagaaagtgacaggtagagtattgaggggaaataacatatttgttgctaaaaatatatatatttaaatgactgtctgtggcatgagggttaaagatatggaaataaatctctataattgaatagctctgccagtgattaagaaataaagctgtcaatgagatagtaacaataaaatagtgtttcatatttatttgcccaggtggtcgaaatggctatggagccaaattgtgtaacatattcagtaccaaatttactgtggaaacagccagtagagaatacaagaaaatgttcaaacaggcaagtaaataagtgtcttgtaccttaatgataaatggtagtagtatagccatttataatggcattaatgattggtttaatttaacataatttataagctattgaagtatggaaaattataagcatatatattaggttattaggactcataaatttatgttatttacttccagtttgtgagatgacttgaatttttcatgtttcctattctttacttccatagacatggatggataatatgggaagagctggtgagatggaactcaagcccttcaatggagaagattatacatgtatcacctttcagcctgatttgtctaagtttaaaatgcaaagcctggacaaagatattgttgcactaatggtcagaagagcatatgatattgctggatccaccaaagatgtcaaagtctttcttaatggaaataaactgccagtgagtattttcctggatgttaaggataataagggattttgtaatcattgtcaagtgcaaaattgaattttttcccctcccatatgtttttgtttgtttgtttgtttgtttgtttgagacagagtctcacactgttgcccgggctggagtgcagtggcacgatctcggctcaccgcaacctccacctcccaggttcacgcaattctcctgcctcagcctcccaagtagctgggattacaggtgcctgccaccacacctggctaattttttgtatttttagtagagacaggtttcactatgttggccaggctggtctcgaacaccagacctcatgatccacccgtcttggcctcccaaagtgctgggattacaggcatgagccactgcacctggcccaaccatatgtattttcttaccacttctcacatatgttcttgaaaagagaatggtatgccacattttttaatcagctcattttaaacttaccgaaggaatttctttctcaaagaaacacctaaaataaatatttcatgtcctttttttattttcctttttctttcttttcttgataacctcgctgtgtcacccaggctggagtacagtgatgcaatcacggctcactacagcctggacctcccaggctcaagcgatcatcccacctcagcttctggagtagctggaaatgcaggcagcaccaccatgcccagctaatttttttttttctttttaatagaggtggggatctcactatgttgcccagggtggtcttgaactcctgggctcaagtgatccacccacctcggcctgtgtcctttaatgaccattcccttatgcctatcagtgaacatcattgcattggttttggaaagtcctcatagtctatcattgaacctattttttaataactttcttaatactgttacctttaattcctgtacaggtaaaaggatttcgtagttatgtggacatgtatttgaaggacaagttggatgaaactggtaactccttgaaagtaatacatgaacaagtaaaccacaggtgggaagtgtgtttaactatgagtgaaaaaggctttcagcaaattagctttgtcaacagcattgctacatccaaggtaattttattcttaaattattaatcatgatttatctttacatatatgtgttcttattgtttttaatatataaagtggacttgaatattgggctagcttagtataaaggaggttaaattagtttttaatgtttgattattataattttgaggatactgagttttacagtttggtatttttccttattagggtggcagacatgttgattatgtagctgatcagattgtgactaaacttgttgatgttgtgaagaagaagaacaagggtggtgttgcagtaaaagcacatcaggtatgtgcttttggcagttttctttttctaaagtcaaggaagaagagaaaggctataaataaagcatgagtacatttttagtggcttaatatcaacttctattgcaggtgaaaaatcacatgtggatttttgtaaatgccttaattgaaaacccaacctttgactctcagacaaaagaaaacatgactttacaacccaagagctttggatcaacatgccaattgagtgaaaaatttatcaaagctgtgagtacttagaggaaaataaaaatagaaacacctgactttattttccattgcacttcttagctctgcagaaacaatgattcttctcatagtgagcttctccaagtcttcccaatctgaaaaggaagtaaaaaagggctttactttaactgatttaccaaagacttaatgaccgtctatatttcagtatttcccaattacattttaccattaagcttagatcacttttgaattaatctagctgtttaacaaacaccctcacttaaatgcctaagacttgctttcagtcaacacatccaaaattgaatttgttacctccatactcactgatttgcccatacaagcagccccccactctccaacaaaaaaacaacttcctatcttagtaaaaagccccaaccaacctctaggttgtataaacaagaaagctgggagccttcctttatttcccctcctctctaatccggtcaataagaatcatctcttggatgctgcagtagcttctcaccattatctcttttttggtttactacaataggttcttaaccttcatactggttaagtcctttccttggaatgcttttgagtgacttttgtgttaaaacacccatttttatcttcactctcatttgaaatctttcaatgacttccactcagggaaagtccaaattccataatttggccaacaagaaagatctgctgtaatctaattacacctacttctccaactcatctcagtgccagtttttcgtatattgtcctgttgcttttaaattactgaaaagcacagtgctcttcccctcctcagagtttattcacatgctaatccctctgcatgaaatacatccttttcacctggctactttaggtcttgtcctttcctcaggaaagcctttactttctacccttccccccacctaagttggttccaatataatattgaacataccttattagcaaacttcttgcttatccataacacttataacactgtaacttattttatttctgtctttttttttaggcagagtctcgctctgtcgcccaggctggaatgcagtggcacgatctcggctcactgcaacctccgcctcctaggtttcagtgattctcttgcctcagcctcccgagtagctgagattacaggcatgcatcaccatgcctggctaatttttttgttgttgtattttcagtagagacagggtttcaccatgttggtcaggctggtctcaaactcctgacctcaaatgatccacccatctcggccttccaaagtgttgggattacagccatgagccactgtgcccagtcttttttttttttttttttgagacagagtcttgctgtgttgcccaggctacagtgcagtgacgtaatcctggctcattgcaatctctgcctcccaggttcaagcgattctccttgcctcctgagtagctgggattctccagcctcctgagtagcggggattacagacatgcaccatcacatccagctaatttttgtatttttaatagagatggggttttaccatgttggccaggctggtcttgaactcctggcctcacttgatccaccatcctcggcctcctaaagtgctgtgattacaggcgtaagccactgcacccagctatgtctgtcttctatgttgtgtcttaaacttgatgaggacaagtgtctcaatttgttttatttgtgtctaattttatttatttatttttaatttttttttttggagacagcttctcactgtttcccaggctggagtgccgtggcttgatctcagttcactgcaacccgcgcctcccaggttaaagcaattctcctgcctcagcctcccaagcagctaggattacagccatttcaccaccaccatgcctggctacccttttttttttttttttttttttttttgagacggagtttcacttttgtcacccaggctggagtgcaatggtgcgatcttggctcgctgcaacctctacctcctgggttcaagcgattctcctgcctcagcctcccgagtagctggaattacaggtgcccaccaccacgccagctaatttttgtatttttagtagagccggggtttcgccatgttggccaggccggtctcaaactcctgacctcaggtgttctgcccaccttggcctcctaaagtgctgggattataggcgtgagccaccgtgcctggtctaatttgttttaaccactatatctccaacaagtagctcagtgctagcacaatataattatatagtaaatatttattgaacgaatgaaccaaaaggagcagctccctcagtggtgataacctgacatgggaagatgtgccaccctctatccagaaattattgttctacatctttttaatttttgaatcatttttatttgtattaaggctcatttgtattctagatttctgatagatcccttcttccctaatatgatccctaatatgaatcttctcgttttcaggccattggctgtggtattgtagaaagcatactaaactgggtgaagtttaaggcccaagtccagttaaacaagaagtgttcagctgtaaaacataatagaatcaagggaattcccaaactcgatgatgccaatgatgcaggtatatatttaataatgtttccaaacttttaagtcttatagttgttattttattcattaatggcataccacggatatttatttttcccttgacagaataactatattcaacagaataacttgttaaaaatcggcccgtttcctattatggaagatttaggtcatttccatgttataaataatattgaggtgattattttggagtataaaacaagaatgtttatattatgatctattacctaacaaataattttgctcattatatagtaaattgtgttttatcacaaggctataaacagcatgttcaagttagtatatttgaggttgaactaaatgtgctaatattaatatgtatatttttattttagggggccgaaactccactgagtgtacgcttatcctgactgagggagattcagccaaaactttggctgtttcaggccttggtgtggttgggagagacaaatatggggttttccctcttagaggaaaaatactcaatgttcgagaagcttctcataagcaggtagaatataagacgatcttcagaatctaaatctaatttataatacaagactttatgcttatatttaattccctcattaggcattttaaaatatattttagacaatttgtgcttattttgagaaattaggtacattgtagcctattttaacagacctttctgatgtagtaaattataagctaatagctcaaaatactggagctcaagaaaatccaagcaacatatactgttaaatttctttgttcttttcaaatttataaacgatgctttttttggtatatgtccatttcagatcatggaaaatgctgagattaacaatatcatcaagattgtgggtcttcagtacaagaaaaactatgaagatgaagattcattgaagacgcttcgttatgggaagataatgattatgacagatcaggtcagatttgttattaaatttttagattgttcaactaaattaagcatgtcttaatttaatttcattgttttttgccatgaaaataaattagttaaataggagctttattcatcatctctaatcaacatctaatcagatatgcttatatcatatgtatgttgcaaatacaggttaagtgagtctggatttgaacagaccttttttgattcccatagaaaatttgacaaattgccagtaggtcagtcataatatttttttatttctaaacaattctttgtttgtttgagatggagtttcgcccttgtcgcccaggctggagtgcaatggtgcaatcttggctcactgcaacctccgcctcatgggttcaagcgattctcctgcctcagcctcccgagtagctgggattgcaggcggatgccaccacacccaactaatttttgtatttttagtggagacagggtttcaccatgttggccaggctggtctcgaacgcctgacctcaggcgatccgcctgcctcggcctcccaaagttctgggattacagatgttagctaccacgcccagcctaacagttcttttgaactttggctttcaaatctttctaggaccaagatggttcccacatcaaaggcttgctgattaattttatccatcacaactggccctctcttctgcgacatcgttttctggaggaatttatcactcccattgtaaaggtacgctaatttctaagtaccatcatggatattttaagaccctactcctcaaacctggatatacatataagccccgtcacatgtagtggtatacaggggaccccacagtgtacaaagccacagtcattgttttttatcacaggtatctaaaaacaagcaagaaatggcattttacagccttcctgaatttgaagagtggaagagttctactccaaatcataaaaaatggaaagtcaaatattacaaaggtttgtaatgaaacccatatagaacttctcattttattatacaccctgtacaagactatatgaaggaacttggtatttttggttttataggtttgggcaccagcacatcaaaggaagctaaagaatactttgcagatatgaaaagacatcgtatccagttcaaatattctggtcctgaagatgatgctgctatcagcctggtaggtttgagttgtattttatatacattctaattttagaaatcactactttagccagttgaaacatttacatttttgtataagactccgtatcaaaaaaaaaagaatgttttatagaatagaatgtttccagtaagcatatcccagagaaggaatcagatattttagaaaattttgatttttggctgggcttggtggctcatgcctataattctaggactttgggaggccaaggcaggtggatcacctgagatcaagagttggagaccaacctgtccaacatggtgaaaccccctctctactaaaaatacgaaaattggccgagcgtagtggctcacgcctgtaatcccagcactttgggaggcagaggcgagcagatcacaaggtcaggagatcaagaccatcctggctaacaaggtgaaaccccatctctgctaaaaatacaaaaaattagccggccgtggtggcacgcagctatagtcccagctacttgggaagctgaggcaggagaatcgcttgaacccgagaggcagaggttgcagtgagccgagatcaggccactgctctccagcctgggcaacagagtgagactccatctcaaaaaaaaaggaaaaaggccaggcgtggtggctcacgcctgtaatgccagtactttggaaggctaagtcgggcagatcacaacgtcatgagatggagaccatcctggctaacacggtgaaaccccgtctctactaaaaataaaaaaaaataaaaaataaaaaattagccgggcttggtgacacgcgcctgtaatcccagctactccggaggctgaggcaggagaatggcgtgaacccaggaggcggagcttgcagtgagctgagatggtgccactgcactccagcctgggcgacagagcgagactctgtctcaaaaaaaaaaaaaaacaaaaaaggtcgggcgcagtggctcacaccagtaatcatagcactttgggaggccgaggcgggtggatcacctgagctcgggagttcaagaccagcctgaccaacatggtgaaaccccatctctactaaaaatacaaaatattagctgggtgtggtggcacgtgcctgtaatcccagctacacgggaggctgaggcaggagaatcacttgaacttgggaagtggaggttgtgggagccgaaatcgtgccatcacattccacaagagtgaaactccatttcaaaaaaaaaaaaatacaaaaattagctgggcgtggtggcgggcgcctttaatcccaggggctcaggaggctgaggcaggagaatcgcttgaacctaggacgcagaggttgcagtgagccaagatgacaccattgcactccaggctgggcaagagaacagtaactcccgtctcaaaaaaaaaaaaaaaggaaaacagtatttttgtttttctgttgttcgttctttgtagaaggatattttggaacctattagcctattagtaccagtgacatcttttcatcctttaatttataggcctttagcaaaaaacagatagatgatcgaaaggaatggttaactaatttcatggaggatagaagacaacgaaagttacttgggcttcctgaggtaaaagttttaaatatatgccacaaaatggattgttagactgaccttttggtattgatactatagcaaattaaacttactgaatagttattttagtaaaaaatttgatatgatagagttgtgcagcagttaaatttgctttatctttaaaacatataaaatatttctgtattattcaatattttttaaagacttaagaattacagaaataattcttagttctgaaaggtttctgtttgatttttgtgttgagcattgtttagaccggtagactcatgtaatactatttggtccttcaggattacttgtatggacaaactaccacatatctgacatataatgacttcatcaacaaggaacttatcttgttctcaaattctgataacgagagatctatcccttctatggtggatggtgagttccaatttgttagtctgttttcattgtaagatggaaatcaaattccaaaattggttaaattgaggatacttacgtttgctcttatttcattttaaaggtttgaaaccaggtcagagaaaggttttgtttacttgcttcaaacggaatgacaagcgagaagtaaaggttgcccaattagctggatcagtggctgaaatgtcttcttatcatcatggtgaggtaaacacacaatccatgtttccagaaagcattatatcagaaatccctgcagagtcattctcaaaacagatttggtgaaagtataagctcatatattcatagtaaagaacaagttggtaaaacctgtgaaagaataaaactgcttgccctttgatttctgaaagtaatattcctgcagggatattcataagtctgcaaaggtctacattaaaaaatgcttagtatgtttattataactttgtgatgtcaaaatttagacctccactgatttgaaaattgttataataaattgtgacacatgtatgcatggaatcagtgctgtaacttcagtaaaactgtgtgcactgacactgaggaatatccagggtctattctcaggtgaggaaaaaaagagacagaacaataactaaaaatgtctacaaggatatgttccaaattgttcactttagttacccctgagaactggaaagggcaactttcactttttatatgtgtctgaattgtttgactttacaccaatgttttgtgattactttttgcattaattatgtaaaacagttttaaagaactagattgcctacaggtttctagaattttaaatataatggttgtcttgttgctttcaatcaaaatatagtagggatacaataaattttcacccaacgaacatttgttgaatgcctaccatgtaccaggtatacaaaaataaataaaaatatgttccttatccccaagatataataacaatttagccagagggccaatacacacacagctatagaataaagtgatacatgctagaatagaaatgaacacagcattgtaacacaaaggaggaaatatttcattttgctgaggataaggagaagaactatgccttcaaagttgagtgggatttaatagaaattgttggacggcagccctaaacttggagccagaagttgtaggttcaagtactatttctgccatctattaatctgaggaaagtcactaaacaactagacctcacaaaatgttacaggattatagtgaggttaagtcataatgtatttgtattagtaaaagcctcagcttaatgaatctttttttccccacagatgtcactaatgatgaccattatcaatttggctcagaattttgtgggtagcaataatctaaacctcttgcagcccattggtcagtttggtaccaggctacatggtggcaaggattctgctagtccacgatacatctttacaatgctcaggtaggtatgctttcactttctagtgacttgccatttccagttttgaaacaatgtgagatttagttcaccaaaaatacaaaaactcagttaatcagaagatactggcatctagtggcagaggccaggggtgaggcttatacaggaaagcccccccataacaattatccagtgcaacatgtcaattatgctaaggttgagaaatcctgatgtagagcttgggactgagtaaaggagactttgattcttcctaaatatcacaattgaaattttactcctttacaagcctatggaaagtatattatgaatggtcaattttcagctgtcatcccagtcaccctttcagtggcattcaaacagttactaattgctccatccttcttgaaactctttatttggcctctatgactgtagactcttctggttctcttctaccttattagctttctctgctgggtccttctcaccttcccaacctctaaatactggcccattccagggctccttcatcagatctctttccaatgcctacactcaattcccaaatgatctcccattcatccgttctatacctttaaatctccagtcttggtctctcccctgaactcccaacttttatgtctgactgccctcttaacatttcccacttggatatctagttaagtatctcaaacataagtctaaaaccaaatccttagttttcctgtctcagtaaatggaatgccatgccatccttctaattgctcaggctaaaaaccttgtcacccttgactcctttgcttgatacttaacatccagttcctcagccaatcctataggatctgcattggaaaaatactaagccacccccatctcatctaaactattgtaacatatcatcttttcttaaagcagccaattattttttaaaaaataagtcactctgattcagaaccttcaactgctcagagtaaaatctaaagacctattttagctaaccagacattatgtgatccgtgtccccaccttccatgtcttttgattccttctcataccatctcctctccagccacactgtccttggcctatactcaaatataccgagcacatttcctcttcagggccttttacttactggttcctttgcctgcaacactctttctctagatatccacatggttcagtccctcagtttgttttttgttgtttttttttcttttgagatggagttttgctctttttgcccaggctggagtgcagtggcgcaatttcggctcattgcaacctctgcctcctgggttcaagtgattctcctgcctcagcctcccgtgttgctgggattacaggtacacgccaccatgctcagctaattttatatttttagtagagatgaggtttcaccatgttggccaggttggtcttgaactcctgacctcaggtgatctgcctccctcagcctcccaaagtgctgggattacaggcgcgagttactgcacctggcgccctcagtgtcttttctctgctcaaatgttttcctatcagaaacggcttaactttccttagcacctcttcagtcactttcccactttttcttctcttgtttatcccaccacctaacaaaatatgtgttaattgcaaacttctactggactgtgagctccttgaggattgagactttatgtccatgtgcgtgacacatagcaagtgctcaataaatattgttaaatgtatattagtcagcaagtaaaaccaagataattttcatgtataatacatgtcctttccataaaagttaagtgtgaaattcagtatttttgtaaaataacattctttgtttcttttctttagctctttggctcgattgttatttccaccaaaagatgatcacacgttgaagtttttatatgatgacaaccagcgtgttgagcctgaatggtacattcctattattcccatggtgctgataaatggtgctgaaggaatcggtactgggtggtcctgcaaaatccccaactttgatgtgcgtgaaattgtaaataacatcaggcgtttgatggatggagaagaacctttgccaatggtaagtattctgtgtgtgttaagagccttaacttttccttgggtttcagttgaatagattgtatgattaaagatgatgcaaacataaaatttaatttcatactttagatttattgttaaacgctgttgtgatttccgtctagtatcacatttagaaaacatactgtttttttaaatgccaatttagcttccaagttacaagaacttcaagggtactattgaagaactggctccaaatcaatatgtgattagtggtgaagtagctattcttaattctacaaccattgaaatctcagagcttcccgtcagaacatggacccaggtaaataattatggatttcttttttaggtttgtgatcaaaagaaataccttttgtactattgctgttgactattcagaagcctatattttagaaacttcaggattatttctttctttagacatacaaagaacaagttctagaacccatgttgaatggcaccgagaagacacctcctctcataacagactatagggaataccatacagataccactgtgaaatttgttgtgaagatgactgaagaaaaactggcagaggcagagagagttggactacacaaagtcttcaaactccaaactagtctcacatgcaactctatggtatgtatttgttttgtgagatgtacacgtttcaatttatattaaagattaatatcaattttaaaagtatatcttagtctacctttataaagtttagccaatttgtctattcttggctctaatcttgttttcctttttcaggtgctttttgaccacgtaggctgtttaaagaaatatgacacggtgttggatattctaagagacttttttgaactcagacttaaatattatggattaagaaaagaatggctcctaggaatgcttggtgctgaatctgctaaactgaataatcaggctcgctttatcttagagaaaatagatggcaaaataatcattggtatgttttgggaataataactgcttactaaaactctagttacgccaaactttctttaaacatttttggtgagagtaatggtggagaaagaggcaaaatccatttaattcacctggtcacttatacacgcatttctttaaaatatctgattaggtatttatagtttgaaagagatgatgtttccttgactgagcatcttgagaaatcaagatttagttgacaattagacatgaggagaatagagagctagaagaccttgcataaactgattgaccaagagaatagatacactaatcatgtctacaggaacagaaaataaaagagacagagaagagataataaatctgatggtaaaaaaaaaaaaaggcaggaagattacgaatggcttctactctctgggtgtggtggcgcatgcctgtaatctcagcacttgagctggggaggtcaaggctgcagtgagcctaggtagtgccactgcactccagcctggacacaagagtgagagagaccctgtctccaaaaaaaaatgatttgatcatatatgatttgactgcccccttgtggtaatttacatttgtcaatggtttagggagacttgcctgtataccgggatatacaaatttatgcaagcacgaagacagtttaatttccagttttaaacttttgacttgtgtaaaaccttatccccttcctaaaatattactcaaaatcattatctctgtttacttttttaaaaatagaaaataagcctaagaaagaattaattaaagttctgattcagaggggatatgattcggatcctgtgaaggcctggaaagaagcccagcaaaaggtaatcttgggtggcacttttctatattgttaaagactatgtattgtacaatgtttatgtttcacattttctaataaagctagattttaattaatcctttaggttccagatgaagaagaaaatgaagagagtgacaacgaaaaggaaactgaaaagagtgactccgtaacagattctggaccaaccttcaactatcttcttgatatgcccctttggtatttaaccaaggaaaagaaagatgaactctgcaggctaagaaatgaaaaagtgagttgatagtaggatggtacatgctgcttagttttgttctattctaatggtaaaagtaaaattgtgtgttgcatgaaaatgctgcttgtatacatatattaactcaattttgtaattatcttatgaaggaacaagagctggacacattaaaaagaaagagtccatcagatttgtggaaagaagacttggctacatttattgaagaattggaggtatgtagtttataatgcccatgttagaatttttattaatgaaataatatattccagcagtatacctttgtcaagatagttcacaattggcaataaaaagaaaataagaggcataaggataaattccaaatagcgtataaaagaacagattattggccaggtgcagtggctcacgctggtaatcccagcattttggaaggctgagttgggtggatcacttgaggtcaggggttcaagaccagcctggccaacatggtaaaaccccatttctactaaaaacacaaaaattagccaggcatgatggtgcataccagttactcaggaggctgaggcaggagaattgcttgaaccgagaggcagaggttgcagtgaaccgagatcacaccactgcactccagcctaggcaacacagcaagactccgtctcaaaaaaaaaaaaaaaaaaaaagggacagattattaaatactacttagaatacaaggccgggtgcggtggctcacacctacaatcccagcactttgggaggccgaagcaggcagatcacctgaggttgggagttcgagaccagcctgaccaacatggagaaaccctgtctctactaaaattgcaaaattagccaggcgtagtggcacatgcctgtaatcccagctacttgggaggctgaggcaggagaatcacttgaactcgggaggcagatgttgctgtgagctaagatcacaccattgcactccagcctgggcaacaagagtggaactccgtctcaaaaaaaaaaaaaaaaatactatttagaatacagtaaatgataccaggagactgcccagacattcagacatttctggacaaaaaaagaaaagagcaggagttgatttttgataaagggaagaacatattaggactgagaagataaaaagagcctaaatgtggaagaagaccaccaacccagtcccccaagtcaacttaaaaggacaaagccacagggcatggtggctcatgcctgtaatcccagcactctgggaggctgaggtgggcagatcacttgaggtcaggagttcgagaccagcctggacaacatggtgaaaccctgtctctactaaaaatacaaaaattagttgggtgtggtggcatccgcctgtaatcccagctactcaggaggttgaggcaagaaaattgcttgaacccagaaggcagaagttgcagtgagccgagattgcgccactgtactccagcctgggtgacagagcaagactccatctaaaaaaaaaaaaaaaaaaaggagaaagcagggctatccagatggtttcagaaggttatttgttacttaaatcttcctaataacatttgtttctcaacattattttaacataagaaaaaaggccagcactgtggctcacacctgtaatcccaatgtgctttgggaggctgaggcaggaggatcacttgagattaggagttcaaaaccagcttgggtaacgtagcaagacctcatctctacaaaatgttttttttaaatagccaggcatggtggtgtgggcctatagtctcagctactccggaggccaaggtgggaggatcacttgagaccaggagttcaaggctgcagtgaactatgatcatgtaccattgtactcagcctgcgtgtctcttaaaaaaaaaaaaacaaaaaaaaaaccaccaaaagctttatttcttaaatttaacatgcaaatttgtattactgcacttcagtatagatgcctagctcattgtaatcagttggttggataagtgtgcatcacttcctttcatattttgtatgtgagtttacaaatatatatgtatatacatgttttatttttagtttctcccttgttttcctcaaaaaggttaagtggtagaatcaggaataaaacccagtccttctgtctccacaccttccttttcaaggtgtgttttaattacatcttcactattgttgatagtatactaggttatggagcaatttatcactagtttttaagatgtaacaaaatgaaatcagtttaactgttgggtgtttagatattgtaatgtttttgttaacatttaaacttgctttcttatatcccttctgtaggctgttgaagccaaggaaaaacaagatgaacaagtcggacttcctgggaaaggggggaaggccaaggggaaaaaaacacaaatggctgaagttttgccttctccgcgtggtcaaagagtcattccacgaataaccatagaaatgaaagcagaggcagaaaagaaaaataaaaagaaaattaaggtaatactcttgtggtggctcacacctataatcccagcactttgggggccaaggtgggtggatcacttgaggtcagtggttcaagaccagcctcccaacatggttgaaaccctgtctctactaaaaattaaaaaaattaggcgggcatggtggcaggcgcctgtaatcccagctactcgggagactgaggcagaagaatcgcttgaacccgggaggcagaggttgcagtgagccaaggtcacaccactgcactccagcctggccaacagagcaaaactccatctcaaaaaaaaaaaagaggtaatactcttaaaaatattatgcataaaatattgatgcatatgtccacttaaaattgaaaaaaaaatgtataaaatttttttgttgttgttgttgagatggagtctcgctgtgttacccaggctggagtgcaatggcaggatctcagctcacagcaacctccgcctcccgtattcaagcgattctcgtgcctcagcctcccaagtagttgggggcacatcaccacacccagctaatttttgtatttttagtagagatggggtttcaccatcttggccaggctggtctcgaactcctgacctcaagagatctgcccaccacggcctcccaaagtgctgggattacaggcgtgagccaccgctcccagccaaaaatgtataaaatctctaatcccatagttcagaatttattctatatccaaccctaactttgctatcttttagaatgaaaatactgaaggaagccctcaagaagatggtgtggaactagaaggcctaaaacaaagattagaaaagaaacagaaaagagaaccaggtattacaacatttttagaaaaatggtataaagtgaagattaaattgtgtttgttacctagtacattccacatagatgttcaaaacctttttgttgaattgagaaacgtgaaagaggactgtatctcaattctacttggacctctttttttttttttttttttttttgagacagtttcactcttgttgcccaggctggagtgcaatagcacaatctcggctcactgcaatcttcacctcctgggttcaagcgattctcctgcctcagcttcctgagtagctgggattataggtgcatgccaccacgcctggctgctttttgtatttttagtagagacggggtttcaccatgttagtcaggctggtctcaaactcctgaccttgtgatttgcccgccttggcctcccaaagtgctgggattacaggcgtgagccactgcccctggcctggacctctttaatatcgtccttgggatttgattcattatagaaaatattttgtaatgaagtagtttgttaatttgaattccttaattgggatctaagaaaatacccagtttattagatttcattttctagccacttacgaggttctagtatacaaagtttcttaagaaaagtgactacatattagtaatgtttgtagtatctctagagttcaacatcatgcttcggatataaataatgtccactcaatgaactaaatagaattaataattctgttaatcatttgataatgcctttactgtctactttttttgaaacatctttattgagatattcacatgccaaatttgcccatttaacgtataccatttggctgggcgccatggcttatgcctgtaatcccagcactttgggaggctgaggctggcggatcacttgaggtcaggagttcaagaccaccctggccaacatggtgaaaccccatctctactaaaaatacaaaaattagttgagtgtggtggtgcgtgcctgtagtcccagctactcgagaggctgaggcacgagtgtcgcttgaacccaggaggcagaggttgcagagagccaagactgtgccattgcactccagcctgggtgacagagcaagactccaactcaaaaataaaaataaagtatgccattcagtggttttagtatagacaaacagttttaatacaatttattgccccccaagaaaactgaactcattaacaatcatttgccatttgccaccaactcctctccactgggtgaccactaaaaaatctaggggcatttcctataaattaaatcatataatatgtggtcttttggagctgacttctttacttaacacattttcaagggtaacccatgtggcagcccatatattagtacttcattctttttttttttttttttttgaggcagagtttcgctctgtcgcccaggctggcatgcagtatgcagtagtagtgagatctcggctcactgcaacctccgcctgctaggttcaggcaattctcctgcctcagcctcccgaggagctgggattacaggcacgcaccaccatgcccaaataatttttgtatttttagtagaaacagggtttcaccatgttggccaggatggtctcaaactcctgacctcaagcgatctgcccacctcggcctcccattttgctaagcccgtgaaggtaaacctctgtgttttcttctaagcattttatagttttagctcttacatttaggtctgtgatccactttgaattagtttttgtatatggtgtaaggaaggtgtccaacctgattctttgcaggtagatatccaattatttcagtatcatatgttaaaaagacttctttctacaatgtttgtcttcacccttgtcaaaaatcaattgactataaatgttaaggtttatgtatggagtctcaattctgttccactgattgagctatatatgtccttgagtatctactttttttgagacagggtttcactcttgcccaggctggtcttgaaatcctggctcaagcaatccttctatctcagcctcccaagtagctgggactataggcactcgccaccatgactagctaatttctaaaagttttttgtattttgtagagacagtccttttttctttttttttctttttttgagacaagatttcactctgtctcccaggctggagtacagtggcatgatcacagcccactgcagcctcgacctcccaggctcaaacaatcctcctgcctctgcctccgcctccctagtggctggaaccacaggcgcactccaccatgcccattaatttctgtattttttgtagagatggggttttgccatgttgaccaggctggtctttagctcctgagctcaagcgatccgcctacctcaccctcccaaagtgctgagattacaggtgtgagccaccgcacccagccaagacagggtcttatatcttaccccagctgatctcaaacccctgggctcaagtaatcctcccgccccagcctccctaagtgctgggattacaggcatgagccactgtgcccggccacatttatttatgagattaagtgaccaagctatatgcaccacaaaaacagagaccatatctgtctcttttcacgattgtattctcagaactatcacaggagttaataaatttgaaggatggatggatgatagatggagaaaagtgggtctaatatataaaggtgattaatttctatctcccctctaggtacaaagacaaagaaacaaactacattggcatttaagccaatcaaaaaaggaaagaagagaaatccctggtctgattcagaatcagataggagcagtgacgaaagtaattttgatgtccctccacgagaaacagagccacggagagcagcaagtaaggaaaactaaagaacattatagataaactgtaagagtggaatggccaatatacttcagggtactttgccccagaaattactgtgtcttaatagagcagtaaattatgttaaagctttgaaacactgaagcatctttcaggagatttaaaaactaaaatattcatgaaatgttatgtcaacctatgaattgtttctcctactaccctctttgatttttttgtatatggtttttttactagcaaaaacaaaattcacaatggatttggattcagatgaagatttctcagattttgatgaaaaaactgatgatgaagattttgtcccatcagatgctagtccacctaagaccaaaacttccccaaagcaagtatcttatctaatatgggttttgtcatgattgtttctaatatattgttttttgcttgacacatttagaattggttgtcaggatttttttttttaattctagacttagtaacaaagaactgaaaccacagaaaagtgtcgtgtcaggtatgtatttaagtaaaagtagtgagacatctgccttactgggacactcagatccaactgggttctaatcctggctacattatccaagtacttcctttggaaataaatttgagttcttattaacattatgttgatactgttcactgggtttagtttcacatgtaaataggtactgcattcagtatactaaaagtaatcatagtgcttgccaggtactttgctaggtgctagagatacaaaaaataaaaactgttcttgctgataaaaaattcagaaattagaacaaagttttaagagtatgttttaaatattccagaaaagtcacatatttggtgtttaaataggaattcataccagggacaaagcagaaaatggattttcatgtgttgcttaaatgtactattttcctttccatttgaaataatagaccttgaagctgatgatgttaagggcagtgtaccactgtcttcaagccctcctgctacacatttcccagatgaaactgaaattacaaacccagttcctaaaaagaatgtgacagtgaagaagacagcagcaaaaagtaagcctaaatctttgagatgggttaatgttgcaattacctaactggtttccacgtgtctatttcaatttttttattgccaaaacttactattgatattacagattaaatgttttccaattggaagcaatttcttttcgatctttataatcaaaattagtagtcaaggctgttccaaaacagtaagttatctctattgattgttcagttacagatcaaactccttgttctactcttttccctccttctcactactgcacttgactagtcaaaaaacaaaacaaaagccaggcagagtggctcatgcctgtaatcccagcactttgggaggctaaaacaagaggattgcttgaggccaggagttcaaggctgcagtgagctatatgatcaagccactgcactccagcctgagtgagagagcaagaccctgtctccaaaaataaggtagtccaaatgtttaaaatcagtgagtttctctcagtaccaggcttcatctagttcatttctgtgacaaggataggatttataagcaattgcaatgtttaacgtaaaacgtattcttgaaattgaattaagtttaaggctgggtgcagtggctcatgcctgtaatcccagcactttgggaggccaaggtgggtggatcacctgaggtcaggagttcgagactagcctggccaacatagtgaaacctcatctctactaaaaacacaaaattagccaggtgtggtggcacatgcctgtagtcagctactcgggaggctgaaacaggagaatcacttgaacccaggaggcagaggctacagtgagccgagatcgtgccactgcactccagcctgggcgagatagagcaagatgctgtctcaaaaaaaaaaaaaaaaaaatagaatgtttaagaatactttgattctctgttttcacctctcttagattgtcttttcctatgttaaatatacagtcatcacattgctgaagaaagttcgcaatgagaacaattcatctaagagtggctgtgactaggtcaggcgcggttgctcatgcctgtaatcccagcactttgggaggccgaggcgagtggatcacctgaggtcaggagtttgagaccagcttgaccaacatggtggaatcccatctctactaaaaatacaaaaaattagccgggtgtggtggcacacgcctgtaatcccagctactcaggaggctgaggcaggagaatcgcttgaacccaggaggcagaggttgcagtgagccgagataacaccactgcactccagcctggacgatagagtgagaccccatctcaaaaaaagagcagctgtgacaaatgcctgtattgaattgcaggtcagtcttccacctccactaccggtgccaaaaaaagggctgccccaaaaggaactaaaagggatccagctttgaattctggtgtctctcaaaagcctgatcctgccaaaaccaagaatcgccgcaaaaggaagccatccacttctgatgattctgactctaattttgagaaaattgtttcgaaagcagtcacaagcaaggtgagtgttgatcctagtcagtccttttgctgtagatgttctgaaacacgtaactaagccattgctcttaaaaatttggcatatctttaagaaaattaactctcatattctgttagcttttactgtacatatttagttttaacaaagttaaatatgccacttatttgggcaatggaagagttggccttagatctgcttcttattacttggtagaaaatagaaaactccttgaatatagtgtcttgatacatttttttacattacaattatgttgtcagatttacaatgtgcaagttacctgggcttttctcttttagaaatccaagggggagagtgatgacttccatatggactttgactcagctgtggctcctcgggcaaaatctgtacgggcaaagaaacctataaagtacctggaagagtcagatgaagatgatctgttttaaaatgtgaggcgattattttaagtaattatcttaccaagcccaagactggttttaaagttacctgaagctcttaacttcctcccctctgaatttagtttggggaaggtgtttttagtacaagacatcaaagtgaagtaaagcccaagtgttctttagctttttataatactgtctaaatagtgaccatctcatgggcattgttttcttctctgctttgtctgtgttttgagtctgctttcttttgtctttaaaacctgatttttaagttcttctgaactgtagaaatagctatctgatcacttcagcgtaaagcagtgtgtttattaaccatccactaagctaaaactagagcagtttgatttaaaagtgtcactcttcctccttttctactttcagtagatatgagatagagcataattatctgttttatcttagttttatacataatttaccatcagatagaactttatggttctagtacagatactctactacactcagcctcttatgtgccaagtttttctttaagcaatgagaaattgctcatgttcttcatcttctcaaatcatcagaggccgaagaaaaacactttggctgtgtctataacttgacacagtcaatagaatgaagaaaattagagtagttatgtgattatttcagctcttgacctgtcccctctggctgcctctgagtctgaatctcccaaagagagaaaccaatttctaagaggactggattgcagaagactcggggacaacatttgatccaagatcttaaatgttatattgataaccatgctcagcaatgagctattagattcattttgggaaatctccataatttcaatttgtaaactttgttaagacctgtctacattgttatatgtgtgtgacttgagtaatgttatcaacgtttttgtaaatatttactatgtttttctattagctaaattccaacaattttgtactttaataaa

SEQ ID NO: 6 - DNA, 104775 bp, Homo sapiens
cgaaaagattcttaggaacgccgtaccagccgcgtctctcaggacagcaggcccctgtccttctgtcgggcgccgctcagccgtgccctccgcccctcaggtcagttctcccgcctgcccgccgcagtcgcagttgatggctggggtctgggctgtgcggggcgcagcggcccaaacccagtttgctcctggctctcgggagactggaggatttcatcggagccccgcgctttaccagccctgttccctggataagatatttgacctttccgacccgcggttttcttctccgtaagtggggataatgaccgtgtctacttaacagggttattgaagaggtgttcaggctaagcgtttgccacctaggaggctgcgatagacgtgaattcccatttcccgtttccagtttccgtgactcttccccgcgaaaaaagttgacagaagggtttcgagttttttctgtttgtacaactcagtttactggggcagtgcaataaaaaaggagatgtgttatcactaccttttcagagtccaaatccatcctctcctatcatctccccagagtagtggcttcagaggctcacactaaaaggggaattttttttctttttcttcaagacggagtttcgctcttgttgcccaggctggagtgcaatggcgcgatctcggctcaccgcaacctccgcctcccaagttcaagcgattcttctgcctcagcctcccgagtagctgagcttacagacatccgccaccacgcccggctcattttttgtatttttagtagagacggggtttcaccacgttggccaggctggtctccagctcgtgtcctcaggtgatccgcccgccttggcctcccagagtgctgggattacaggcgtgagccaccacgcccggcctaaaaggggaattttcaccgaatgctgtatcagtaataggagcagcaggattgctcccaccaagaaacctggtgtagggttgtgggagctggaaagggtagactcagggaaggctgcccaagagaggaatcaggtccctagcacttaggacgggtaattacctttggtatttctcctttgttagtggaatgaggtgagtatcaggagcctggattgttgtttagaggccagtgttcctaactttggtttaaattttggtttctgtttcccatggagtctggctagaaaatcagaaaaatcagaaaagcccttactgggccttcgtgggcttgtttctcccaagggtctgtcctttctgtgtaactactgtggaccaactagatgggcagatcaatcccaatgagtgcctcattgttggtgctcccagaagcctttgcaagggagcagggcaggatgctaattaaatgtgttacaggccacattataaaccattctgagcccggcgtggtggctcacgcttgtaatcccagcacttggggaggccgaggtgggcggatcacttgaggccaggagttctagaccagcctggccaacatggcgaaaccccgtctctactaaaaatacaaaaaaaaaaaaaaaaaaaaaaattaaccgggcatggtggcgcatgcctgtaatcccagcaactggggaggctgaggcacgagcatctctggaacccaggaggcggaggttgcggtgagccgagatctagctactgcactccagcctaggtgacagaacgagaccctgtctcaagcaaataaacagacaaaacccaaaaaaccattctgtattctacttcctgtttgaaattatcctcagcatcagtgtctttccaagctctgtagataaggtaaatgtatttatgcggcaagtaatagaatagcccaaataatattgttaaaaaatgcccccaatttgttgctatcctttaaaatttaaccataaacgtcttctcattatcccaattccttgctcttctgagaagttaaagaccccaattataggccgggcgcggtggctcacgcctgtaatcccagcactttgggaggccgaggcagatggattgtgaggtcaggagttcaagaccagcctggccaagatggtgaaaccccatctttactaaaaatacaaaaaattagccgggcgtggtggcgcacacctgtaatcccagctacttgggaggctgaggcagaattgcttgaactcagagggcggaggttgcagtgagccgagattacgccactgcactccagcctgggcaagagagcaagactccgtctcaaaaacaaaaacaaaaacaaaacccaattatatatacccccaattcttctatttatttagtcaagcccagaagggcactcaggtgtctgattggggtctaatttccttcttcattattcacagttgagaggctgtcttccgcgttgactgataatatacctccttcagcagctacaaagttgggttactctgttctcaaggcttttctgtattctatattaacaaactctagaggataaacagggcacatgagaatatttagaaccagctccacattcacaaagatttacaaatcaagtataatctgctattagtgtaggagtttgtaatgtaagcaccagttttctcacattgcagcaacaacgatattcccttgattcagtagctataatctaggcccacattggtattactcatccaaagacatgatgtaatttgagagaagcgggtagatagagaaaatggaagaaagaaagaaaaaaaaaagtgcatggcttcagtcttaccttagttgttaaataaacaacttgcccatctctgctagttttccagaggccatgactgggatgtttataactcttttgggagaagtctattaagttaattatgacactcttaaatccctaatctgggaagtgaattccagcatcttacaaattgctttctctttctgagtgacaatttgaaatagcccagtcctttgcatggaatgtaaacatgtgcattcagatttatagtccagtgttcctccatttccattctcctgctctcttttttcttctgtatcaggattccaaagatttctgagccttaggttgacctctatacttttactgtttttattgccttttggaatttcttagtcctatggttcctgtttgtttttaggatgaggttccagtttatccccacatttgccccactgacaaatgccctttaaaatatttctgaattagtgttgctgtttaaagtatttaatcctgtgccttcaggtgcccagtgagaataaatttgtcctctgtgatatctccttgccttgagtaactttttctactccagtggaagcagaatgtttcattttctatcaacagttttccctcagtactgggacctgaccttgcttcttctaatgtttgcctactgtgttcatgcagatttcgttaggttaaatgttcaacctacttattaagttgggtccagtgtgatctcttcctaggaaatggcttaatattgtttattttatcagaatgtcgttttgcatgttatctttttgtgtgctatttctgctttgatgttgaagactgaaccttgttttttaaagctgatttaatttttttcttgagtgtcgatatttttccttctaaagcttctgctctagttttctattcattgaccaaattttttttgtttgtttttgagctggagtctcactcctgtcgtgcaggccagagtgcagtggcgtgatcgcgggtcactgcaacctccacctcctgggttcaagcgattctccttcctcagcctccctagcagctgggattacaggtgtgcatcaccacgcccggctaatttttgtatttttagtagagacggggtttctgcatgttggtcaggctggtctcgaactcctgacctcaggtgatccacctgccttggcctaccaaagtgctaggattacaggcgggagccattgtgcccagccgttttttacttgctgataataattttctttttctctccaagtaaaatgattcatggaatcagtgtttcaggcatagaaaaatgatatttttaaaatgtcctttgtggcttttggggttttgataagttcattcagaattttttccacctcaattttaagaagactactcatcattgtatgaagggccttctcttattaagctctgtcttcctttataagctcaccacacttctgaggttgaactcacactctaggtcttccaaattcatggccattattaaggcttagtaacatgctagtcactcagttctggataagggcagggtgaagaacagagaatttgaaggtagtttacgtggcacctgccactcatcagtttgaggcttaaacaggcttgcttggccagggcgatggctcacgcctgtaatcccagcactttgggaggccaaggagggtggatcacctgaggtcaggagtctgagaccagcctggccaacatggcgaaaccccatccctactaaaaatacaaaaattagccgggtatggtgttgttgttcgcctgtagtcccagctacttgggaggctgaggcaggaaaatagcttgaacctgggaggcgcaggttgcagtgagctgagatcgcactactgcactgcagcctgggcaccagagcaagactccatctcaaacaaacaaacaaactagccaggagtggtggcatgtgactcctggcctcaagtgatccacccacctcagcctgccaaagtgctgggattacaggcgtgagccactgcacctggcctcgactagattttaatttttaatttttatttatttttttgagacacagcttcgcttgttacccaggctggagtgcagtggcatgatctcggctcaccgcaacctctgcttcccgggttcaagtgattctcctgcctcagcctccctagtagctgggattacaggcatgggccaccacgcctggctaattttttatatttttagtagagacggggtttctccatgttggtcaggctggtcttgaactcccgacctcaggtgatccgcctgcctcagcctcccaaagtgccgggattacaagtgtgagccactgcgcctggctgttttttatttttagtagagacaaggtcttgctatattgtcctggcttgtcttgaactccaggcctcaagcaatcctcctgccttgacctcccaaattgctgggattacagacatgagccaccatgcccagctatctttacgcttcttccttttgccactcctagctgtaggtttggtatggggaagaccttagctatctatgttttcaacatttcaaatatttgtcttttgcttttaagtctttacaactgttactgattttgtatggtgtgagatagagatccaatgtgtttttttttttccttcacctcatggctaatcaattgtcccagctccagagctgcatttccatcacctgttacctctaaaagcagcctcagttcagtacctgtcaacttttacttcctctaggatctttgcacctaaattccctctttctggaatattctccgtctatttctttgtgggctatgactgttaaggcctacagaccaaagaccacatctgtagtaaaaatcattagatgtatttagtttgctgcgcaagagaaaccatactcttgagaattttgggtagtctcagagtgagttgaaaggggcagaatgagggaagaatgaggtgggcctgaggatgtcattgaagacaatgaagtcagtcaaataaaggatctttattttaacagccttgtatggaaacattgtttatatggttatgttcagattctattgaaaccattgttcaagttttgataggaatatcacagtctgattactggcagggctgattttctcaattctcatcctttgaattagagcttggcttaaatgttaccttctcagaaaccactgttgcttatttttatttcagtatttagtatagataataataatagtaattattattttttgagacagaatcttgctttgtctcccaggctggagtgcagtggcacgatcttggctcactgcaacctctgcctcctgggttcaagcaattctcctgcctcagcctcccgagtagctgggattgcaggcgcacaccacaaggcctggctaatttatttatatatttatttatttatttatttttgtgagatggaatttcgctcttgttgcccaggctggagtgcagtggcacgatctcggctcactgcaacctccgtctcctgggttcaagcagttctcctgcctcagcctcccgagtagctgggattagaggcatgtggcaccacacctggctaattttgtatttttagtagagacggggtttcaccatgttggtcaggctggtctcgaactcccgacctcaggtgatctgcccgtcttggcctcccaaagtgctgggattacaggcatgagccaccgcgcccagcctaatttttatattttttagtagagaccgggttttactatgttggccaggctggtcccgaactcctgacctcgtgatccgcccaccctggcctcccaaagtgctgggattataggcgtgagcctctgcacccggcctataaattataagtattaatttgttgtctacttatttgccttttgtcttctccactagaatatacactccatgagggcagaatcatatttcttctccattatagccctagtgccaagggcaggtttggcatatcataggtgctcagtaaatatctgtatgaataaatgaataagagcaaattcaagagttttctagaactgcattagcagtttttccagacacactgctgatctctaaaagtcaaccacgaggttattttccacaagtaagatggagatggtatgagtgtgactttgtatattaatgtgcataacagggccctacttagctctatggtttttaaaaaataaactacttaattttaaaactcagggagacaaaatcaataagatctacctaattttttttacaactaatttttatttattatttgatgtataattaacagtatatgtaacccacataagttgtgaagcataataataaaatacatatcatatacataataaaattgtgtatgactggggtcttagtttgggttttcctgatgactactgataattttttcatgtcttcttttttttttttttttttttttattttgagacagaatctcgctccgttgcccaggctggagtgcagtggcgtgatctcggctcactgcaacctctgcctcctgcctcagcctcccaagtaggtggaactacaggcgcgtgccaccacccctggctaattttttatagctttagcagagacagggttttatgatgttagccacaatggtctccatttcctgaccttgtgatccacccgcctcggcctcccaaagtgtgggggttacaggcgtgagccaccgcacccggcctttttttttgagacggagtttcactcttgttgcccgggctggagtgcaatggcacaatctcagcttactgcaacctccgcctcccaggttcaagtgattctcctgtctcaccctcccaagtagctgggattacaggctcctgccaccatgcctggctaatttgtgtatttttagtagagacgggtttcgtcatgttggtcaggctggtctcgaaccctgacctcaggtgatctaccctcctcagcctcccaaagtgctgggattacaggtgtgagccaccttgcccagcttcgtgtcttttttttttaaattattttttcttcaggtagcctcccgagccagagtaggctcagagacacccttttccatgtttttgttggccatttgtgtttctttgagaaatttttttttttttttttgagacaaagtctggctgtttcgcccaggctagagtgcaatggcacgatgtcggctcactgcaacctccacctcccgggttcaagcgattctcctgcatcagcctcccaagtagctgggattacaggtgaatgccaccccgcttggctaatgttttgtatctttagtagagatggggtttcaccatgttggccaggctggtctcgaactcatgatctcgtgatctgcctgccttggcctcccaaagtgctgggattacaggcgtaagccaccatgcccggctgagaaaagttttttgtatcatttgcttattttgctgttgagtttttcttattgttttgtcagagtttatgtgtttcctgtgtacatccactattatatttgttgcaagtatcttctcacatttatggttttctttttttgatggtgtctttggttgtatagaagtgcttagttttatttttattttttttatagatgtggtcttgctatgttgcccaggctggcctcgaactcctgggctcaagctgtcctcccaagtggctgacaacacacgcaccactgtgcccagctgaagttcttaattttaatgttgtttaatatattaatttttttcattattattattagtactttatttaagtgatcctctcctatcctgaaataatgacaatattctttaaaaagttttaaaggtttatgtttcatactttttaagtctatctggaattcatttttatgtatggtgtgagataagaatcctttttttcatatggccaataatcagttttttcagtatcatgtaaatgcataagacttatttagatttgcagttacaagaatggaggagatgatccggtattatttcctttattgattatgtactctctgtcttctaggttctttttctaattccaaataaacttgcaagaggactatgaaagattatgatgaacttctcaaatattatgaattacatgaaactattgggacaggtaattgttatttttttttggaggcagtggatagatcaactatttgagagtatagattatttgggtaggtgtgagctttttcgtctaacccacacagttttaaaattcttctacctacttcagtaagaaaaagtggagcaagcagagaggagaatagtaggagaagccctgtaggttattgcaaggactttgacttttattctaaataatttattctaaatatttcttttatttctttttttttttgagacggagtctcactctgtcgcccaggctggatggagtgcagtggcgcgatcttggctcactgcaagctctgcctcccgggttcacgccattctcctgcctcagcctcccaagtagctgggactacaggcgctcgccatgcctggctaattttttgtatttttagtagagacggggtttcaccgtgttaatcaggatggtctcgatctcctgacctcgtgatccacccgcctcggcctcccaaagtgctgggattacaggcatgagccaccgcgcccaggcttcttttatttcttgacttttattctaaattaaagtcattggagagttttgagttaaggggtaatttgacctttgtttttacagagttgctgtggctgcttggtagataaaaggttggatgaaggagggcaagagcagaggcagggagatgttagcagactattgcgataattcaggtgttgatgctagagatgatggtggtgtggatgagggtgatgtaaaagcagtgaaaggggtgggacattttacacacacatatgtacacacctatgtgtgtatgtttttattaaggtataacatatagtaaaatatgcaaagtgcaataatctcagtggagttttacacatatatatgtatacacatacccatatattccctgtgcggatcaagacatagaccgtttccagggagtatctgcctgctttcccccaaggtagccattgatatattttgaggacagagctaatgggatttattgatgggttggagtgctagagaaagagaagggctaaggatggttccagggtttttggcctgagcaccagggaaaatggagttgccctttgttgaaaggaagaagaccatgggagagactactaggaagttctttttggaaatgttaatttggggatttcttttagctgcctgagtggagacatttgtccagcttttggttcagttttgaaaaataattgcttatcttcaaagtttttttttttttttggagatggagtcttgctctgtcgcccaggctggagtgcagtggtgcgatctcgggtcactgcaagctccacctcctgggttcatgccattctcctgcctcagcctcccgagtagctgggactacaggtgcccgccaccatgccaggctaattttttgcatttttagtagagacggagtttcactgtgttagccaggatggtctcgatctcctgaccttgtgatccgcccgcctcggtctcccaaagtgctgggattacaggcgtgagccaccgcgcccggcctcaaatatttaaaactgagtggaagtttcatataatttgtctttggcctcagcaactttatattgtgttctagcagtgttaattataaaggaaatttaattgcaggattattcataaagcagatttctaaagtgagttctgttttttttttattacaaagtttgagatacactatcatggttaaaaaaaaaaaaaccttcagctagacattggataacaagcagcaacaggaaaaaaaagccacaaacttctaggaaaatttggcttgatagagtcttttaaaattattatatataaaaaggtgtttgtgcctgagtccttgcttatgctttcataatacattttcctacttaggtggctttgcaaaggtcaaacttgcctgccatatccttactggagagatggtagctataaaaatcatggataaaaacacactaggggtaagtttagatttatttaaaaaatagtccacttatagatcagtttcgtgaattaaaacctgaattgttctaatgttctagttactgctcttagaataatatttttataccttttaaaaaacgtatagatctgtggttttaaaaagtaatctgggggaagggattactttgttcttcagattttaacgcagtgcagtgggacatatttgaagtctgtagcatccatctgcagtctgtagtctgtaggtgtttctggatattaatgtgtcccatctttcttttcttttctttattattttttatttttttttgagacggagtctcgctctgtcgcccaggctggagtacagtggcgcgatctcggctcactgcaagctccgcctcccgggttcacgccattctcctgcctcagcctcccgagttgctgggactacaggcgcccgccactacgcccggctaattttttgtatttttagtagagacggggtttcatcgtgttagccaggatggtctcaatctcctgaccccgtgatctgcccgcctcggcctcccaaagtgctgggattacagtcgtgagccaccgcgcccggcctcttttcttttctttacttttttttttttttgagacggagttttgctctgtcgcacaggctggagtgcagtggcgcgatcttggctcacggcgacctccgcctcccaggttcacgccattctcctgcctcagcctcctgagtagctgggactacaggtgcccgccaccatgcctggctaatttttttgtattttttttttttttttttttagtagggatgggatttcactatgttagccaggatggtctcgatctccagacctcgtgaaccgcgtgcctcgacctcccaaagtgctgggattacaggcgtgaggcaccgcgcccggccccatctttattttcttatgatactcttactaaatataaatcattttggtactatagataggcaaatagataaatattatgtcctagcttttttttttttttttttgagacagtctcactttgttgcccaggctggagtgcagttgcacaatcacagctcactgcagcctgtacctgctgggcttaagtgatcctcccacctcagcctcctgagtgggtgtgaccagaggcacatgccactatgcttgcctaatttttaaacatttttctagaaacaaggtcttactctgttgcccagggtggtctcaaactcctggcctcaagcagtcttcccatctcagcttcccaaagtacagggtatgtaggggtgagccactgtacttggcctgtcccagcattttattcaaaatggctttagaagttatctaattaaatccttttccaaatcagcctctttttcctctatgtgaattcttccagggggaacagcttgttatctcctaaagcagcccattcagtttgtggtcttggctacaatgtataaaaagttatttttatgttgagataaagcctgtctcttttggtggtttttctggggcttctgtacccattccagtgtttgaagtcaccttgagtcatcttttttttctaattccttctaccattctttgtttttttttttttttttttttttgagatggagtcttgctctgtcaccaggctggaatgcagtggtgcgatctcggctcactgcgacctctgcctcctgggttcaaatgattctcctgcctcagccacctgagtagctggtactacaggcgtgtgccaccatgtccagctaatttttgtattttcagtagagacaggatttcatcatgttggtcaggctggtctcgaactcctgacctcaagtgatgcacccacctcggcctcctaaagtgctgggattacaggtgtgagctaccactcccagcctaacattttgtaattgtccttaattatcaaacataaaaaataatttttggttgggtgtggtggctcatccctgtaattccagcactttgggaagctgaggccagaggattgcttgaggccaggagttcgagactagcctgggcaatatggcaagtcttgtccctacaaaaaataaaaaaaatttagccaggtgtggttgtgcatgcctgtagtcccagctacttgggaggtggtggtgggagggtcccttgagcctaggaggttgaggctacagtgagctgtgattgcaccactgcactctagcctgggcaacagagcaagatcttgtctaaaaaaagtttttttttgatgtttttattgttggaatgagatagggcttaatattaattgttacctacttttttaattgttaaagatataagttctgattaacacataaataagtcaaagggagccaggcactgtggctcacacctgtaatcccagaactttgggagaacaaggtgggtggattgcctgagctcaggagtttgagaccagcctgggcaacaaggtgaaagcccttctctacgaaaaatacaaaaaatttcgctggacatggtggtacacacctgtagtcccagctacttgcggggctgaggtgggaagatcacttgagtctgggaggttgggctgcagtgagccgagatggtgccgctgcactccagactggatgacagaacaagaccctgtctccagaaaaaaaaaaaaaaagtcaaagagtatgtaagtagttttgttacagcaatgtcattaaatcatttgaatttcttcctaaatatatgctaaaatcatacaatgaccagtataagaaattatttttaattatctgtcagtggacaattcaggctttcctccagtttttttgttttattcaattttttgttttctatttattaatctaagaaaaaagcattaaaaccatttttcttgagcatttaaacatgagtatcaattagattaattcccttaagcagtttaaatttcagttataactttagtatgacttactttaacacttcaaatacttaaatagcaaacaaaatgttattacaaaatgtgttatcacactgatgctcaaaacttattctaaagcgtaatatgacattaattcatgatttctaaacttgtttttatattttctgttgttattatgctcattttagttattttctaggattttaataatattttgattacttccatggttttatttatttatttatttatttttgagatggagtcttgctctgtcacccaggctggagtgcagtggcacgatctcggctcactgcaagctctgcctcccaggttcacgccattctcctgcctcagcctccagagtagctgggaccaccacgcccagctaatttttttgtatttttagtagagacgggttttcaccgtgttagccaggatggtctcgatctcctgacctcttggtccgtctgcctcagcctctcaaagtgctgggattacaggtgtgagccaccacgcctggccgattacttccatggttttagtcatcaggcttcctccccacaaagaaagaagattatcataccaagatagtgaaagttacagttgattctttgtcaagacatgatatctagttgcatagtcctggataactgggtcctgagacactggccattaagacggagtccctttttattttatttgtttttcaagatggagtcttgctttgtcacccaggctggagtgcaggggtgtgatctcagctcactgcaacctctgcctcctgggttcgagcaattctcctgcctcagcctcccatgtagttgggattacaggtgcctgccaccatgcctggctaatttttgtatttttagtagagacgggattttaccattttggccaggcttgtcttgaactcctgacctcgtgatccgcctgcctcggcctcccaaagtgctgggattacaggcatgagccactgtagagcccccccgcctttttttttctgatacggagtttcgctcttgttgcccaggctggagtgcaatggcaacctccgcctcctgggttcaagcgattctcctgcctcagcctcctgagtagctgggattacaggcatgtgccaccacgcccagctaattttgtattttttttttttttaattttttcgatacagagtctcgctgtgtccccaggctggagtgcagtggcacgatctcggccactcccaggttcaagtgattctccttgcttcagcctttcaagtagctgggattacaggcacccgccaccatgcctggctaattttttcgtgtgtgtttttattagagatgggttttcaccatgttggccaggctgatcttgaactcctgacctcgcgatctgcccgcctcagcctctcaaaagtgctgcaattacaggtgtgagccaccacacccaatcagagtccttttttttttgagatggagttttgctcttgtttcccaggctggatcgatctcggctcaccgcaacttccacctccagggttcaagcaattctcctgcctcagcctccagagtagctgggattacagacatgcgccaccatgcccggctaattttgtatttttaattttgtgtttttagtagagacgggctttctccatgttggccaggatggtcctgaactcctgacctcagttgatctgcccaccttggcctcccaaagtgctgggattacaggcatgagccaccgcgcctggcccagagtccctcccttttttttttttttgagacggagtttcgctcttgttgcccaggctggagtgcagtggcatgatctcggctcaccgcaacctccacctcctgggttcaagcaattctcctgcctcagcctcccgagtagctgggattacagccatgcggcaccatgcctggctaattttatatttttagtagagatggggtttctccatgttggtcaggctggtctcaaagtcccaacctcaggtagtccgcccaccttagcctcccaaagtgctgggattatacgcgtgatccactgcgccctgcctcagggtccctttttataatgaagttttacttgttacttgatgatatctctaggcttctgtcctttaaagttttttcagcttggcttatcttcctctccccacccaactttttattttgaaagtttcaagacctcagaaaagattggagactgagacagtgaatacccatatacctttcacctaagttcactggttttttgctcagcatgcttcttaaacggtgttgctgaggctgaaagtggtagctcaggcatgatgactgagtagtgtttctgtcattttccttgtttggaatgctaaccttctaaggagtctgagattgttttctggatgttgtactgttgacccacattgaacctgtctttcataaaatctccaatgccctttttatgcacatgcaaataaattttgctatatttttctgtagtgttgaacagtttttggggggctttttgatagcttttgctacttagtattttttttttttgaaacagagtcttgctctgttgcccaggcgggagtgcagtggcgcaatctcggctcactccaagctccgcctcccggattcacgccattctcctgcctcagcctgctgagtagctgggactacaggctcctgccaccacgcccggctaatttttttgtagttttagtgagacagggtttcatcgtgttagccaggatggtctcgatttcctgacctcatgatccgcccgcctcggcctcccaaagtgcgggattacaggtgtgagccaccgtgcccggccagctacttagtattaaagctgttagtattggagcttggaacaccacctgaataagtttattgctcattccatatgatgttttgtcacagagtgatttgccccggatcaaaacggagattgaggccttgaagaacctgagacatcagcatatatgtcaactctaccatgtgctagagacagccaacaaaatattcatggttcttgaggttagtagtatgttccagatacctgaaaacatttgatcactttatcaatagtaaaagagaaaagtacatttcacctgaaagattagaagagatgttaagcgacttacctgttttgttccatttgtaacaatttagattaaatagatgtatataataagttggagattcaatgtaaatgtcatttttctaatacacccctaatggggtagtatggtttactagatagaatatgttagaattttctcctagagggaaggactcattctagtttttttttttttttttttgagacggaatttcgctctgtcgctcaggctgaagtgcagtgatgccatctctgctcactgcaccctccacctcccgagttcacgccattctcctgcctcagcctcctgagtagctgggactacaggcgcccaccaccatgcccggctaattttttatatttttagtagagacggggtttcacgtgttagccaggatggtctcaatctcctgaccttgtgatctgccctcctcggcctcccagagtgctgggattacagacgtgagccaccgtgcccagcctcattctagttttatatggtatattaatttcctagggctgttggaacaaattactacagacttggtggcttaaagcaacagaaactcattgtctgacagttctggaggtttgaagtctgaaatcaaaatgttggcaaggctggttccttctggaggttctgagagggaatctgtttcctgcctctttgctagttgttggtagttgctggcagtccttggcactccttggtttatagatgcaccactcccatcttggcctccgtcttcaaatggtgttttcctctctgtgtagctgtgtctctgtccaaatgtctctcttcttaaaaggacccaaggtttaggcttaccctgatccagtgacagttcaacccccagcactgggtagcttccagtgtcttttatgtaaaccaagcaatttcaagttttaacttgccatttttgtcttgaaagatgtctttagaacttgtattattcaacttctttagttttcgttagtctcagccaaataatatgtaatttgcacatgattttcacaggatagcactgttttaaaagcatattttaaaaatcataattttggccgggtcctctcatgcctataatcccagcactttgggaggctgaggcgggaggatcatttgaaaccagtggtttaaaaccagcctcagtaacatagcaagaccctgtctctacatacaaaagaaaaaagaaaaaaaaaagccgggtgtgatggcgcgtggtgcgcacctgtcattccagctcctcaggaggctgaggcgggagaattgcttgagtccaggagtttgaagctgcagtgagccacgttaatggcactgtactccagcctgggtgacagaacaaacccctgtctctaaaaaataaaaacaaaaaaattataacgttgaatgttttggatctagagctattgtatagtagtacattgtattactacactgtagatctacctacatggtccacattttaaaacctctttgattttaaaacctctttggtaattttaaaacctctttatatttttaggtgatccctttgttcaaataaaattcttagggccaggcgcagggggtcacgcttgtaactgcagcactttgggaggccaaggctggtggattatttgaggccaggagttcaagactagcctgggcaacatgggaaaaccgcatttctacaaaaaatacaaaaacttagccagttgtggtggtgcatgcctatagtcccagctacctgggaggctgaggtaggaggatcacttgagcctgggaggcagagcttgcagtgagctgagatcatgccactgcactccagcctgggtgacagagcgagactctgtctcaaaaaagaaaaagaattgttaaaatctcccaagcatccatgaacctaggagaaaatttaaaaggtacaagagagtggccgggtgcagtgtctcgtgcctgtaatcccagcactttgggaggccaaggtgggaagatcacttgagctaaggagttcgggactagcttgagcaacatagtgagaccttgtttttacttaaataaaaaaagaaaaaaaggctgggtatggtggtgcacacctgtagtcccagctacttgggaggctcaggtgaggagcctgggagatataggctacagtgagctatgattgcaccactgcactccagccttggcaacagagtgagaccctgtctcaaaaaaaaaaggtacagggagtatatattaaaaaacaaaatcctctctttcccctacatcccagtcatccaatattctttaatttttaaattttattatattgttaatagaaatgggggtcttggcctgttgcccaagctggtcttggactcctggccttaagcgatcttccctccttggcctcccaaaatgttgggattacaggcgtgagcaactatgccccaccctagtcatcacatttcttttcttttttttttttttttttttgagacggagtctcacactgtcttgagtgctggagtgcaatggcgtaaccttggctcactacaacctccgcctcccgggttcaagtgattttcctgccccagcctcctgagtagctgggattgtaggcacgtgccatcacccccggttaatttttgtattttttagtagagacggagttttaccatgttggccaggctggtctcaaacttctgacctcaggcaatttgcccacttcagcctcccaaagtgctcgggattacaggagtgagccaccgcgcccggccctcaaattttcttttctctgagccattcatgtacttttcttgtgtctcttgtagatacctacatatattttatacgtatgtgtattttatatgtgtgtgtgtgtagcttacacacacatggtgtgacacaaatggtcacaaattattactttgcaccttgtttttttcccaggtaacaattgatcttagagaccatctgagcacattcagatattttagacatttttatttctctttattttgtatttctttatttgaaaatatgaagtaggctgttttctttttgtaaaacttactgtataacattaaaacatttcctattgaggtataaatttacatataataaaatgtacacattaggtatgcagtttgacaaatgtatatacccatgtacctcccaccccaaagtataaaacatctctatcacctcagaaagttttctccagcccttttgaagttttccctgtaaccatagccaccctgcccttaccagcaactgctcatctgatttctatcacagcagatcagtttaatctattctagactatgatgtaaatgactcatacagtattcttttgcttattcttttgttaggcttcttttgctcagcataatacttttgtaagccactatatcaatctatagtcttaataacttagtactggacattgtttcatatcagtttgtaaagagcttcctcttttttttttttttttttaattattgcctagaattccattccgtgtcatagtttatatagtatcagcatttaggtctgaatgctgttattccccacaaattcgtatgttgaaacttaatccccagtgtgatagtattaagaggtggggccctttaaggaggtgattaggttatgagggcagagcccttatgaatgggattagtgcctttatacaggaggctttagggagcctgtttgctcccttccaccatatgagaatacatagcacatgccaactgtgagcaacagaacctcactagacactgaatctagtggcaccttgatgttagacttcccggcctccagaaatgtgagcaatacatttctgttgtttataaattacccagcgtaaggtattttgttatagcagcccaaatggactaagacagttgtttctagtcttttgcttttacaaacactgctgctgcagtaaatgatctttaaggtacgttttttgttgttgttgttgttgttgctgttgttgtttgttttttgagacgaagtctcactttgtcacccaggctggagtgcagtggtgcaatcttggctcactgcaacctctgcctcccgggttcaagcgattctcctgcctcagtctcctgagtagctgggattacaggcgcccgccaccacgcctggctaattttttgtatttttagtagagacgggttggccaggctggtctcgaactcctgatccacccacctcggcctcccaaagtgctgggattacaggcctgagccacggcgcctggccaaagtactgttttttgatatgagtgagtacatctataagagcagtaactaaatgtggaactgtgaggtcaagtctatatgcatttgtaattttaattgatattgctaaaatggaaacccagctcacagaaaagtggagaaagttttctgtgccctgggaaagggatggaaagccttgagctttgtgctctggtacctgttctgcagcctctgagatacctctgtagacctgggctccttctggtacagattgaaaaccactggtctttgggatagagaaacaataattactgctggctttttaaatttcaggtaattacactgaatgagagtacattaagatgagaatggcttttaatactttgctataaaaatataaaaccctgggtgagctttttaaaatcacagtggtagttggttttacttctacttactggtaataaaactgttcgaagaaagagttattgttctcattcctggagtcattattgacttgtttgatcctgagagtgtacttttgaatataccttactcggttccattccctataaagtcgaattaataatatctctgagttaagtgtacttttttattttaaatttctgtgaagtgattttttaagttgtaacaatatctgtgattccattgctgttgaagtactgccctggaggagagctgtttgactatataatttcccaggatcgcctgtcagaagaggagacccgggttgtcttccgtcagatagtatctgctgttgcttatgtgcacagccagggctatgctcacagggacctcaagccagtaagtgactgcatcacagttagatgctcaccttcagcgtcatttacctgttatttttaggtttacaaatgatctgattaggaatctatctttggtttgctttttgttgttgttgctccagtcatacctatcagatttcttttttcctcttactttttttttttttttttttggaggtggtgtctcactctgtcacccaggctatagtgcagtggtgtgatctcggctcactgcgacctccgcctcccggattcaagcagttcccctgcctcagccttctgagtagctgagattacaggcacagggcaccatgtccggctaatttttttatttttagtagagatggggtttcaccatgttggtcagtctggtcatttttttggagacggagtctcactccgtcgcccaggctggagtgcagtggcgcgatctcggctcactgcaagctccgcctcctgggttcacgccattctcctgcctcagcctcccgagtggctgggactacaggcgcctgccacaacacccggctaattttttgtattttttagtagaaacagggtttcactgtgttagccaggatggtctcaatctcctgaccttgtgatctgcccacctcggcctcccaaattgctgggattacaggtgtgatccaccgcgcccggccaggccagtctggtcttgaactcctgacctcaagctattctttcgccctggcctcccaaagtgctgggattacaggtatgagccaccgctcctggccttggtaggctttttggatgcatttatgagcattctgtgtatctgtcaattgtgtgtgactttataaatgtcttgtttttttttttttttttttaagcaagatctcactctgtcacccaggctggagtgcagtggcatgatcagggctcactgtagcctcaacctcctaggctcaagtgattttcccacctcagcctcccaagtagctgggactacaggcgtatgccaccatgcctggctaattttctgtatttttattttatatatgtatgtatgtatttatttatttttatttttatttttgagactgagccttgctctgttatccaggctgaagtgcagtggcgcaatcttggctcactgcaacctctgcctctcaggttaaggtgatcctcttgccttagcctcctgagtagctggaattacaggtgcctgccaccactctcggctaatttttgtatttttagtaggcctggggttttgccatgttggccaggctggtttcaaactcctgacttcaagtgatgcgcctgccttggccttccaaagtgctgggattacaggcgtgagccagggtacctggccggaaactatctttttccatctgtttatactgaactcgtcgatttcaactcactcttttggtttaaatttgcttttggcacaaattgtgtttgcttgtagttgactctcagaacaccaaggagaaaataggagaaaatggtttatgctagtgagtcttatggggaagtgatagagtgatcgcccaggctggagtgcagtggtgcgatctccgctcactgcaagttctgcctcccgtgttcacgccattctcctgcctcagcctcctgagtagctgggactacaggcgcctgccaccacgcccggctaattttttttgtatttttagtagagacggggtttcaccgtgttagccaggatggtcttgatctcctgacctcgtgatccacccgcctaggcctcccaaagtgctgggattacaggcgtgagccactgcgcccggccctttttgttttttttgttttttttgttttttttgtttttttttttttgagatggagtttcgctcttgttgcccaggctggagtgcaatggcactgtctcggctcaccccaacccccgcctcccgggctcaagcagttcttttgcctcaacctcccaagtagctgggattacaggtatgcgccaccatgctcagctaattttgtatttttagtagagacggggtttctccatgttggtcaggctggtctcgaactcctgacctcaggtgatgtgcctgcctcagcctcccaaagtgctgggattacaggcgtgagccattgtgcccagcccttcttttcccttatatacttcttgtcatttcgttagtttctagtcattttcagtttgttgtacccggactttttaacagaaacaaccttaaatcatttttactcattttaattaatttatttatttttaaaaagtgagaccaggtctttctgtgttgcccaggctggtcttgaacacctgggctcaaataatcctctctcatctgccttcagagtgctgggattacaggcatgagctgccacacctggccttaagtcatttttagaaatggctagaggtgggatgtgatataaggaagtcagtatacagttatcaaaatatctttgttttcccaggaaaatttgctgtttgatgaatatcataaattaaagctgattgactttggtctctgtgcaaaacccaaggtaagtgcagaaataagatgcatctatgttctttgtaaatgcatttatttcttagtgtgtgattttgtcctgacttccacttattctttattgagcttggttgcatccattgagaagaatgttaaatttcatcccaggtatgggtagtttttgtaagttctctagatgatcataacatgcaatcaagattgagagtcactgccctagttctaggattggtcctgctgaagactccatgggtatgctgtgagaatttgcagtgcagaggtgacttgaggctattacagcaagaatgctgacttgaccagtgcttgcagtttgagtatattgccactagatgatgcctttgtttgtttagataaaagttgagaatttagtgcaaatctgttatccaaatggttctataactaacaattagttacattttgagaaacaatccgctttccttttaaaagaaggaaaaagcccatatgcacttctaaatttataactgttatatatttccttaatttgcattccatggttatgtattggtgttctccagcataacttctctttgaggtgactttgaactttctggctctgctgtctgcagcagatctcctgtgtggctgcctgttggaagcttcctctggagttctctaatcatggtactcacaatctctaaaatgagctgtctacactcattaagaatgttgaaattgcagacttgtctcgggctttggtaatcccataactgtttcctgccctgatcagaattagctaggtgcaaagggaagcagattttgcccctttggcagaaagtctgattctttctgattcttctctccttcccttggctctttagaaactataagtggaaccttttttctgggaaccaaatgctagaaggcaggtttttttttttttttttgattgacaaacatataaagaaaaaacatactttgaacagataaactggtttaagttgttctccatgggaggcagtggagaaggtttgtgacagaccctgtgagccttcatttatggctgccacggattacacacatagacaccatctaaggaaagtggggttgcctgggagaggattgcctcagccttcttccaaggagcacactcctgggcatgttgtttcagttgtaaatgacatctcacaattcacaaatcctttgccagctgtaagaactctatacagctgttggactgtagctttattttcattatgtcttggtatttctgtgggagggcagaggaggatgagcagattactcattttaacagaactggaagctaagggagtgatttataactgcatctagaaaacagactttcaaggcactgttctatgtaacatattgcttttttccctctaagaaaatagagctcttctgtatttgtgaagatttcatactggagataaggtccagtaaataaatttttccccccgggatacttggggatggaaagacgtggatgcttggatatatgctgggcttatttatgtatgtgggtatttagggaagtatgaacctgatttgactgagctaaggggaaaggatttgttcatgccaggttgtagtggtgttgggaatccagagaagcagagaccacacgtgcatgcacacatgtatacagagtattgtgttggctgcagaaatcctttattatgtggggtggtttttcatctagcttctctttgcttgtgctcaaataatttttatcggccaggcgtggtggctcattgcctgtaatcccggcactttgggaggccgaggcgggtggatcacctgaagtctggagttcaagactagcccagccaacatggcaaaaccccgtctataccaaaaatacaaaaattagttgggcatggtggcacgctgcgtgcctgtaatcccagctactctggaggctgaggcaggagaatcacttgaacccaggaggcagaggttgcagtgagccgagattgcgccattgcactccagcctgggtgacagagtgagactccgtctcaaaaaaaaaaaaaaaaaaaaaaaagaatgtttatcaaggtttaattctcttaagcgttgtaattaataagtttcatttttatcttattggcagggtaacaaggattaccatctacagacatgctgtgggagtctggcttatgcagcacctgagttaatacaaggcaaatcatatcttggatcagaggtaattattcattgattaattcattatataatcagcagacatttatattggtcacctgtagtgagtcaggcactgtgcgttgggggtataatgatgaagtaagaaataatcttgttaatcagagttcagtctatttggagagtgagacatgattacttataaatgaaattaataacttgcaataaatatagtaacatatacttatgaagcagggatatttctggtgtccttgttgtggctgcttttgtattaaatagtgccatagtttggactggttagtctagctggatagaacaaaagacgaaggttccaggctcagtttcagagatgctggttagcacagagaaaacctgtgcttcgtccatccagagctgactctccaaggccagcagccctgtgtaggagtccaggctgagaaggagtgggatttgcctgatttatatttgctgtatctcaaattatcaaattagctcctctcattctctggagtactagttttgctgatgtgagtgtcataagattaaaaaaacactttagttgtgaaaagctcaggaagtgctcaaacaggtttcctatttcaggacatgtccaaatctttttttgttttgttttgttttttttttttgagacggagtctcactctgtcacccaggctggagtgcagtggcgcgatcttggctcactgcaacctccacctcctgggttcaagcgattctccttcagcctcccaagtagctgggattacaggcaactgccatcacgtttggctaatttttgtgtttttagtagagacgggtttcaccatgttggccaggctggtttcaaactcctgacctcaaatgattcacccacctcagcctcccaattataggcatgagccactgcgcccagcctccaaatctttcttttcttttggagatggagtctcactctgttgcccaggctggagtgcagtggcacaatctccgctcactacaagctctgcctcctgggttcacgccattctcctgcctcagcctcccgagtagctgggactacacgcgtccgccaccacgcctggctacttttttttgtatttttagtagagatggggtttcaccatgttagccaggatggtctcgatctgctgacctcgtgatccgcctgcctcggcctcccaaagtgctgggattacaggagtgagccaccgtgcccggctctggcctccaaatctttaatgtgctcttgtacagtgtgatccttcaggaaaggaacatcacagataacagctggttctgattttatttgcctatgggatccacttttgatggagagcatcttttggaactagcataaggaactttgggaataccaggttacttcataaaatgagaagatgggaactgtttccggtgactttttattttgatataatctctaacttacaagatagtgcaagaatagaatgaggaactttggtatatcttttactcaaattcacagttatttacatttttccttatttgctttatcattctctatgtttatatatatgcatgtttttttttgaatcatttgagagttagctagaaatatcatatccttttattactcaatatttctatatatatttttcctaaaagcaaagaccttttcttttataaccacactttagtatcaaaatttaacattgatacaatttatttaattcataattcatattcaaatggtattaattgtaccaataatgtcctttatagttttattttccccccagtctaggatatggtgcaggatgcatttagttattgcatttagttattgtgtctctttagtcccttttaatctggaagacttccttaggctttctttattttttttgatctcagcatttttgaagaagccagttatttagtagaatgtacatcaatttgaatttatttaatgtttctttatgattagattcaggttatgtatttttggcagaaataccacaaaaatgatgttgtagccttcttagtgcattataggaaagggaccaaatgttttctgaacgtttatcatagtcctggaatcatgctggatactttttatttttaattgtggtaaaatacacataacataaaatttaccatcttaactgttttaaaatgtatagtttagtagtactgaaatacaatcacattgttgtgcaaccgacctccagggctcttttaattttgcaaaactgaaactttatacctgttaaacaattcttcatttctgcctaccctattcccctggcaactacccttctgccttctgtctctatgaatttgactaatctaggaacttcatgtaaatggaatcatacaatatttgtctttttgtgactggttatttcacttagcataatgtcctcaaggttcatgcatgttgtagcatgtatcagaatttcctttctttataaggctgaataatattccattgtatgtatataccacattttgtttattcattcatccattggtagatacttaaattgcttccaccttttggcacctgtgaataatgttgataggaatatgagtgtacaagtatctctttcagatcctgctttcaattcttttgggtatatattcagaagcggagttgctggatcatattgtaattctatttttaatattttgtggaatctccatactgttttccatagtgagtgcaccatcttacattttcaccaacagtgtacaggagtttcacatgggctgggcgcggtggctcatgcctgtaatcccagcactttgggagactgaggtgggcggatcatgaggttaggagtttgagaccagcctggccaacatgatgaatccctgtctctattaaaaatataaaaattagctaggcatggtgatgcgcacctgtaatcccagctacttgggggttgaggcaggagaatcgcttgaacctgggaggcagaggttgtagtgagccgagattgtatcattgcactccagcctgggtgacagagcaagactgtctcaaaaaaaaaaaaaaaaaaaaagagtttcacatgctggatacctttaataattttcaattaagctctacagactttttttttttttttttgagatggagttttgctcttgttgaccaggctggagtgcaatggcatgatcttggctcaccgcaacctcagcctcctgggttcaagcgattctcctgcctcagcctccagagtagctgggattacaggcatgtgccaccatgcttggctaattttgtatttttagtagagacaggatttctccatgttggtcaggctggtctctaactcccgaccccaggtgatccgtctgccttggcctaccaaagtgttgggattacaggcatgagccaccacgcctggccacagacatcctttttagtgaatactgttaccctatcccataagataaagaagatgaagaaactgaggctcagaaatttggtgcctttgcagggtcacacagctggtgactgagtgagatttgagtggagtgaggtactgtttccactattccatttagtttcccagaaggagtgataatcgtatgcctgatctcacaagattcctagaggtgatgagaatctgctgatttgagtgtatctgggtttttcctatgtaattttaaattgttttcttgtccgtgttagttcaacttcctgtccttctcagagtgtctaaaggatagtggactgaggagtcatttgagatacttactaaatgatgcagagctcagggtggtaactccctcagagattttggtttcgttttctgagatggggctttaagaatcttcatttaaaatactaataaaatagttgattctgatgttcacagtcctgatcatgctttaaggacatgttccattgtaaatatctctaatttcttcagtaatttttcatgggaaatggtttcagttctctcttcctcccaattattttatcttttttttttttgagacagggtgtcactctgtctcccaggctgaagtgcagtggcatgactatggctcacggtagcctttacctcctagactcaagcagtcctcccacctcagcctcccaagtagctgggactacaggtgtgcactaccacacctggctaatttttaaaatttctttgtagagatagggtcttgctatgtttctggggctggtcttgaactcctgggcctaagtgatcctcccgccttggcctcccaaagtgctgggagccagttattttttcatgtcaactggtagtttatggatttacttgcatttgctttggtttttttatgattttagttaatttattctcatattcaattcaaaacagcgaagtaaaggtactttcagttaactgaaaaatgctttttctgctttcttttttctaataagtgttggtagcactatggggatgttattatcattttatccctctttaagtttaaccctagacataatctttctgttgacttcttgtgtgtttttttgtttgtttgtttgttttttgagacggagtttcgctcttgttgcccaggctggagtgcaatggtgtgatcttggctcactgcaacctctgcctcccgagttcaagcgattctcctgcctcagcctcccgaattgctggaattacaggcatgtaccaccctgcctggcaaattttgtatttttagtagagacggggtttctccatgttggtcaggctggtcttgaactcccaacctcaggtgatctgcccacctcggcttcccaaagtgttaggattatgggtgtaagccaccgcgcccgggctttttttttttttttttttttttttttgagacaaagtctcgctcttgtcccccaggctggagtgcgatggtgcaatctcggctcactgcaacctctgcctcccgggttcaggcgattctcattgggttcaggcgattctcattcctcagccttccaagtagcttggattacaggcacatgccaccatgccctgctaatttttatatttttagtagagacagggtttgactcaaccctggtgggattgagtgggagtggaaggactgcttgagtccaacaggaccatattggccaggctggtctcgaactcctgacctcagctgatccgcccaccttggcctcccaaagtgctgggattacaggcgtgagccaccatgcctgacccttttttttgagacagggtctcactctgtcactcaggctggagtgcaatggcgtgatcttggctcactgcaacctccacctcccgagttcaagcgattctcctgcctcagcctcccgaattgctggaattataggcatgtaccacgccgcctggcaaattttgtatttttagtagagacggggtttctccatgttggtcaggctggtcttgaactcccaacctcaggtgatctgcccgccttggcttcctaaagtgttaggattatgggtgtgagccactgcgcccagccattatttatttatttatttttttgagacgaagtcttgctcttgtcccccaggctggagtgcaatggcctcctgagtagctggaattacagacatgcaccaccacacctggctaatttttttatctttttagtagagacagggtttcaccatgttggccctgctggtcttgaactccctacttcaggtgatctgcctaccttgcttcccaaagtgtggattacaggcatgaaccaccatgtagttcactctttcctgtgcaacctctttgctttgaattttttttgagatggagtctcgctctgttgcccaggctggagtgccatggtgtgatctcagctcacttcaacctctacctcccgggttcaagcaattctcctgcctcagcctcccatgtagctggtatcacaggtgtccactaccacacccggccaaattttgtatttttagtagagatggagttttaccatgttgaccaggctggtcttgaactcctgacctcaggtgggaggtggctggttttggcctcccaaagtgctgggattataggtgtgagccactgcacctgatctgctttgaatttaataccatgaatgagtgtcataccatcatgtctcaatttatagattaaatatttgacatctcggaggcgtaaatggtcaatttctgacctcctgcaacttggaagagtaatcaagtgtttgcttcaaagcaaattgttcacttgagacgtcatagtagagtcctaataatttgatatgatttggtagacaggactaggggttagatttggcttatctagtataagtactacccagatatgtgatgctgctcaagttattttaactgttttctctttcttttctttctttgttttcttccttcctttccttctttcctctttttctttttttgctcttaaaacttgcctaagcctgggaggcaaatgttgcagtgagctgagattgtgccactgcaccccagcctaggcaacagagtgagaccctgtctctaaaaaaaaaaaaaaaaaatttcctaaggctcaaatgagagtaagagctgtgacttctcctcagctaatggtggcatcattactgactaaggccaaatactgcttgaacaaatagttactgcttaggactcatgggacacatggatatcacatataaaggttaagctcttttctgggattttgagatttgtaggactatttgtgctggtaggctaatttctagtgtctctctctctctctatgtatatatacatatatatttgaggtttgtaggactatttgtgctggtaggctaatttctagtctatatgtatatataatatatacatatgtataggtgtgtatataatatatacatatgtataggtgtgtatataatatatacatatgtataggtgtgtatataatatatacatatgtataggtgtgtatataatatatacatatgtataggtgtgtgtatatatatacatatgtataggtgtgtatataatatatacatatgtataggtgtgtatatatatacatatgtataggtgtgtatataataaatacatatgtataggtgtgtatataatatataatatatacatatgtataggtgtgtatataatatataatatatacatatgtataggtgtgtatataatatatacatatgtataggtgtatatatggacatatatgtatatatggacacatatgtatatgtatatatggacatatatatgtatacatgtatgcatatatgtatatatggacatgcatgcatatatatgtacatatatacatatataatatatataataaataatctatataatatatataaataaatgatatatatttttagatggagtttcactgtgtcgcccaggctggagtacagtggcgtgatctcggctcactgcaacctccgactcttggattcaagcgattctcctgcctcagccttccgagtagctgggactgtgggcatgcgccaccatgcccggctaatttttgtagttttaggagagacggggtttcaccatgttggccaggctagtctcaaactcctgacctcaggtgatccacccgtcttggcctcccaaagtgctgggattacaggcatgagccaccaggcccggccacctctacatttgaaaagtcaatcattgaactttattaaagttctctacatagaattttatagtacaacttagtcatacttgctgattatcaataaattttaagacatcctcatgcctgtttacataatcttcatatgtaacctaaaccttcagtagcactgtagaattgtctcatcttcttatcatgtccaatccagcccagcctactggaaattattttctgttaagtgttagagtccagctggaggagagtgcattaaattggaagtcaggaggtcttcctgggtggcctccaattgactgggtgactttaggcaagcctccttagcttcaggttctctgactatagaataagcaggttgaaatggttgatatctgagttcttttttagctttgcgacaattctgtgattggatcaagagtcctaccattctgaaatatgtttgaatttttgtttcagtaatttttctttttccctctttctctcaggcagatgtttggagcatgggcatactgttatatgttcttatgtgtggatttctaccatttgatgatgataatgtaatggctttatacaagaagattatggtgagtattacaaggcatagaatttcaatgtagaacttttctataccgaatagtatatgctttcattcataaatgtacaaaaacaggcataaaagttattctctgctgttagaagtcaaaatcttagttattctttgggagtggttaaggagtgggcttctgttctgtttcttaatctgggagttggctacacttgtatacagtagtttccccttgtcagcagttttgctttctgcggtcttagttgcccatggtcaactgcggtctgaaaattggtgagtttgtgtaatacagtaagatattttgagagaaagaggcacattcaggccgggcgcggtggctcacgcctgtaatcccagcactttgggaggctgagactggcagatcacgaggtcaggagatcgagaccatcctggctaacgtggtgaaaccccgtctctactaaaaatacaaaaaattagccgggcatggtggcgggtgcctgtagtcccagctactcgggaggctgaggcaggagaatggggtgaacccaggaggtggagcttgcagagccgagattacgccactgcactccagcctgggcgacagagcaagactctgtctcaaaaaaaaaaaaaaaaaaaaaaaaaaggcacattcacataacatttttaacagtatattgttataattattctattttattatgttattgttaatctcttattctgcctaatgtataaattaaactttatcaaacttgtgtatatatatatatatatggaaagaaacatagcacatatagggttcattgctatccgtggtttccggcatccatgggtgtcttggaaagtattacctgctgataagggggactacagcattcagtttttgaaaactcattgaggtgtactcttacgttatacaaacttcttttttttttttggagatggagttttgctcttgttgcccaggctagagtgcaatggtgcgatcttggctcaccgcaacctctgcttcccaggttcaagcgattctcctgtctcagcctccctagtagctgggattacaggcatgtgccaccacgcccggctaattttttgtatttttagtagagtcggggtttctccatgttggtcaggctggtctcgaactcccgacctcaggtgatttgcctgcctcggcctcccaaagtgctgggattacaggcatgagccaccgcacccggcccaatatataaacttctatacatatacttcttcaatgaaaagcttaacaaaataaaaacagaatgctgtgtcaaatcacattttccttttgacttataaaataagaacctcctcttttctttttttggaagataaaattttggcttcaggttataataaaaccacaattgagatcacctactgtaagctttgttaaaatcctatatatcagagacagagagtagataagttgttgcttggggttaggggtggagagtgactgcctgtgagtatgggttttctttttgggatgatgaaaacattctggaattagaaagaggtgatgattacacaactttgtgaatatactaaaatctacactttaaaagggtaaatattatggtatgtgaattatgttcagttaaaaaatcaaaaaaatcacaggaaggaaaataggaaaattatttcaaagcaaactaacaaaagaagacatgtaaagaggaagaaagaacatcttgtgttccatagcaaactgaggtcagactagcagagcagcatctctgaatgcttcactctctttcttcttcttttttttttttttttttgagataaggtcttgctgtgtcacccaggctgaagtgcaggagtgcgatcatggctcactgtagccttgaccctctgggctcaagtggtcctcccacctcaacctccccactagctgggaccacaggcactgcaccactacatccggctaattaaaaaaatttttttgtagagataggatcttccctatgttacccaggctggtctcaaactcctgtgctcaagtgatcctcccacctcagccttgcaaagtgctgagattacaggtgtgagctactgtgcctggccttctgaatgcttcttgaatccaattctgtttaacaaatatttcctgaatttctgctttatataagatgctgaaaggcatagaaaagatctatgaaactttattattgtccaccagggcctgatctcttgttggagacaggtataagctatctaaaaacggcaaagggtgaggaatgccatattataacagagtgtaaatgaaattaatacaggagttggggtggctctgggagggcatcttagaggaagtgaggtttgagcaggtctttaaaagaagggtggaagtgtttcagaaagggatgtgggcaagagcattcctgatagtacaggtagcatgagcaaaggcatagaagtgggagagacgtggggaggaatgggcagttttttgtagctggaccattggatctctaacaattagatgaggagactacctaaagcaactctcacttctaggaagtagcatacagtgttgaaagtggtagacccagttggcttgttgcccactccatagaacaccaagtctaaggacactgagttcaatcttcaacttttatttgacttatagtttttcctatatcccaccttggaagattctttaaagttgattcccaagcttcagagaatagctttggaaagagatggaattgcaatagttccaactccttgaagactgaggagctctgattctgcaggatcaaaaagaagcagtgtgagcggtagctattaacaccgctttggggacccatgtgtgtccaggcttctccttgtgaaggggagataaatgaggcagtgggctggaggccggcctcctagagcctgctgctgtagccaagacagcttgttttcctcctgtcacttcttgagctttcttgaactttgctgggtagcactcgttgctttggcttctgcatgctgactgtggcagcagttcctgactccatagagccatacctgactgcatccacatcaggatacaggggagagtagggttaggatctttttgtggctttagctccagtcaacagaagtggtctttgggcagctcagtaacatttatccagttatacttttacaaaatattaggttggcctcttgaattcttccctctttttgctacttttttctgtaaagtagggctgtgttttttattctgaaataattgtattctagtataggttgagtatccctaatctgaaaatccaaaatttgaaatgctccaaaatttgacactttttgagtgctgagttgatgctcaaaggaaatgcttactggagcatttcaggttttggattttcggatttggcatattcagtcagtaagcgtataatgcacatattccaaagcctgaaatctgaaacacttctgttcccaagcatttgggtaagggatactcggcttgtattataagctgctaggatattttaccctattcttgttttgggaactccatcccaaagaaataagctgacagatttctccaaagtgaactagaattgaatctgctagctggtgtaacacggaatattacacctcctagacttctagaaagactgtggaaacagataatggtagaatttcactgttggaaagcacctgggaaatcatgttttctgacccttgttgcttgttttatatttaatcctcactaaaatgtctcctgccttggctatgtccatgtactctctctcagggtggggaaagttagctaatggatttaattcttcctaaccatagttgcacattagaattgcttggggtgctttaaagagtattggttccacccccagagcaattaaatcagaatatcattgaggtttttgaaattcagaagcttcagaatctctactttctatctgtggactttggtaaattatttagcctctctgtgtcttagtttctttgtctgtaaaaatggatgaaataacacggcatagggttgttgtgaagattaaatgagttaatccatgaaaagcatttagagtggtgctcaataaatgtagctattattattattattattattattattattattattttgagatggcgtctcgtgctgttgcccaggctagagtgcagtggttagattcggctcactgcaccctccacctcccaggttcaagcaattcttctgcctcagccttccaagtagctgggactacaggtgggcaccactatgcctggctaatttttgtacttttagtagagacggggtttcaccatattggtcaggctggtcttgaactcctcacctcgtgatctgcgctcctctgcctcccaaagtgctgggattataggtgtgagccactgtgcctggctgctattattgttttatttttgtttgtttgttttgtttttttctgtgacagagtctcgctctgtcacccaggctggagtgcaatggcgcgatcttagctcattgcaacctccgcctcctcagttcaagcgattctcttgcctcagcctcctgagtagctgggattacaatcatgcgccaccgtgcctggctaatttttgtagttttagtagggaaggggttttgccatgttggccaagctggtctcgaactcctgacctcaagtgatccaccaccttggccttccaaaatgctgggattacaggcatgagccaccacatctggcaattatttttgagacaaagccttgctctgttgcccaggctggagtgcagtggcgccatcttggctcactgcaagctctgcctcctgggttcaagcaattctcctgcctcagcctcccaagtagctgggattacaggcgagtgccaccaagctcagctaattttgtatgtttagtagagatgaggtttcaccatgttggccaggctggtctcgaactgacctcaagtgatcctcctgccttggcctcccaaagaggctgggattacatgcatttctaaatgagatttgccagtattttgtccaggacttaaaattggctcaaaaattaatgtgtacttttttgggaactatctttgtatgtttggttttggtttcatgatttgtattagccccataaagttacattggggagtattctttcttttacttttcttggggagagcttgacaatttttttgtggatgttttgtagaatgtgcttggaagttcaactccacctgtgccttctttatggaaagatttttaactaacatataacatttaactaacatagatcataacatttcatttgaagctctctagtggcctctttctcatctcgagtacaagccagtgtttgccctgtgtgctgtgggttttcccccgtgtaatgtggcctcccatcacctcactgccctcatggtctactccctgcctcacttgtgccacccacattgtcctccttgttgtttcttttttccccttttcctggaacacgctaaggtgtgcctgcctcagggcatttgtacttaccctttcacctgaaatggttttctcccggagagatgctttgttccctcccttctttcaggtctctgttcaaatgttctctaatcagaaagacaaccacttgtttatgtgttcatttgtttgttcatttactcatttattcgatgtcatttcaccttagggaggagtaaaatagttaccaaacacctaatatgtgccaggcacttttctagatgtgtggggtatatctgtgaataaaacagatgaaagatccctgtcctcgtggagtttatcttctagtagtggggatgtagagaaagacaataagcataacaagtaaattttactaaaagatgatatgtactttggaaaagagaaaaaaattgagtaggatgaagaggaatcaggagtacagatgggggagttgtggaggaaagggccagtaggttgcatgattaaataaggtggtcaggataaacttcatggaggcgagatgtaaggagacttgagggatgtgagagtgtcaagtggatatctaggagaaaaatatttccggcagagggaacagctagagcaaagactgggaggtaggaacatgcctggtgttgtcaagggagggtgagagggccagtgcagcctgagtttagcaagtgaggagggcagtaggaaaggaaaccttgggaacaggagtcaagctgctttgggctgggtaggctctcataaggactttggcattttttctacgtgaaatggggagccattggaggcttttgaggacatgatttggtttagtttttaacaggatcacactggctgctatgtggagatgactgtaggaagtgaagagaaccagggcatctggtcaggaggatattgtaatgattcagataagagatggtggcagtggaggtggtaaaaagtgggtagatactagatgtctttttttttttttttgagacagagtctcgccctgtcgtccaggctggagtgcagtggtgcgtcttggctcactgcaacctccgcctcctgggttcaagtgattctcctgcctcaccctcctgagtagctaggattataggtccttgccaccatgcgtggctaagttttgtagttttagtagagatggggtttcgccatgttggccatgttggtcttgaactcctgactcaggtgattcacctgcctcggcctcccaaggtgctgggattacaggtgtgagccactgcttctggcctggatgtcttttttaaaaaattatttttgggttttttttttttttttttaatttatttttttattgataattcttgggtgtttctcacagagggggatttggcagggtcatgggacaatagtggagggaaggtcagcagataaacaagtgaacaaaggtctctggttttcctaggcagaggaccctgcggccttccgcagtgtttgtgtccctgattacttgagattagggattggtgatgactcttaacgagcatgctgccttcaagcatctgtttaacaaagcacatcttgcaccgcccttaatccatttaaccctgagtggacacagcacatgtttcagagagcacagggttgggggtaaggtcacagatcaacaggatcccaaggcagaggaatttttcttagtgcagaacaaaatgaaaagtctcccatgtcttctactttctacacagacacagcaaccatccgatttctcaatcttttccccacctttcccgcctttctattccacaaagcccccattgtcatcctggcccgttctcaatgagctgttgggcacacctcccagacggggtggtggccgggcagaggggctcctcacttcccagtaggggcggccgggcagaggcgcccctcacctcccggacggggcagctggccgggcgggggggctgaccccccccccacctccctcccggacggggcggctggccgggcagaggggctcctcacttcccagtaggggcggccgggcagaggcgcccctcacctcccggacggggcggctggccgggcggggggctgacccccccacctccctcccagacggcacggctggccaggcggggggctgacccccccacctccctcccagacggcacggctggccaggcggggggctgatccccccacctccctcccggatggggcggctggccgggcggggggctgacccccccacctccctcccggtcggcacggctggccgggcggggggctgacccccccacctccctcccggacggcacggctggccaggcggggggctgacccccccacctccctcccggatggggcggctggcctggcgggggctgacccccccccacctccctcccggacggggtggctgccgggcggagacgctcctcacttcccagatggggtggctgctgggcggagaggctcctcacttctcagacggggtggttgccaggcagagggtctcctcacttctcagacggggcggccgggcagagacgctcctcacctcccagacggggtctcggccgggcagaggcgctcctcacatcccagatggggcggcggggcagaggcgctccccacatctcagacgatgggcggctgggcagagacgctcctcacttcctagatgtgatggcggctgggaagaggcgctcctcacttcctagatgggatggcggccgggcggagacgctcctcactttccagactgggcagccaggcagaggggctcctcacatcccagacgatgggcagccaggcagagacactcctcacttcccagacggggtggcggccaggcagaggctgcaatctcggcactttgggaggccaaggcaggcggctgctccttgccctcgggccccgcggggcccgtccgctcctccagccgctgcttcccgggcggcgctcgccggcgcggtggcaaagaaaaaaattatttttgtattaacaaaattaaaagtaaaagtagacctgtatatacaaagggtaaagtaaaattgaccctttgtatatacagtaaaattgaccctttgtatatacaggtctatgaattctaacacatatatagattcatataaccattgccacagtcagaatgtagaacagtctggatgtcttttgaaggcatagctaacatgatttgtgcatggattggatgaggggagtaacccgagtagctagaaagttggaaaattattaaaggtatctagcatgtcaaactcttttttttttttttttttttaaggcagagccttactttgtcacccaggctggagtgcagtagtgtgatctcggctcactgcaacctctacctcccaggttcaagcgattcttctgcctcagcctcctgaatagctgggattacaggctcccaccaccgcgcctagctaatttttgtagttttagcagagatggggtttcaccatgttggacaggcttgtctcgaactcctgaccttaggtgatcagcctgcctcagcctcccaagtgttgggattacaggcgtgagccaccgcgcctggccataaaacctgttttcttagaggcaatcattgctatcacgtttatcagatttttacgtatttttttcagacattagcctgcatatgtaaggaattttatatttatatattttctctttctgctacccccttcccagttttttttttttttttttttacacagatggtagcataccataaacactgttctgcactttgttttcctcccttagcagtgtgtcttggaaatcatagcacttcatacccacctcagagcctcttcattctttttatgactgcatagaattgcattgtatgcatgtaccataatttatttaaccagtcctaggttaatggacatttaagtaatttccaagtagtcatttgtacattgtgaatataataaatctgtaagaaaatttctagaacagttggtgggtcaaagatatgtgaattagtaattttgatagatattgccaaattgcttcccagtaaagtcctattggtttatgcaactaccaacagtagcataataatgccagtttctccatacccccccaccaatacagtgtatcactgtttttgattgttatgtttaagacttatttttgctgtgcaggaatttttagtttttatttagtgaaattcatcaatctttttctttttttctttctttttttttttagagacagggtcttgctctgtcacccaggctggagtgcagtggtgcagtcatagttcattgcaacctcaatttcctgggctcaagtgatcctccagcctcagcctcctgagtagctggaactacaggcgtgcgctaccacacttggctaatattttttgtagagataaggtcttgctatattgctgaggcttgtctctggcctcaagtgatcctcccaccttggcctctcaaaatgttgggattataggcatgagccactgtgcccagcctgtcaattttttattgtcatatttggaagggctttttgactttattttttaaaatatctgtgttttcttctagtgtttttatggtttcactttttaaaaatgtttaaatgtttgattcatctagaatttgctttagtatgttttcttgactttaaacatcataaaaaaaactgtagagatttgctttcacattctggattctggattttaaagatctaattgtagaccaggtgtggtggctcgtgcctgtagtcccagcactttggggggctgagttagggacatggcttgaggccagaagtttgagaccagcctgggcaacatcgtgagactccgtctctacaaaaaataaaaaaaaaattagctgggcatggtggcatttgtctttagtcctagctactcaggagactgaggtgggaggattgcttgagcctaggagttcaacgctgcagtgagctatgattgcaccattgcattccagcccaggccatagactccatgtctttaaaaaaaaaaaaagggcccagtggctcacttctgtaatcccagcactttgggaagctgaggtgggcagatcacttgaggccaggagtagcctggccaacatggtgaaaccccatctctactaaaaatacaagaattttctggtcgtggtggtgcatgcctgtaatcccagctactttggaggctgaggcatgagaatcatttgaacctgggaggcagaggttgcagtgagctgagattgcgccactgcactccagcctgggtgacagacagaggctcctcaaaaaaaaaaaaaaaagaaaaagaaaattgaatcatgatgtcaacgtagccatatatacttaagatttgaggttcatttttaacaatagtgtatataagtccttatttaaaatagtcttgctaatttcaagttttgcagacaacttgttaaatctaattaggtatttttttaactttgtgttttggttgatatcctaaaagtagaagtgtcagctccattactgtttgcttgtattcatagtcttcaatctgtggtttctttgcaagagttttgagccacttgtctattcaatgaggatttagcttcattaaaccgtatactataatctgtaaatccatgtaactgtgctcctgtaaagcactgctttgcaataccattctttcttaagagtgtctcatagtgtaggttatatagggactagtgagcgtactagtgccgatccatgtactaaatattaacaaagctcaatttcttatttattagatagatagaaaattaatataaatctttgaagaccgccagtcaagaatgagtgaatggtcaactctaagtatttttttttttttttttgagacggagtcttgctctgttgtccaggctggagtgcagtggcacgatctcagctcactgcaacctccgcctcccaggttcaagcaattctcctgcctcagcctcccaagtagctgggattacaggcgtgtaccactacacctggctaatttttgtatttttagtagagacagtgtttcaccatgttggtcaggctggtcttgaactcctgacctcaaatgattcacctgcctcagcctctcaaaagtgctgagattacaggcatgagccactgtgctggcctaactctacgtattctttaggcagtcccttgataagtataatacctctcagccaggttattgagtgtcagtcaattagggattattctacctggaaattacttgaagttatgggtattctgtgatgctgaataagaacaagaggggccatgagtataactggggctaggattggcattcttctgtaaacattgagccttctaaccatacttacttcttggttatgagatactatgccataaaggataactagagtcattttatccagctaaaattttgcatattcaccttgaccataaaaagtctcaataaagatgtatgatgtgtaaaacaaaatgaggtattatgtagatttaaaaaaaaatggaatgataaagttttcagtgagttttgaaccccccaaaaatatgtagagagtgggggagatgccttctgcaggccaggtctaagtgtctgtaggtgtccagaaatggagttctgtgtttgagttgtgctgaatgaaatctcttctgtctagagcatctgcagcagtcttttggtggtttaattctttctgcttttttctctacttccttgtttcccccctccaaatggatagagctttctgaagtgtgtgtgttgcatatctttgtggctattgcacatggttgatcagaaaaaataaaatgtttgctggcgtgcatattctcatccttttgtcacaaaagtaatacttaacatgcatgagttttgttacttaccaggctgtgctctaaatgaggtggttgctattattgtcttcctcttacagatgaagaaatgaagggacagagaccttaaataacttattcagggtcttatagctagtgagtagcagagctgggatttgaaccctagcagtcaagctggcagcccattcttataaccacaatgaaatattgtttctcagctctgtagttgctagtcacctaagaatcacagatgcctagaggaagaaggatcccctcccaagcatctttttatgcttattaatttgggaaatttcccagacatcccatcttttctgatttactaaggctacaagttagttctcccaattcatttaggtattactgtgcataggctttcccacgcattttaggtgtcaccccgcaaggatacttactggtccttgtttccttcatcagcagcattagagcattgcagtaatcagttattttcaagatccattccagctctgagtagctataagttctttgacttctgtttcttcacattcaatttttcttgtttcagcctagcattctcttcctttttttttttttttttttgagatggagtctcgctctgtctcccaggctggagtgcagtggcgtgattattggctcactgcaacctctgcctcctgggttcaagcgattctcctgcctcagcctccagagtagctgggactacaggtgctcaccaccacacccagctaatttttgtatttttagtagagacggggtttcaccatattggccaggctggtctcgaactcctgaccttgtgatccgcctgccttggcctcctaaagtgctgggattacagccatgagccaccgcacccagctgcattcccttcttttgagattttgaatcttgattctgcactcatgtagtaacagctgtccctgccagcattgcacctgccaacatttgcacatttcttaaatatccctaaactaagttgttcattaaaaaactgaatagaggctgggcgcagtggctcacgcctgcaatcccagcactttgggagactgaggtgggcgaatcacgaggtcaggagctcgaaatcagcctggccaacacggtgaaaccccatctctactaaaaatacaaaaaaatttagccgggcatagtggtgcatgcctgtaatcctaggtactcaggaggctgaagcaggagaattgcttgaacctgggaggcggaggttgccatgaggtgagatcacgcctctgccctccagtctgaatgacagagtgagactctgtctcagggaaaaaaaaaaaaaaaaaaaaaaaaaaaaaaaaaaaaaaaaaacttgagtagaacagaaccactccctaagtgttccgagtattggtttttagttttattctgtttcagctatgcttaactaagattttgtagacttacccacaaagataagtaactgttattttacttacctaccacacccagctaattttcgttattatacttcttttagaccaagaaactaaagcacagcaaggttaaatagcttgtataaggtcacacagctagtaagaggtagatcctggatttgaacctagccaatttgttttcagagcctttcttaggaaacagggccagagagactgaataccttaccctgttaataccttactgaaatggaactattcatggtgatcctaatttattgacttaactctaacctttgctatatttttacctgtctggaccttaatcctctatgctgtttatttgtcttcatttgttgttactgcaagttcacattcatatggcagccatggaattcatactattatcagtatattgtttcatcaataaaaggtgaatgtaccaacatacaaacttcagtgttttctacttttatttatttgaatgcactagtagatcctagattaatcctttgagggagagagcttaccttaaaataataaaaaagtatatcctaatagtatatgtgagattcaagttctgatatttttgaaaaatcaaatatctttgcagtggaatgaatatggtagaaaatgtctaattcttgttcagtggagatttggccttcctaattaatagtatttactaatacttgtatattctttgtttctcctactctgaatttcattttttagtttttcatgtatttgcaagttgaaaattgattcaaattaggacttttatgcattattgtggaatttaatttcacacattatagattttgaaatttattgtaatcttggctcagaactattgttccgagtcgcagtgtaatacagtctgctggttgaatctaattaaggtgtcgtatcacttgcatgcagtatgtatctttgcctagaatgttctaaaattcctcacttgggaataacactttcctcagttcttggtttgattgaaaaacccagcaatatttgacgcaccgtatgtaactcttgtttaaaaggcagacttcgtttatcttttgcatttgttgactattttaaccaaaatgctcaactgcactttctagcatgattactaatggcttgagtattaatcttattaatgttacctatattcatttgtcatcactgcattcaaagacaagcacgagtgtactccagctgtggtatacaaatattagggaagtataaataatttagcaattgaaaattgagtagtttgaaaataaaattgctgcctaacaattacaatttataattttaaggaaaatgagcaagttgtctctttatgaaattatatttttacaattacggagtttactacagcattatgattatgtattggtgagatggcctgcctctcttagaacagtgtgaaaaacaatttcaagccactggaattcccaggattattttgcttagtccatagatcttttctccctctcttcacttggattctcccactgttatctgtttcttgctctcctttgcaagttaattgtcccttaaataaacaaacacaaattctttaaagaatagcagaaacaagggtcctatctctgaccattttttgctctgtaacagtgtttctcaacattaacactattggcatttggaccacataattctttgttgtaggggactgtcatgcattgtaggatgtttagcagcatccattacctttacccactaattgctaggggtaatctccaagtagtgacaattcagaatgtttccatacactaccagatgtccccttgtaggacaaatcatccccagttgagcaccagtgccctacaatattgaacaagtacttaatctccctggctgacagttggtttctccatttgtataatgtggttaatagtccctgcctactacagagggtaaaatatatgtacaagtgttttgcgcattttaaagcacggtgtacaaataagagatttggttaagcctggcagcagagctcatttttggactctattttggccagtatttcagcacagagaatgaagttgagaatgtcaggacatggtaatgagtcacaggccttatgacccacttgtggatgatactctacagaggtgttctgcccaaataggggaattggatggggacattgcaggaggtgatgtgaacagggcttgcctagacgatgtgtaccttaccagacaatcctgagattctgagatagctgcagtggggcagtgctccattgggaaggcctatgacattcctcagaatgcctttagcctttcttgctgcactgagtatttagcacttttggatacaaggcttttggccaatgtgtccatctctggccctcaaaaaaggaatactactttttgaatattcctatctcctgtttatttcagattcaatacatatttattgtctcttacatgcaaggcagtatgccgagtgctttcacatatattctgttggtttataatcctgtaagtggcattagttgtatcgcagataataataatggtagtaatagtatcagcagcagcagtcgaagctaacatttatcaagctcttactgtgtccatggtactgtgctaaatgctttatgtatactaaatcattgaaccctagcaaaatttctatgcagtaggtatcgttattatacttcttttttttttttttttttgagatggagtctcgctctgtcgcccaggctggagtgcagtggcgtgatctcggctcactgtaacctccaccttccgggttcaagtgattcttctgccttagcctcccaagtagctgagactacaggcacgtgccaccacacccagctaatttttgttgttatacttctttttttagatgaagaaagtaaagcacagcaaggctaaatagcttgtataaggtcatacagctagtaagaggtagatcctggatttgaacctagccaatttgttttcagagcctttcttaggaaacagggccagagagattgaataactcttacaagcccatggagccagtaagaggcggaactgggattcaaatataatatatgactccaatccattcctgttccaatgtgccaaacaccacacttctcattcacttgttttctctgcttctttctggataggattgcttccatggtgccagcttatagcaaagcacaggggaatctattaaaagatactttaagaattcaaaataggttgataaaaaggggtgataaaaaggcaaagaggaatttggaatcagtatggtagagctctctttatttagtactttggtctgagtatttatttttacatttggtttctgtggagtactcctacttttagttaagagtacttttcagaattgaaaggcataatgtctcctattatgatagtttcagaatttaaaggcataatgtcttttttattatgatagatctggttatgggcctgttatttgtgtgttggagcagaccagaaagggctgaaacctggaatcagacttgtccttgaggtggacagatgctggtatgggggaggtgatgtgaagcagctaaaccctcatagatagtgtatgagtttcctagggttgttgtaacaaaatactggagagtgatgggttaaaacaacagaaatccattcttgtgcagttggagggatactgttcaacccagtacagatagtgtccagagagtaagcagcaaacggctttgcaaacagcagagggaagaccacccagagtacagggaatgaagctgatagaggacactctaggagcaggctgtgatcagagactcaggcagctcacggccttttgatcagcacataggaagctctttgttccaagctgatctccactctctatgggaccctggcaagagcaagctgaaatatttgagaccgggcaaataagcagtttgccaagaaagagaacaaggcaagtcctcaggactgggatcacgaaaagcctgggtctcaggaataaagtaaagctcagatacgagagtggggccaagtaggtcagggccagtcatgcagcaactgtgactcactactgctgagtcccagagagttggctagagcatctaaaacccctccttcccagggataggcatggagcccaggcagcagtgagccttcagattggggtccagttggctgtagatgaagcgtggtaggggagaaataaattcaaggcttcattgctgtagttcaaaaacaaactttgagccagctaggtggctcatgcctgtaattccagcactttgggaggctgaggcgggtggatcacctgaggccaggagttcaagaccagcctggccaacatgatgagaccctgtctctactaaaaatgcaaaaattagccagtcatggtggtgcatgtctgtaatcccagctactcagtaggctgaggcagaagaatggcttgaaccctggaggcagaggttgcagtgagcgaagattgtgccgtgagacttcatctcaaaaaaaaaaagaaaaaattatgaagggttacattcatcgcagaattgtttatgatataattaggaattggtctatgacaaactccagagggcctccaaaatgaatgaaagacaaaatgcactgaataagggttctaggttagaaatataagtgcaagtgtggcaggccaggtctcactaatgcaggcctccattacaactgtcccagcactgactgagtggctaggttatacactaaaagctgattgagccagtgcccttataccaaggctggaatgtaacaaagagcccaccaagagttttgcctaggcttttccagggccttgaagcatgacaagataacgaaggaattcttctcaggacccttttaggatgaaacaaattttttgggggtctgaagaaagcacaaacaatttctttggagtctaaaggaactccccaaacctttatgatttagcaggatacaagataagggtaatcaccctagcacctagacccatttagattaagtaaacttactgaggctccagaaggtcttcgggactcagaccttagttatagcttaaaagaagttagtcacttacgtttttagataaatgcacacttacacgtagacatatagcttagaaggtgtataggctctggagaactttgtaattttgagttggtctggtgataatttccaggccttttccctgtggctggttacagaaataaaaactcttcctccccagttcatctatatcttgttattgggcctcaagaaatagcagcccaagaggccgggcatggtggctcacggctgtaatcccagcactttgggaggctgaggcgggcggatcacctgaggtcagtagttcgagatcagcctgaccaacatggtgaaaccctatctctactaaaaatacaaaaaattagctgggggtggtggcaggcacccgtaatcccagctactctgcaggctgaggcaggagaattgcttgaacccgggaggcagaggctgcagtgagccaagatcactcattgcattccagcctgggcaacaagagtgaaactccatctcaagaagaaaaaaaaaaaaaaaaagaaaagaagtagcagcctgaccctcagtttagtctgggaacacaaagaagacaaggacaagcacaagcgcaaacacacacacacacacacacacacacacacacacacgccaactgtaaatgaatgcggctagaaggatggaggcagataggtgaggaagccattgacttgtaccagcattggggttctctgttcttatgaactgtctaggatataattcttacagaatcagtccaccttaaaggtgaagtggaaaacagacaggtatggatcactcagagtcctaagatgttatggcaggctggctttcaattatgttaaagaagtaatgaaagtcccagagaagcattgtcaaacaatgaatctaaaaagaaagggtcaaaaatcagcctctctgatgagagtagatggactgacctacaagtgtttcctaggaagaacagtagctttcattttacaaatgacttttaatattattacatttttattccctttatcgaaagcactcagtattacccagagaacccattctctctctctctctttttttttttttttttggagacaagagttttgctcttgttgcccaggctggagtgcaatggcgcgatctcggctcactgcaacctctgcctctctggttccagtgattctcctgcctcagcctcctgagtagctgggaattataagtgcccgccaccacacctggctaattttgtatttttagtagagacggggtttctccacattggtcaggctggtctcaaacttccgacctcaggtgatccgcccatctcagcctcccaaagtgctgggattacaggcgtgagccactgtgcccagcctgagagcccattcttatttatcccttgccagggcaccttaacacttgccagagacagaaactgacaaagtcttttttgtttgttttgtttttgagacggagtttcactcttgttgcccaggctggagtactatggcacaatcttggctcactgcaacctccacctcccgggttcaagtgatttttctgcctcagcctcctgagtaggtgggattacagacatgcgccaccacgcctggctaatattttgtatttagtagagacggggtttcaccatgttggtcaggctggtctcaaactcctgacctcggccttccaaagtgctgggattacaggcatgagccactgtgcctggctcagagtttgtttttgaattgtagcaatgaagccttgaatttatttctccctaccaagcctcatgtatggccaactggaccccaacctgaaggctcactgctgcctgggctccatgcctatccctgggaaggaggggttttagatactctagccagctctctgggagtcagcagtagtcagtgacagttgcctgtgacctttggaaaaggctttttctcaatttgttgttaactttgttaatgaattttttttttttgagacggaatcttgctgtattggcaggctggagtgcagtggcgtaatctcagctcactgcgacctccacctcccggattcaagcaattctcctgcctcagcctcccgagtagctgggactacaggtgcgtgccaccacgcccggctaatttttgtatttttagtagagacggggtttcaccatgttggccaggatggtcttgatctcttgacctcgtgatccacctgcctcagcctcccaaagtgctgggattacaggcgtgagccaccacatccggccaatgatgttttgttatacagaaatatcaaacgttaattttgtcatatattactctttatagttgttggctttgctgtcatgtctagaaagattctaaaaataatcactcatactttctttaagtactcttatggttttgtattttcttttttttttttttttttgagacggagtctcgttctgtcgcccaggctagagtgctgcagtgacacgatctgggctcaccgcaacctccgcctcctgagttcaagcagttctcctgcctcagcctccctagtaggtgggactacaggtgcccgccaccatgcccagctaatttttgtatttttagtagaaacaaggtttccctgtgtcagccaggatggtcttgaactcctgacctcgtgatccacctgccttggcctcccaaagtgctgggattacaggtgtgagccaccacgcccagcctggttttgtattttcatttaatctgggtggaattaattttggtatgttctatgaattacagttcaatcaatttctctcaaataattaacctgttatcttagcatcattaaacaatgtgatttctgctgtgagaaactgttgtattgcttcctctgaattgggaaagaggatgtgtgtggtaagtgtgtaaagagatattctatcatgtattagcatttagccaagtccctgatcttttctttgatgacttggtggccataatttctgagtatactaggttgtatacatttgccttcttagtctcttttagtcctaaaagaggtatttaccttagaaagtggctttcactagttttcctcaaagattgtgaattctgttttgtggatgacctgtttttaaccatagcctatgtactgtcaccaaatatgcttttctgctgcttcattttgtcaactgataattgctctgaaattataaactaataattgtttcagcagtataaaaatagactacagtgtatacttactgtccatttaatactacagattccaaagctgtatgacatttttgttttctactgttatgttctttgtgctctagcccttctctgatatgtggataatttagaggcaatgatagtatttaatatgcccgattttttctttaaggcaagaaattgtttttttttttttttttttgtgatggagtctcgctctgtcacccaggttggagtgcagtggcacgatctcggctcactgcaacctccgtctcctgggttcaagtgattctcctgcctcagcctcctgagtagctgggattacaggtgcctgccaccacgactgactaatttttgtatttttagtagagacagtgtttcaccacgttggccaggctggtcttgaactcctgatctcaggtgatctgcccgctttgacctcccaaagtgctgggacttcaggtgtgagccaccacgcccagccaagaaattgattttttttagttaataatgtttaccaagtattgtagttgggtgaagtcttcaagcttaaaagtaaacctccagcatgttattacctaaggaatttgtgtcaaggctgattgaacctgaatctcttaaatgctttgtttttgtagagaggaaaatatgatgttcccaagtggctctctcccagtagcattctgcttcttcaacaaatgctgcaggtaaactttatttttaaataatagaagtctattgtaattgtttggttcaacttttaagatatctgtggtgctacatcatttcctattagcttgaaaaaaatcccactcatatctaccttgaaaatatcctctattagatcctttcttaattatgttgtaaacctagtttattttagacacctaccatatgttatagctggtatggtttttcttactttgcgaattttctgttttctctaactagttcttgttccactctcttttattccaaaattattgattgattgattgattgatggagatagagtctcactccttagaagaccctcaggttggagtgcagtggcgtgatcttggctcactgcaaccttcgccttctgggttcaagtgctttttctgcttctgccttccgagtaggtgggattacaggtgtgaaccaccatgcctggctaatttttgtatttttagtagagacagagttttcccatgttggccaggctggtctcgaactcctgacctcaaggtatctgcctgcctcagccttccaaagtgctgggattataggcgtgagcctctacacctggccccagctcttttttttttttttttttatttagatggagtctccctctgttgcccaggctggagtgcagtggcgtgatcttggctcactgcaacctttgcctcccaggttcaagtaattctcctgcctcagcctcctgagtagctagtactacaggcgtgtgccactatgcctggctagtttttgtatttttagtagagacgaggtttcactatgttagccaggctggtctcgaactcctgacctcacgttttctgcctgcctcgacctctcaaaatccaaagtgctgggattacaggtgtgagccactggcttttgtttttttgagacagagttttgctttgttgctcaggctggagtgcaacggtgcgatcttggctcaccacaacctccgcttcctgggttcccaggttcaagtggttctcgtgcctcagcctcccaagtagctgggattacaggcatgtgccaccattcctggccaatttttgtacttttagtagagatggggtttcaccatgttgtccaggctggtcttgaacttctgacctcaggtgatccacccgccttggcctcccaaagtactgggattacaggtgtgagccaccgcacccagcctggcctctttttttaaaaaaaaattttatagacagggttttactctgtcgcccaggctggagtgcagtcatatgatcttggcccactacagccttgacccccaggctcaagtgttagttctacttcagcctcccaagtaactgggaccactggtatacaccaccacacctgactaattttttgtgttctttctttagttttcttttttttttggttgtttttaaattttatttatcacttcattccttataattactttcagcaaactgtattttttgtagagatggggtttcgctacgttgcccaggctggtttcgaactcctgagctcaagcgttctgcctgtcttgatctcccaaagtgctgggattacaggtatgagccacggcatcccgccttttcccaactcttgctcattaagtatgttagtagatactgaataaatacttgaatgagttgatgtactattgaatgggccctgttacctagtgcagtggttctcaaacttcagcagatatcaaaattaccccgggcttgttaaaatacagattgctggcctccagccccagagtgtgtaattcaatagatctgaggcaggactgaaattttgcatttctaacaagctcccagaagatgctgatgctgcaggtcttggggccacactttgagaaccacagatttattggaatgagcctctgagggtgaaagataggagtgctgaagcctaggtaagcactctaccaattaatcaatgtatcacctaatctgatctataaaatgggggttctgagcctggcctcactgctatgtagtgttataaggacaaaatgagattgataggaaacactttgaaaatatgagtatcttcttagtgcaatttttttttcattatgtattcagaatatcttctggttttttcatctattaagtcatctccatcttttattcaaaatttacctcaggctcactcaccttgattaagtagggccagaccaccaaatctccgtaatgagattgaaaatgccttactctttcttctagactccaaaataacgttaatctttgttgattaatttttctctccttacatttgaaaattacaaatggaaaggtgtgcttttcaacttgttctgtgtgattgtaagctcattggaggtagagattgcatattcagtatgaatgccctgcattgtggctgcttgaatgtttaattggtgaatatttcccgtgaataggttttccagcaaaagactattacatcatacaatagattgaacttcacgaataatgtccataccaatgaagttcatgtttgttaaacatttatcttctaagcctgtgttggttgctatagttttcttgcctctgttgcctttttaaaagaatttcttccaaggccattttaaagtctttgacagcatttttgtgatgataaagtttacatctgttctgatgcatttttagttttcaggaggaaaggtgttctatgttctctatttgaaatgttaatctctagctactttttaatggccactaggtggacccaaagaaacggatttctatgaaaaatctattgaaccatccctggatcatgcaagattacaactatcctgttgagtggcaaagcaagaatcctgtaagtaaaatgaaatccagtagaatttttttttgactttgtgtggtctttgggtgaattcagaacctacaatgatgtggtctaaatatacaagaaaatatattaatcagattggtgtttgggagacttgtaacctaatggacagtggttccttaaccccatctgcaaatgagaattacctgggaccttaaaaagaaatgcctgctccccatcccagaacacttaatgggagtttttaaaagctcccaggtgtttctcatgtgcagtcagtcacagtgctctgggaatcttggacaagttacttaactttgcagaacctatttattcatctgtaaaaagtaggttaaaccagttctacttcccagagaagttatgagggtacagtagttctcaaactttttagtttgaggatccctttatactcttaatatttatttattcattaaaaactaatatgataaaactattgcatattaacacaaatatttttatgaagaataaccatttacaaaataaatttagcaaaaagaatgacattgttttacaactttgcaaatttctttaaagtctggcttaatagaagacacctgtatagccacctgcttctgtgttcagtctgttttgataggttgttttgattgaagccaaggaataaaatgcagcctcacacagatatgcaataggaaaaggaagaaaaattctaatagccattcagacagtttctgatagcccattaaaacttgacaaatggtagtttcttaaagggtaattgcatgtggaatctgaagccatatcaatgaaattttgtactgtattccataaaatccattgttctgtccattggatcttttcctcacataacatgatgcattggttatttggaaaacactggtttgctgagttatgcaaatcttccaaacgttaacacatttcgttatacaacattaaatcacattccttaaaatcactactgatctcagtagaaaagtctttaactattggaaagcactcaagatcatggtggcaaataaaagttttctaaattctaatttttgcttaaaagctaaaattctatcattgacaacaaatatgtcattctccttgaactgacaaattcccttggttcatttttgagaaaatgtctgctgaacatttaagtctaaataactatagttagtccgtgttctttctcatcaaaatggtgttctttgaaaaaaatggctaattaggccaggcacggtggctcacacctgtaatcccagcactttgggaggctgaggcaggcgtattacttgaggtcaggagttccagaccagcctggccaacatggtaaaaccccatctttactaaaaatgcaaaaaattagctggcatggtagtgcctataatcccaggttctcaggaggctgaggcagaagaattgcttgaactcgggaggcagaggttgcagtgagctaagagcgccaccgcactccagccttgggtgacagagcgagactctgtttcaaaaagaaaagaggctgggtgcagtggctcacatctgtaatcccagcactttgggatcccaggcgggtagattatgaggtcaggagttcgagaccagcctgaccaatatggtgaaactctgtctctactaaaaatacaaaaattagctgggcgtggtggcacacacctgtaatcccagctactcaggaggctgaggcaggagaatagcttgaacccgggaggagagtgagactccatctcaaaagaaaaagaaaaagaaaaaaatggctaattgagctcataattcagtcatacaggtgcttttcctcgagacagctatcaaactttggtattgtagaagtacattatgctacttcctatttagtcacacagagtattaaaaacgtactcagaaatgtaataaaattaatatattttactggtttatcaaggaaattcttaattgaaactggcttcttttcgaactatgggtatatgacaaagaatacaatattttagtacagtttggtgccactgcattgattcatactaaggtgccagcaatttatttatttaattttaatttttttttttttgagtgggaatctcgctattatcgcccagacgggagtgcaatggcacgatcttggctgactacaacctccgcctcccagtttcaagcaattctcctgcctcagccacccgattagttgggattacagccgcctgctacaacgtttggctaatttttgtatttttagtagagatgggatttcaccatgttggccaggctggtcttgaactcctgacctcaggtggtccgcctgccttggcctcccaaaatgctgagattacaggcatgagccactgcacctagctgccagcaattttatcactgcatttgtaccatccatacaaatgtcaacactttgaaaaatgaaaaataatattattataaaaatagtttgaccttggagactctcaggcatctgcagaccgtgctttgagaactggtctaatatgcgtatatgtaaaaaaacataaacaacaccaagtgttatttaagtttaaacaatttaaaaaatactatttctacattgtttttaaaaaatgcttttttttttttttttgagatggagtctcgctctgatgcccaggctggagtgcaatggcgcagtctcagctcaccacaacctccgcctcctgggttcaagtgattctcttgcctcagactcccgagtagctgggactacaggcatgtgccaccatgcctggctaatttttatatttttagtagagacggggtttcactgtgttggccaggctggtcttgaactcctgacctgcctgccctggcctctcaaagtgctgggattacaggcgtgagccactgtgcctggccttaaaaatgctttttttcaaacaaatggccacttggtaaaaatgtggatattactataggacttggatattttgtgtattagttattgctgcattaaaaactaccctgaaatttagtggcttaaaacaataatttggctgggcacggtggctcacgcctgtaatcctagcactttgggaggccgaggcaggtggatcacctgaggttgggagtttgagaccagcctgaccaacatggagaaacccgtttctagtaaaaatacaaaatcagctgggcgtggtggtgcatgcctgtaatcccaactactcgggaggctgaggcaggagaatcacttgaacctgggaggcggaggttgcagtgagccaagattgcgccattgcactccagcctgggcaacatgagcgaaactccgcctcaaaaaataaattaattaaaaaaaaacagtaataatttacagttctgtggaccagatatttgggctgggttcagctgggctgttcttatgtaggccttacctggggtcgtggctacagtcatcttgtaactgggctgaatggtccaagcctcactagaaagactggctgtttcctgggccacatgtgtccatcaggctaacctggacttttttatgtagcaactggatttctttctttctttctttctttctttctttctttctttctttctttctttctttctgtctgtctttctttctttctgtctttctttctttctgtctttcttgtctttcttgtctttcttgtctttcttaccgagtctcactctgtcacccaggctggagcagtggcacgatctctgctcactgcaagctctgcctcccgggttcatgccattcccctccctcggcctcccgagtagctgggactacaggtgcctgccaccacccggctaattttttgtgtttttggtagagacggggtttcaccatggtagccaggatggtctcgatctcctgaccttgttatccgcctgcctcggcctcccaaagtgctgggattacaggcatgagccactgcacccggccagcaactagatttcaaaagaagaaagaggataagccctagtgctctagcatttttcaagcttctgcttgcattgtacttactaatgttccactggccaaagcaagccatgtgacaaagcccagagccactatggaaggtgtatctttcaaggttgtacaattcttattccctatttatagataagggaacggaaaaatgaaaagcaactatttaagatataaatgtagtgagaagagtggcattgctttacatctttgccaatttctttgaagtctgtcttattagaagacaactcatgtgcttctgcattcagcctgttttgataacatcgttttgattgaaacaaatgaagaaaatacagcctcacacagatatgtaattagaaaaaatagaagtattttaatagtgtttccagataattggggatattctctgatatgtcaccaaaacttttgcagtggactaggacatgtgcatgaatcaacacaacagcttagaggtgtgtctcagatatgccacagcatagaattggtagagctgtggggtatttgctttctggaataatcacaccaatgtaaatatccttcccagtagccagctcgtcttggaaagatagactatacttgctccaagccctttctcactgttctgcccactattaatgggccatgtggcctgagctgaaatcactcctgattctcctatgactgtcaactcctaaaacttctgttatctaaattcccccagccctacatgacatctttaatatctattgagcaaatataacataattctaacagcaaccacaccaagatcctaagaaaagcagaatgtgcaagtgtctgagcagtgtagcagcagaaccagggaagctgtgatgtgccccttgtgaggtggagagagtgggtggtgcaaatgcctgtgttcagccattgggggtcatcatttctccatgtgcggagggctttgcacatcttctcagccatgatcctaataggatagaatacattactgtttgtgttagatgccaaaatgaagaaagtctctgctttctacaaccccaagagtttttttttatttgggacacagtataaagtaaaatatataaagttatgagtgttccaaaagagtatacagtttcccttacatcttttttttgtttgtttttttgaaatggagtttcgttcttgttgcccaggctggagtgcagtggtgtgatctcggctcaccgcagcctcttcctcctgggttcaagcgattttcctgccttagccttccgagtagctgggattacaggcatgcgccaccacgcccagctaattttgtatttttagtagagacggggtttatccatgttggtcaggctggtctttaactcccgacctcaggtgatcggccgacctcagcctcccaaagttctggtgttacagatgtgagccaccatgcccagcctcccttacatcttaatttaataattgctactatttactgagcacgtagagtagaatagtgtactattttagtaagggctctctgtatattatactgtggtaaaatataggtagaactgttaggatagtacctttaagagtcaggcactatcctatgggctttatgttgtgttaactcctttaatccatttaatctgtacgccaatcctccgaagaaggtactattattgcccctttttgcagatgaggcaactgagacacagaatcattaagtaacttgcccatggtcaaacaacgagtaagtgtagaaccaggatttaaacgcacaccgaagggttctggaatggaatggatctgataggctagctgattcaagctcagggcccacgtcctgtgtatttgcagcctttgtggcgagcattgcttatctggtgtctgttgaagtagctactggagcagagtgatggagaggtggcattgtgttatggtaggaaaacctggggctaggaatgaaaaatgccagtcttaggcagatcacagtaacttttctgagtcttcattttatcacctctaatatgggtattctaatgtcaatctgtgtatgtttgggtcatgttttgccatttatagagtaactttacatgttgtatcattaatctcttttgcctgccttgcagagctgttacaggatcaaatgaattatatacaggagaggcataatgaattgttgttgctttttaaaggatttgcttttctctttcagtgttgtgtttcatcaagagtgaactattaaaaaaaattcagatttccttgaatatttaaggtatagatgctgtctgttctgtaactctacgcatgatcgcctcctaccattttcatacatagttctggtacccaagtattgcatcaaatagaaattatagtcagtttcattttctgccctggcgaacaggaaatgtagtaggcacagataatccaaaataattggctagcttttggtatgcagttttgtacttaatttgagtatgtgtggctgaggattcagagcgctttaagtattgatcctctttggaagacacagcttgagattaatcatgttttttagacccttggtatcttttctaccacactcatttcattgtttccagttcaggagcccagcagagatagtagaacctccttcttccatctcctgcctttctcacacatatgccttgtggtaaaggtacaggcaggaggctgcgggagagaggggttcttttacagttaaaaaaatattttttttttacacttaagatgatggagggaacctcaaaaatttattttcttgcttgagcagtgttgacatcaacaagaggataccaggtattaaggtgtctaggcttctgaggttgagaccatcttgaggggaaatctacagttctaggagcggtcatagtcaaagcagcacaatgaaaacttattcttagcactttggactttaacagtaccactagtataaacctttgtggtctctactttgtaacccatgaggttgtgcttataccagtcaataatgcaaggctctctcagtctgtttgagctgctgtgacaaaataccataaattgagtggcttagagagaacagaaatttatttcttgcagttctggaggttgggaagttcaagatcaaggcatcatagagctagagttctggagagtaaaaataaagaaaaaaaagatcaaggcaccagcagatttggtgtttgatgagggcccactttctggttcatagaatggctctttcttgctgtgtcctcacgtggtggaacgggagaaaggggaaaggcctctggagcctcttttctttcttttcttttctgtttctttttcttttttaaagagatagggtctcattcttttacctgggctggagtgcagtggcttgatcatacctcactgtaaccttgaactcttgggctcaagtgatcctcccacctcagcctcctgagtagctaggactacgcatgtgagccatcgcacctggctaatttttgaatatttttttgtagtaatggagtcttgctgtattgcccaggccagtctccaactcctggcttcaagtgatcctcccaccttagcttcccaaagccctgggattacaggcatgagccattgtactttggcctggggcctcttttataagtgtaataaccccatttatgagggcagagcccacttgtgacctactcacctcccaaagacccaacctcctaatactattacactagtgattaggtttcagcgtatgaattgaggggaaaaatttgtctttactgtttcttttcatgatggcagcctttctcttgagcttgttgttacaagtgtgatgttcaaaacaagggaagctcatgatattgccctgccttgtgctgggcagacctctctttcttgttatgtttggttctgaatacttcactttgatgtgtagtatcaacctggagtgtgatctaaagaaagggccagaatagtaaggggagttaatcattaaagtggaggttggcggaactagaaaacggaagacttgcagaggaaaggttgcttataataggaatacgcaaatttctgaaaggctcttttagcacagaggaaatagaattatgactgttggtgaaaataaccagtttttgagggcctactctgttgagatgttgtactaggcgcttgctctatgttgcatatattgcagggcacataccatctctctctagcagatgatgaaactgagactcagaggtgtggtcatgttcaaggccgcatggttattaagtcctgttgcaattaaaactaaggtctgtctaattcccaagcctgttagccatcagtttgtaccaattcccagtggacagagatcacagggagacagacctcaggcagcaggagggagatgctaaccattccagctgttctgtgtaccctggagaggaggcctttaagcagaacataaagcatccctcactcgggctgccataaagagagatttttttttttttttttttttggagatggagtttcactgttgttgcccagcctggagtgcaatggcttgatctcagctccccacaacctccgcctcctgtgttcaagcgattctcctgcctcagcctcctgagtagctgggattacaggcatgcaccaccacgcctggctaattttgtatttttagtagagacggggtttctccatgttggtcaggctggtctccaactcccaacctaagatgatccacccacctcggcctcccaaagtgctgggattacaggcgtgagccaccgcacctggcctaagagagttatgttggaaagatgaactttaaagttgtattcctctgcttctcttcctgtgtaatcttctgagctcccttccaggtccaggccaggctattcctgattcctgcctttttgttctcagtgatccttgcttggttctgagaacccatttccagccctacctttagtgaggtaccatcatgtagggattatttggataatttctgtccttaagcaaaatgaattttgtatagaggctcttacttatattcttttttaaagttgtggtccagcaaaataacgatcgtgtggcatctatggcaccatcgtaaaggctccttgaattgtgctaaacataaacataacctgaggtaccctgtgctctacaagtttgaatcactcttttaccagtctgttgtatagccactgattttagatgcctaggtggctgctctttgatgaaaataccaatgcaggtcttgtggtagggaaggggagtatacagtccctgggctgtacaacagaacttttttttttttttttttttttttttttgagacagagtctcgctctgttgcccaggctggagtgcagtggcacagtgtcagctcactgcagcctccgcctcctgggttcaagtgattcttgtgccacagcctcccaagtggctgggattacagatgctcgccaccatgcctggctaatttttgtatttttagtagagatggggtttcaccatgctggccaggccagtctcaaactcctgacctcaggtgatctgcccgccccagcctcccaaaatgctagaattacaggtgtgaactattgtgcccggcattgtacaaccgaactttaacaacagttgctcagatgatgatggggataaagagttgggaaagagcacatcttcttgaaatgcttgctggaatatgcttacttcttaaaagattatagagaatattgattcttccccaagaaattgacagattcatgttttacataatgatatttgattgtataaagtaattatgctgattttaaaatgtgaaaacattgaatatatttgtaattttttgttaataaagtgcataatttttttttgtagtttattcacctcgatgatgattgcgtaacagaactttctgtacatcacagaaacaacaggcaaacaatggaggatttaatttcactggtaagaaatacagcatgggctgggcgcagtggctcacgcctgtaatccaaacactttgggaggccgaggtgggaggatcacttgaggtcaggagttcgagaccagcctggccaatgtggtgaaaccccatctctactgaaaatacaaaaattagccaggtgtggtggcacgtgcctgtaatcccagctacttgggaggctgaggcacgagaatcacttgaacccgggaggcagaggttgcagtgagctgagatcacaccactgcactccagcctgggcaacaagagctaaactccatctcaaaaaaagaaaaagaaaaaaaatacagcaccaatttgagagtagtatcttttgtttcattgttctttattttatcagtacatgaaaaatagtatagcattttcagacctgtgattttattatgggtacaaatattgcatttaaaaaatatttacatatgatttccacacagtcctgatgtgtgctagatatcttctttaaaaatgaacactccatacttaaaacattgatgaagaagaattacagtgaaaaaataattaagaaacaactggccgggcacggtggctcacgcctgtaatcccagcactttcggaggctgaggtgggcggatcacgaggtcaggagatcgagaccatcctggctaacacagtgaaaccccgtctctactaaaaatacaaaaaattagccgggcgttgtagcagatgcctgtagtctcagctacttgggaggctgaggcaggagaatggtgtgaacctgggaggcggagtttgcagtgagccaagatcacgccactgcactccagcctgggcgacagagtgagactccatctcaaaaaaaaaaaaaaaagaaaagaaacaacaaactagtgcacaaagaatggacagagttctaattttgactactttaaagttctctaacatgcaactgggtttctgctgtggaaatgaggtaaacacaaagcaattttcttttcacctgaaagcaacagcagcgtcacgtcacccctaagtggacaaaccaaataccatgaaagcattatcatgatttctggtgttggattattttggctctttcagatgctcagtctctagatcatacctgtgttttgtgtgtgtgtgtgtgtgtgtgtgtgtgtgtgtgtgtgtgtgttttaagagatcaaggcagtcacagctgtctctaatgtgaagggtgacttgtacctcactttgttcctggcccagtactatgtcttctatcacctgtgatttatgtttgctttatctgttctttaacttgcaaggtggagtccttaagcaatttttttaaaaaattaaacaaagctttgctaaggcacaattcttttcagtaaggagaaaatataaaggaattcttctgaatgacataataagtaaagacacacagaatgtatctggaaatggtagtataatttactttttcatggataatgcctttagggaaatagtaagacttgggaattgctgtaagatttgtgtggtcctcagtctttcattagtgaaaatttgaagtttccatttaagcaacctgaaaaaataaattgtaggacattttctttgggataatctttaatggaagactatactttagatactgaaattttaaaaaatgttattatagaaaaatttacccaccaaagtagagagaatagtataacaacactgagtttccatgttctcatcattcagttccaatagttaataacattttgccaatttaatctatatcctaccactttctcccttcttccctttccagctgggatatttccacgtaaatcccagatagcatgtcagtttatccaggacaaattggtatgagatctacaaactttaaaaatctgaatcttaaaagtaacatacttaagccgggcgcggtggctcatgcctgtaatgtcagcactttgggagtccgaggcgggcggatcatgaggtcaggagattgaggccaacatggtgaaaccgcgtttctactaaaaatacaaaaattagccgggcgtggtggcacgtgcctgtaatcccagctactcgggaagctgaggcaggagaatggcttgaacctgggaggcagaggttgcagtgagccaagatcacgccactgcactccagcctggtgacagagtgagactccgtctcaaaaaaaaaaaaaaaaaaagtaacatatttagagtttcaataatcattgaaaaagtctttaaaatggtatcttttatgacgtctctacctataattttcagacttaaaagtgaaatggaaatacaaattatttgctttccttctggtgcataaaacataacaaagcatagtagaagttgtttcctggtgttacagttctctaaagatcttctcagttattctgaaagttaagcatgaccaacatcaagaatgtagtgaggaaagtaatagtttttcttcctttgtactcttttctcattcttaaatccctgttcatacttcgttgagtcccagggatgagtaggttataggctactcactctagatcagagattctcaccttggctgtatagtggcatttcttgggaactttaattctgatgtttaggtctcaaccccacagatgatgattcagttggtctagggtatagccgaggcatgagaatttttagaaatcttcccagctgactgtggtacgcagccagagtcgagaagcagtgctctagatccttgctgttcaaagtgtggcctaggaccagcagcagcagcatccaggtgctttttagccgcgaagactctcaggcctcacctcagacctactgaatcagaatctgtgtcaaatctccaagtggttcatatggttagtaaagcttcagaagcattggtctagctcagttctcaaccaggagtgattttggcactcagggggcatttggcagtgactagagacatttttggttgtcgtaactggggtttgtgtatgtgtactaatgccatctagcgggtggaggccagggatgctgccaaacatccttcaatgcacagaagagcccctcacaacaaacagttatccaggtcagatgtcaatagtgccaaggttgagaaacccttgtctgggtagctcagagaattcatactggctctacatactttccaatttgaagagcctcaggaaaaccaggtttgagactagccagggtctgttatgtttttctgtgacatcctgagagctctgccttcacttttggggctgattagacaggacagagagagattagttctgtgtgatccatatgctggtatggtgctgctgatctttgtgcagagagagagagaaacaatattactctcaaacattcaacttataagaactcccacttttatattatatacaggagcactctgaaactgctttctctatgcagcggtgagcctcctatgtctcatgattttgagtgatctcattgtattccttttgagattcccaacagtgctttccttactgtcttcctgttcctccagccctgagtggctctggattgtggcagcagccagtcctctgctaggggaccttcactaagggtcacatgtgtgttcgagaacctattcagtccaggacagatccattttccccacccctgtgatgtaaacacccatgtgtgtaaagactgaaggcctcaggaggagggtcagaggaagggtaggggccactcctccgtgtctgtgcccctctgcactagtagctgcctctcctcaacccaggtgccaggacacctctttaacatttaactggggatttaagaatgtttttagttttctagaaatggaactttctcacaggtaaccctatcactttactttcagacatttgactttcaaaagagggaattgcctaaaagataagggaaacctttgtcttagacttgtggattgacatcacctgaaagcataactaatgtgttgatttatctgttattgaacacagaactctcctgtgcatcttataatgagaagtatacagtgacactggccagaaagttatgaaaaagatgctttttttgcctagggaaaaggagggtttagaggatggttgtagaaatcctaggcatgtttaggaaactccatctaaaactcttagcactatccaggaattgtttacaatgcctgggttatgccatgccatcattgataagaaagtggcaacttgtttcttagccattgtctctagtcagtttatgacatctctttcaaaaaggtggctatcgtacatggggctatcatagatgtggggtgggaaaaagtctttaatgtagtttttggaaagtggagagtgattataagtatatattttccaccccaccatagtttcccagccaccttctccatgaagcctcttcttttcttttctttctttctttctttttttttttttgagatggagtctccctctgtcgccaggctgcagtgcagcggcagaatctctgctccctgcaacctccgcctcccgagttcaagcaattctcctgcctcagcctcccatatagctgggattacaggcgcctgccaccacacccagctaatttttgtattttttgtagagacagggttttaccatgttggctgggctggtctcgatctcctaacttcaagtgacccacccgcctcagcctcccaaagtgctaggattaaaacatgtatgagccactgtgcccggccatgaagccttactgtcctttctttgcctcaccctgtttggattaaaggcaacatttcataatttatgacactattttatgcttcccctactagattgattgggccatttatgcaaatttcaaagcatatactatgatcgtggccatctaagttattaactaataaaattcattactaaaaacagagttggtagttgacttttgagtcatgtactttgtgagggggctacatagcatgaaagactattccgtactgttaaaagttaacacttttgtagggcagatagccccatagttttctcagtacattatttagaaactttcattaaacatagtggattgaacagctaagtttacgtcgaacacttcctaaaaccttaacaaaaagggataaaaaggcaaaatatttacaagcagaataaaaggggagacaaagggatgtcattagaagtttggaagatataggttagtggtataagtggtagttgtcagagcattttggagaaagctgaaagctaagtgcttgcagtgagaaaggcatcaagcaaactgatgagagctccagaaaggctcaggaatcagaggtaccaggagcctctgaagtcagggaagtgaagaggaaaaacaggaagatgggttagaaccctagattcctttctctacctgtgctgcataacagcctcctcttccgcatcctggcagaagactggaggtcacaaggcattcttgtaccaaatacagctcagatgcggatgatgaacaattctgaaatggatgcgcaaagtcttcatattgaacagtgcaccaccatctcaaattcccttccctattcaactttgagaacgctgaaaccaggatttgtatcctatttgcagtgatggtggggaaaatattggaagatttatctccagggaaaagctaagataaatatcctactatattagtggttgggagttcaagttcctgtccgttcatcttagagaggagccttcaaggtattgagcagccccatcatacacatagaacctctcatcagctgtgtaacgtaattcttcacttttaagtagaaacagacaaccaaaaatcactagaaatttgaggaaaacttctaacatgaaagtcggagatcaaaacaaatggagtaaggtggggagaggaaagaagaaaaagtagatactgagaaaaaaaaaccccagatatgcagggagcgggagaaaatggctaaaaactgctaattaatattctcagataagagaagtgattttcattcttgacataggaataagatgaataaaaatgaacattccaagagatagctcttgaaaatctaaaatgtgaccacagaaattaaaagctcagtaaaagtgtttgaaaatgaaattcatttgaaatcttttaaaagtagaacctggtgggctaggtgcggcggctcacacctgtaatcccagcactttgggaggccagcgcgggcagatcatgaggtcaggagatcgagaccatcctggctagcacggtgaaaccctgtctctactaaaaatacaaaaaaaatagccgggtgtggtggcgggcgcctgtagtcccagctactcgggagtctgaggcaggagaagggcgtgaacctgggaggcagagcttgcagtgacccaagatcgcgccactgcactccagcctgggcgacagagcaaagtagaacagctaggcacggtggcttacgcctgtaaacccagcactttgggaggctgaggcggcaggtggatcatttgagaccaggagttcgagaccagcctggacaacatggtgaaacctcatctctactaaaaatacaaaaattagccaggcgtggtggcatgtgcctgtaatcccgggtactcgggaccctgaggcgagaggattgcttgaacccaggaggcagaggttgtagtgagccgtgattgcaccattgcactccagcctgggcgatagagcgagactctatctcaaaaaaagggaaaataatgcaagaagaaatattccaggccgggcactatggctcacgcctgtaattctaaaactgagaggccaagatgggaggattggttgaggccaggagttcaagatcagcctgggcaacatagtgagatcctatctctatttaatttaatttaattaaattaattaatttatttatttttgagacagaatctcgctctgtcgcccaggctggagtgcagtggcacgatctctgctcactgcaagctctgtctcccagattcacgtcattctcctgcctcagcttcctgagtagctgggactacaggcgcccactaccacgcccggctaattttttgtatttttagtagagatgggttttcaccatgttagccaggatggtctcgatctcctgacctcgtgatccacccgcctcggcctcccaaagtgctgggattacaggggtgagccaccgcacccggcctctattttattaaaaattaaaaaaaaaatttaagattaaaaacaaaaaagagaaatattccagaactgaagaatatgagttttcaagaatgaagaggcctaacctgggatgaaacagtagatgaaaacagattcacaccaaggcctgttctagtggaatttcataataagattcaggaagttttcaaagataaaaatgaaagttcatacaaaaaggctggagaatcaaaacctaaatgactataggtttttcagtagctgtactagaatcaagaagagtatactaccatcaaaactgcgaagattattatcaacccagaattctctgcttaaccaaatcagaatcaattgtgaagatagaatgtagtcacttatcagacatgcaagatctcaaaaaatttacttcccatgcatgcgccctcaggaagtcactggaggatgtgttccacaaaaatgagagattaaaccaagaaagaagaatacttaggatctaggaaactggggctacattgtaagatagaggtgaaaggaatccctagactgacaattgagtagctggctgagaagccggtccagagtggagcagaggatgcagacatcaggtggaatctctctaagtggggaagcagttagcagatgtgtgtgaacatgttgagaggaggtaaagtgttggaaagggtggagttcaatttgtaaggaataactgacttttatttttatcttcaggaaaaacaaaggtataaaaaaatggaaatgcaagaatagcaccctgtgtggtttagctgcagagctgatattcggccagcatgaccacattggttgttaaaatattagtgtatttatatactgactggtaaataaccactatcttcagtgccctccatgttgccctgttacttccctggacactactccctcccctcttctcacaattaaaagattaataattggaaaggcaggcgtctcccaggaccctactgacctcttggcctctattttgatggttgatgtcagggtaacaattaactattttgaacattatccctacttagttgtgaatgctatttacataatcataataatgcaaatattaacttagctaaacattgtgataaaattatagtaggaggatacagggaggagatgtgtgggaaagggagggagttgcagtagagttaaattcatatttctcatactaggaaatttatacatattatctgaagctgaaaaaaattttaagctatgtaagcatttagtttggaaatacagaattaatagcagaagaaatagctaaaagtgtttgaaagttgttccttagggggagtggaaattgtatgtgtgtggaggtgtggtgcactggttgctgtttttcatcatatgctgtgtaaacctattggcttttaaagttctgaatgttacactgaagaaaaaaattaattaaagatagaacatcatttccacaaacaagtaatcttctaaccaacttgattttcttttcctttagtggcagtatgatcacctcacggctacctatcttctgcttctagccaagaaggctcggggaaaaccagttcgtttaaggctttcttctttctcctgtggacaagccagtgctaccccattcacagacatcaaggtaagtgttactgcctgttgtgtcttgccacgtgccctccctgttcctgagtgtgtataccactgggaaggtaaactttccggtgtcaaggagtcagaggcaagatgttttatgatttcaatatttttgatgagaaaaatgggaagttctgaagttgaactctaattttttttttttttttttttttgagatagagtctcactctgtcatctaggctggagtgcagtggcatgacctcagctcactgcaacctctgcctccgggattcaagcgattcttgtgcctcagcctcccgagtagctggaattgcaggtgtgcatcaccacgcctggccaatttttgtatctttagtagagacggggttttgccatgttggccaggctggtctcaaactcctgacctcaagtgatcagcctgcctcggcctcccaaagtgctgggattataggcatgagccaccgtgcccggcctctaaaattctgaatgttaacatggcattttacaaacctcctcccctgactccttttttttcataatagcaattcctgatggctatagaaaatgtttaagccaggccgggtgtggtggctcacacctgtaatcccagcactttgggaggccaaggcaggtggatcacaaggtcaggagtttgacaccagcctggccaatatggtgaaaccccgtctgtactaaaaatacaaaaattagccaggcgtggtgatgagtgcctgtagtcccagctacttgggaggatgaggcaggagaatcgcttgaacccgagaggcggaggttacagtgagctgagattgcgccattgcactccagcctgggcgacagagcaagactctgtctcaaaaaaaaaaaaaaaaaaaagaaaatgcttaagccacagatgagctaaaaggaaaatagaatttacctataaaccaactacctgtggaggatgtagttaatatttattgtgtctttccagtcttttttttaaagcatacttttacacgcattcaagtacttttaaaggacacattattgaattgcagagaacaaaaaaattgttgggagtaagatctgtgatatggaatatataatactttatatgacatgaaacattttgataaatattttcatatttatgttaagggtttaggtttttgtttcttttaaaattttcatactgaaatggagcatgttgattagtgtttgttataaccaaattatttttctctacttcactgtctttgtctcagttttgtcatggactttaaaaaatttttttgttttattttttgaaacaaagtcttgctttgttgtcctggctggagtacagtggtgtgatcatggctcactgcagccttaaccttccaggctcaagcaatcctcctgcctcagcctccctagtagctgggattacaggtgtgtgccaccacacctggctaatttttaattttctatagaaatggagtccagctatgttgcccaggctggtcttgaacacctgggctcaagcagtcctccctcctttgcctcccaaagtgctgggattattggcatgagtgactgcacctggcctgtcatggacatttaaaatggtgaagaagcttacatacatagaggcaccatgtcattcctaaatgcttgtgttagtccttgttttgtgtgattctttgtatttcccatggcttaaaattcagctatccaaatactttgccagatgggtatggaactttgtaatgtcatcttccctcagattaattcaggttgcaatgtaaataatcttagcactaggaaattgtacctcatcctcagagaaaggtagttggttggccctgtttatgaaatccaagataacacaattgactgtgtggatgaaagtttggtttttttcccctttataggcctcaaaactgtaaaaaaaaaacaaaaaatgttaaaatgccacctcttttatgatcttttgttgaattccccctccctcaaattcctttaatatctatctcatttagatctccttttggtactcatcagtcatgtgctacaggtatagtgggtcttatgtcactgccagaactaacctgcccctctttttccctccctagttggtcagtgcactggctgttgtgtaaagaaatctctgaagggagatatcctgcatggttttctagtctgttgttggagagttttaatggctggtaaatattctgtgcctaggcagctcttttgcacatgggctccttgaatcagccaatccctcatcccacccacactgccaaaccctttaaactttcaggtgcaagtaacacatctgggtccaggaaaatgcaaaaccctgaattttgcatctgctcaaggtaattggagaaagctattagatacgtatacctctatgcttagaaaaatcactttcactaaattttaaaatttacgacacctcagttaaggggcctgagacattttcctgagacattggattgtcttttttttttttttttttttttttgagacagagtcttgctttgttgcccaggctggagtgcagtagtgtggtcttggctcgctgcaacctccgcctcctgggttcaagtgattctcctgcctcattgtcccgagtagctgggattacaggtgtgtgccaccacacctatctaatttttgtatttttagtagagatgggatttcaccatgttggtcaggctggtctcgaactccagacctcagatgatccacctgcctcagcctcccaaagtgctgggaacacaagcgtgaaccaccacacccggcctggattttcttatatctgaattggcctggtctcaattgatctgcttatatgagttgtaagtggaaaagacctggaaatatatttactcttatcttccatctactccctaatgaacatttaactaataatttaattatttgcaaagtcatattattgaatcaattttatggcagatcaagagacattttagtaacaagaagtgaaatagaaatcaaattttgggttcgcttctaatctttatgcaaattattgagacacgaagcaagtcacatagtctggttgtactgttcttccccttgatagaattatcccttttctctggggtgttgtttataagaaagtaagtaatcatgatcgatcaatcaatcaataggtggccctttcagtgaaacagcagtacagactgatccaagaatcacaaataaccacgtcatcatcatcagtgtcattagcattttcaggccccatgctgggctgctgggaaacatatctgtgtaaagtataatacttgttctctaagagtcaagacatatatatacatagataatactgcatcatagtagatgatgggggccagagaagtggccagaggtgtcctggggagctttagaggacaggaatgatcaccatgggatccaaactggaccaacagtcaaggttagaaagatggaaaagaagtggcacaacattcagggcaagataaatggaatcagcaaaagcaggggcacctaattttgcttgatgtattctgttgacagtggctggacttgtgttaaaaaagaagagttcaagtagggggagagagagagagagagagagagagaacgcaagtgagctggaagggtggacaagagccagatagtagagaacctgaaaatgcacatcagaattttagactttgttcaatagttaatgaggagccattgatttgtgagcaagagagagagaaatgaacatgattttgaaaaattaatccagtggtgtatacgattgtttagtcaggggtgatatgtgtgctattagtccctactggagtacccatgacagccgtcattcgtacagcactgtacttctccccaccaagcctagacttagctttaggatttttctcagcctagctctccatgcatccagttccaaatgacagtaattggtaatcctggagaactctgtcatccttggttgagacagtggaaagattagtggtagagacaatattgtctgtttgaatagtctaggtatgagaagatttgtccttgatctaggatagtggcagtgagactttgggaaaaaaaggatgagatataagaaattcaagtaaaattgcttggctagattaacaatatatcgagggaaaaggaaggaaggagaaataaaaactccaagtacacccacagtcttgaattcagggtataattagtatacccttagtttatagaggaggaagaatgaaagaacagaagttattttggtggcgttgttagcgcaagaccccaaatgtcctatccctaggagatccttcataaggctaattttcttcctggtagaaattattcactaccctgtatattcttacaaagaagaaacctatatttcgaagttgtttcccctccatcttctactttgtcagatctttttatttgtaaatttgcagtagagttgtctggtattatagtgattatgtgataatgaaaagtagtatgctatataacataagaatgttgcaagacatattatttgagagtcggaggttttcctttctgataatttgaactgaaattttctgacttcctttttctgtactggatggtcagctccttcaatatagtgtctcctattcatttttgtttccagggccttgccctatgcctggaatacagttttgtgctgcataaagacaacgttggactgcatttatgatggtggtcccataaaattataataccatgtttttactctaccttttctttttttttctttcttttttttttagacagagtctcgctgtattacccaggctggagtgcagtggcacaatttctgcttgttgtaacctccacctggtggactcaagtgatcctcccacctaagcctcccaagtacctgggcctacaggcacatgcctggctaatttctattttttgtagagatggggtttcaccgtgttgcccagactggctccaacgcctgagcttaagtgatccacctgtgtcagccttccaaagtgctgggattacaggcatgagccaccatggggacggcctttttctgtttagatttgtttagatacataaatacttattgttgtgttagagccacctactgtattcagtacagtaacgtgctacacaggtttgtagtgtaggagcaacaggctataacgtacagcctaggtgtggcctaggtgtgtagtaggctctgacgtctcagtttgtgtaagtacattttatgatgttcacacagtgataaaattgcctaatacatttctcagaatgtgtctctgtcgttaagtgacgcgtgactgtattttaaatattgaatcatagtactgtcatctttaagttcttctgtctttcattgagtagtcaaataattggagtctggaagatgtgaccgcaagtgataaaaattatgtggcgggattaatagactatgattggtgtgaagatgatttatcaacaggtgctgctactccccgaacatcacaggttcgtcattcttattactatttaaggcagaatctattgtttcaattataaaaacaaccagactaatgtgaaaccaaggtgtgcttgcaaatttaatgaatgcttaagccactgaaaatgtttatgagcgataactggaatacgaatgaaagggaagtcaattatatccaagttgaagaaagccaagattctattttagagctctttactgctcctttatttcctgtttattattattattttttgagactgagtcttgctctgttggccaggctggagtgcagtggcacgatctcggctcactgcaacctctgcctcccaggttcaagtgattctcatgcctcctgagtagctgggattacaggtgcctgctgcctctcctggctaatttttgtatttttagtagagacagggtttcaccatgttggcagctggtctcgaactcctgacctcaggtgatccacccacctcagccttccaaagtgctgggattacaggcgtgagccactgtgcccggccttcttttttgtttaaaatgaggtataatgaggtatactttacatgtagttaaataggtaaagtcaccttttttagtgtgcaattctatgtgttttgacaaatgcatacagttgtataaccaccaccaaaattaagatataaaacagttccgttactcctcaaaattccctcattccccttgtggctaacttcccctcccaactctcggtggcaattgatctgtttttctttccttttgataatctttttattgtgactttaagtttgttgagctttttagattaatgaagattaagtatagattaatgttttttatcaaatttgggaagttttcaatattttatttgccccactctctttattttatcttctggtactccccttccatgtatattggcacacttgatggtgccctacagtacactgaggccctgttcatttttctttatctattttcattctgtttctcagactaatttcagttaacctgtttcaaagtttcagattctttcttctgcttactgaaagttctgtttaatccctctagtgaattttttgttatggttattgtactcttgaactccagaatttgttttgttcttttaaataattttatctttatttatactctctatttattgtgacattgctcttacactttcccttggttcttcagatgtttccttttgttctttgaacatatttaaaaactgattttcagtctttgcttggtaaggcctacgtctggacttcttcaaggacaatttccattgactgtttttgtttttctcgtgtatatgggccatcctttttgtttgtttgtttgttttttgtttgagacagaggctccgctgtatcgcccaggctggagcgcattgttgggatctctgctcactgcaacctctgcctcccgggttcaagcaattctcctgcctcagcctcctgagtagctgggattacaggcacccgccatcatgcctggctaattttttttttttctattttttttttttttttgagacagagtctcgctctgtcacccaggctggactgcagtggcgctatcttggctcactgcaagctccgcctcctgggttcatgccattctcctgcctcagcttcccgaatagctgggactacaggtgcccgccaccacgcctggctaattttttgtatttttagtagagatggggtttcaccatgttagctaggatggtctcgatctcctgaccttgtgatccgcccgcctcggcctcccaaagtgctgggattacaggcttgagccactgcacctggccttttttttgtgtttttgtaaagatggggtttcaccatattggccaggctggtgttaaactcctgacctcaggtgatctgcctgccttagcctcccaaagtgctgggattacaggcatgagccaccgtgcccggccatacttttttatttctttgcatgtatatgtcttgtaattgttgaaaactagacattttaaataatataatgtggcagctctggtaatcagatttatcccctcctcaggatttgatattattgctgtttgttgttgttggttagtgacttttctgaactaattctgtaaagtcgttaagtcatttaggtcagtgttgggctgcatttatgatggtggtccatgagattataatatcatatttttactataccttttctctgctcaattagcatagtgatcagctaatgcttggcgaggtttccttagatgcctggaatcaattcgtctctcagtctttgtgccggctctgtgtacatctggggtatgcctgcaactttcagccaggcagctgacaactctgcattagatttcatttcctatttgtataaaacctcaaggtcagcttgaggtgagatcttagatccttctaaagtgttttttgttttttatttttatttttttgagatggagttttgctcttgttgcccaggctggagtgcaatggcacgatctcagttcactgcgattttcgcctcctgggttcaagcaattctcctgcctcagcctcccatggagctgggattacaggcatgcgccaccacacctggctaattttgtatttttagtagagacgaggtttcaccatgttggtcaggctggtctcgaactgctgacctcaagtgatccacctgcctcagcctcccaaagtgctgggattacaggcgtgagccaccatgcccagccccttctaaagtctttcctgagcaaatgcacagccctgggtatgagcacatcctatacatgtacattgggcttgtagataccctggtatattttggagcttttccaattcactgtggacatcttattctctaacttttttttcagcatttttgttagtttattgtggtcaccagctattacttactgcttcggcagccacaatgtgcaacaattgcctgtaaatttttttttgtttttgagataggatctcattccgtcaaccaggctggagtccagtggtgtgatcatggctcactgcagcctcgacctcctgggcttaagcaattttcttgcctcagcctcccgagtatcggggactataggcatgcaccaccatgcccagctaatttttacaaaattattttgtagagacagggtctcaatattttgcccaggctggtctcaaactcctggactcaagagatccacccgcgttggcctcccaaagtgctgggattacaggcgtgagccactgcgcctggcacctctaaatctttttaacagatgctgctggggaaaaggctgttcatactgggcaggctctgagtaaggtcaaataaagacagctttcaggctgggtgcagtggctcacgcctgtaatcccagcactttggggggctgaggcgggtggatcacctgaggtcgggagttcaagacctacctgaccaacatggagaaaccccgtctctactaaaaatacaaaattagctgcctgtggtggcacatgcctgtaatcccagctactcggaaggctgaggcaggagaattgcttgaacccgggaggtggagtttgcagtgagctgagttcacgccattacactccagcctgggcaacaagagcaaaactccgtctcaaataaaaaacaaacaaagaataaaaaaagacagctttcatagtagggtcttctagggaactactggccaggctaaataatgacagttttctgagcatgaagctttgaaggagctccaacctgttctgccccctccagcggctcctaggttgctggtcttcatcgtgattgtgggctgtgggtttctaagactatcatagagctggagagagaagaatggggataggtagggcaaattcaaacacctcaaactcactgtttctacttagctgttttctatgaataaatgctgcgatctttggctaatacacagagttctgaaacaaaagaggtatactttgtttatggatagggagatttgaaggtatagatttcagtttttcccaaaatgaattttaaatttaatgtaatctcaacttttcagtggatgtaaaataagtcaaaatgattctaaaatgtatgtggaaatacaaaggggcaagaataactaaatcattcctaaagaataagaagatgggaggaaactggtcaacctgataaaagaactattataaaattaaagaaagtaagatttccttaataaataaaacaatgaaacaaataaaacaatgaaacctttcataccttatatttaggtatgtctctttaaaaataacatagctaggccgggcgcggtggctcacgcctgtaatcccagcactttgggaggccaaggtgggtggatcatgaggtcaggagattgagaccatcctggctaacacaatgaaactccatctctactaaaaaatacaaaaaattagctgggcatggtggcgggcacctctagtcccagttacttgggaggctgaggcaggagaatggcatgaacccgggaggcggagcttgcagtgagccgagattgcaccactgcactccagcctaggtgacagagcgagactccgtctcaaaaaaaaaaaaaaaaaaaacaaaacaaacaaagaaaaaaacatagctagatttggtatgcaaactgaaaatcttgtcttttgaattgagcgcttacccaacttatttttattatggatttagttattatatatctttctttttttatgtttcctatgtgtctttttctgtatttcccccttatttcttgattttttatgttaatttccccccacattttattggtttctatttgatttctattcttttaatatttactctaaatttttaacatttaatttaacgaaatataaagtgaatctgtatctttttttttttttttttaagatggaatcttgctctgttgcccaggcttgagtgcaatggcgtgatctcaggctcactgcaacctcttcctcctgggttcaagtgattctcctgcctcagcctcccaagtagccgggtttacaggcacccgccaccatgtctggctaatttttgtatttttagtagagacagggtttcaccatgttggccaggctggtctcgaactcctgacctcaggtgatccacctgcctcggcctcccaaagtgctagaattacaggcgtgagcccctgcaccctgctgtgaatctgtatgtttaatttccttctaaacaatatgaaggccttagaacacttaatctctgattacccctcctggattccatgctattgatgtgtccagtgtattagctcttgaatgtttttaactttttattttgaaatatttatggattcacaggatgttattgaagatattattccactttcttcttgcttctattgttgctattgaaaaaccaacctcagtctagtgcctttttagtctgtcttttctctctggctccttttaggaccttctctttgcttttggtgttctgcagtttcactgttagggctactgcgttgcacacctccagggaacacaccatctgtgtggtgtctctgtggatagtgtcctctggagttgtataatctggtaaatagagatgtggatttcttttatgtatccagttcatgattcatcatgctttctatgtatggggatttgtatttttaatcaatttttgaaaatttcttgaataatatactgctttttctttttctccttttccttgtttctttttttttttctttttgagacagagtttctctcttcttgcccaggctggagtgcaatggcacgatctcagcttactgcaacctctgcttcccaggttcaagcgattttcctacctcagcctcccgagtagctgggattacaggtgcctgtccccatgcccagctaatttttgtattattagtagagacagagtttcaccatgttggccaggctggtcttgtactcctgacctcaggtgatcacatgacttggcctcccaaagtgctgggattacaggtgtgagccagcgcacccagcctgcttttctttaaaacaatatttatataaatttatagagtacaagtacaattttcttagatgcatagtggtcaagtgagaggttttaaggtgtcagctgaataatgtacatcgcaccccttaagtaatttctcatcaccaacccccttccatctcctcacccttccaagtctacattttctatcattccactctctacatccacgtgtacacccttttttagcacccacttatgagtgagaacatgcaatatttgtcattctgtgtctggcttgtttcacttaaggtaacctccacttccatccaccttgttgcaaaagataggatttcattcttttttatggttgaatagtattctatctgtgtgtctgtctgtctatctatctcacatttcctttatgcagtcatctgttgatggacacttgggttgattttgtatctttgctattgtgaataagtactgagataaatatacaagtgcaggtatgtttttgatgtattgatttcttttcctttgggaaaagaagtagagggaattgctgcttttgcattgtccatactatgtatatctggaacttagaatagccttatgttagacattttatttcattttctgtttccttcaaccatctttcacgtatcgtatgtctttttctgtcttggctacattcagagttatttcggatttatatttctattaaaatatctctatttcttttattctgttatttgacatgtgcattgcacttttcatttttatcatgtttttatttctagaagtttttattctttttcaaatctatttgaacagttttggtagtcttttgttctttactcatgtttttgtttcactattttaaacatgcaaacatacttatttatgttctgtatttgataattttaatatctgaaatctttatgctcatagtgcttgtgtcttttggaattttttatgtaggtttatttttctttgaactctatgggaattatctgaggcttgggttaagggcttgagttgggttggagtgaagcttttctttcaggtaggagttgtgcgtgcttctaccaggttcctggggcacaacttagcataggactactttaagttaaatttaggcttgaggtttctgggaccatgcaggttgtattaatttggacctttatttatctgaagactggcctgtgtttacttacaaattattaaaagaaacttcatttttctcctccctcagaaccaagaccaagacaccctttttcttgcctattccctttgaagagcagatttatatttaactcagcctttaattttagctatagcccttcctggctttacatgggagctttggttctaactcaccaccttgcagaggcccaaggcttctgtggctgtagaaacacatgctataggttatcagaggcagaagatagctgcccttagggcagcagagagtttcagccttggttactcctttggattcattctcatgtttttagtttggcctctcaggattttacttactctcttgcaagctcaaccataaatttaaaaggattaaaaagtattttttatccaatatttctgttagagtagtttaacatgttttttctgccctaattgctgactaaactttttttttggtacatgtcagaggcaagccgtgactatctaggtatggaaagcatttcttagtgattgatttgtggccattcacaatattgcctaggatctgagtatgtgtatacactcagcctgtatcatgttgaaaattactgtcaatagaacagactaaagtgatctacatgtattaaagaaaactatatattttcaaatttcctaatgtcaataatatccttttgataattcattttaataaaaatagtacaaggtagtttgcaaatgatcaaggaatgttgtaaagaaattgacttttcttcttcagtgtgctttatctagtaactttttttttccagtttaccaagtactggacagaatcaaatggggtggaatctaaatcattaactccagccttatgcagaacacctgcaaataaattaaagaacaaagaaaatgtatatactcctaagtctgctgtaaagaatgaagagtactttatgtttcctgagccaaagactccagttaataagaaccagcataagagagaaatactcactacgccaaatcgttacactacaccctcaaaaggtatttgctaagtgaattaagcagtaagaagtttcatttttcttaccatgttaagtaaacatatagcaggtcagaaatgactagcattgctttcaggaatttctaggagaagtgaagctgttttttatcatgtcatttgcattagttaaaatgaaagcatatttgtcaatttcaatttattctcaaatgataccaagtttttcctctttttcacgtttataaaattgaatcatagcatcctaggatatcaaagctgaaaggcaagttagagctcatttaatccaactccctttttcacagctaagaaacctgagactcagaaggagtgaagtgatttgcccaaggtcatatacccaggtttagacctttcatgcccatttaccccgacttatgactcaagctgacgcctccgctgagcctttacttatctggatctccagttgtggtgtctggtcctgttctgccctatggtattactgcctgtcctcagcaggcagggtgaatccatgatgcccttccagatatctgtctttgtccagttatcacaacttcctcatttcccttggtttcctcttcaatttagtcatgagcagttatttaaaccatttcctttatgatacttcactgttttggttgctggcctcatctggacacattctatttgatcagactgcctcttagaatacagtgcctagaactaaactgagttttctagactaggtctcactagggtagagtggtaagtgtcatgacagtagagactctctgccttgtttattgcagcatggcatggtctgtagtaggggccatacctgtctggtacatagtacacagtactagacctgatgcctagtacataataggggccatatttatgtaatgaattaataaattagagcccaaaggaattttatttacagtgatcctgtttatgtcactttaaaaaatgttacctaaactttattagcctttttccccccaccaattgtgaccttctcaagtttcaagattctaacaaacctaaactctggagcattgccatgtgaactgctgggaaaccacatcctgccattgtgcttctagtgtactaatggagctcatagccagtttgaggggttaacttcttgtctataaagatattacggaagactttgccagaatatttgctagaagtcccatttttatgttaacgtcattttccatttcatcaactcaaataacactttccgccaaaatgtgaggccagtttggtgtcctgatgatgtctgtgtttgtgtgtgtgtgtgtgtgtgtgtgtgtgtgtgtgtgtgtgtgtgtgtgtgtgtgatggtgtgtgtgtgggggggtgcggtggcgctgcctgtggttgttatgagaattcagtgagatagcctctaccctgcaatggtagctgctattgcattctttcccaatgaaagggtctctttctgttctgttgtttctcttactgtaaatacagtaccctttgtgactcatgagattgggcagggagataaaacggacctcagctcaccttagctcattcaacgatcttttttttcccctttttttcttttttttttaatttctttgagttggagtcttgctctgttgcccaggctggagtgcagtggtgcgatctcggctcactgcaacctctgcctcctgggttcaagcgattctcctgcctcagcctccctagtagctgggattacaggcgcctgctaccacgctcagctaattttcgtatttttagtgaagacagggcttcaccatattggtcaggctggtctcaaactcctgacctcaggtgatctgccctcttcagcctcccaaatttctgggattataggcgtgggccattgtgcccggcccagggcttttttatttaaaaaaaattttaatgccataatcccttccattattgacattttttactttttgtgtaactctgaaggttttgcaatatgggtagtttggaatttattttataatcttgaaatattatcagttgacatatgttgtcatgacgagaaagattgtgttggtcaaagctattattggttgtttctttttaaacacgagccacttaaggaagcaagtggctgaagccatgattgttagcttccactggcactttgcatttttctttcttttcttttttctcttctctcctcttctcttctcttttcttcttttttttgagacagagtttcactcttgttgcccaggctggagtgcagtggcatgatcttgcctcactgcaaccttcgcctcccaggttcaagagattctcctgcctcagcctcctgagtagctgggattacaggtgcgcaccaccatgcccggttaattttttgtatttttagtagagatggggtttcaacatgttgggcaggctgctctcgaaactcttgacctcaggtgatccacctgcctcggcctcccaaagtgctgggattacgggggtgagcccaccatgcccagacctgcattttactttcattgtgagttatttttgacataaacataaatttcattttcgtcactcctacacaatgcaggcattggcagtttgttgaagggcagttctgtatggtgatagatactgtctgtatacaaagatgaaaactgtttttataaatatttctgattgctcttattttcttgttcttgtggaaagtgagaatgtagccaaatagtcataaacaaaaccaagcccctaatctcttttaaaattttgatattatatctttgtttttatagtgtgaatattatctctaaagggtataaaacttttagatcatgagctaatcagtataaccagattcgttagtacaaatttgtcataaactatctggaatgcaaataccctacttagaataaaacacaaaattctggaacagggaatataaaaaataatcaaagcttacatctctttttttttccgagatgaagtcttgctctgtctcccaggctggagtgcaatggcgcgatctcggctcactgcaacatctgcctactgggttcaagggattcttctgcctcagcctcccaagtggctgggattacaggcgtgcgccaccacgcccagctaatttttttgtatctttagtagagatggcatttgaccatgttggccaggctggtctcgaactcctgacctcatgatccgccctcctcggcctcccaaggtgctgggattacaggcatgagccactgtgcctggccaaagcttacatctctttaataacttatgtcaagctttcacaggggtctgttctttttgcctaacatgagttgaatcgggctatgaattcaattaacaccttttaatactagatcaattaaaagcataaattgggcccttgtataaatacagattgacttttatttttagaaaaagaatcagtaattatgagatttgtatttatatgatctgtttagatttatcatatgatgtttataataaaattaaaagcatggcctaaatttgcagtgaagaaaaaaaagaagagccacacatacaaagcaaaatgattttgtttttattataaatcacatggaaacatttcttgaaagaattagagccttcgacatcacaggtcaagtgattatactgtttctgagtcaatgaataatgtgatacctgcattattattaataatagaaatttcagaaccatagtatgtgctgcatatggattgtgtttgttctgtttctaatagctagaaaccagtgcctgaaagaaactccaattaaaataccagtaaattcaacaggaacagacaagttaatgacaggtgtcattagccctgagaggcggtaagtgtttggtttttttagactctaatctttagtatatgtaaccagatttcctttttcatgtattaatagacctgattaaggtaaatcatcacatagattctgttggagagtaggaatatctgtttatgtgtggatgacctgtggccattcctggacctgtagccactgccttcctcatggggtagaatcatgaaactgatcagcagtaggacggcaccttaagtacaacaggctgggaagacagtggtcctcaccccagccaactagttacctctctgaggcccatcttacccttctcttctgccagtaaaatacagatatcctctaacagattgtagtcctcccaaatcgtaaagatactgttgtttcaaagaaaatcctctgtatgaaaagttctgcagcataggtaactcttcaagttgctattcttttatagcaatttcttaaaggcattgtctattttcaagacaattggagaattagaatgtggacagggtattagatgatattatggaattattattaatttattgatgaagaaactgaggagatcaggaataaaatgatttatcaaagctatatagtacaaagctggagccagaacccaggtcttctcattcctaatcttatggtttttctcccacagtctggaagtgctggagaactacctagaaagccaactaacaccacagtagtttctattgaaaaatgcattcaggttccaaaatatttacataactgaccatttttagaacattatccgttagtatttggtaactgcttagcttctcaataatgtgtatatatgtggttgaactagtttccttaattttatttaacatttttcagtgcaatggtactatggtttttttaaatctcagtgtcagtgcttgaaatacttaactatctccaaccagaaaaatttcagaacaaaaggataaaatatgcctaataaacagccatatgtaacgtaaacttctcagcacactttatggtgttgtctttatggaagacaacatccttattcattggagatgtatactgaagtgtttcagagtaaagtgtcatgatatgttcagatgagttactttcagatggcttagcaaataagtaaatttaatgtattatctacatacattaaatttatgtgtatatatagatatatacattgatgtatatatatcagtgtatatctatatacatatgtacattaatatattatctatatccaaatagaaagcaaatgtggcaaaatatgaacaattgttgaatctaggaggatataccggtgttcattgtactcttctttgaacttttctatatatatgaaaaaaggatatatatatccttttttaaaaaggaaggggataaatagttttgctgagtggcagttgcctggtagaagtgtgacagctcctgtccagggggagatggctttggtgcttcctgaggaagagagaggtgatctggccctggcatacctgagtgaggcatcctaatgtgtatgaagggacaaaagttcacccttgtggaccccacaggccggaggcccagctctacttgtgccttgttttatgttttgtttcaggtgccgctcagtggaattggatctcaaccaagcacatatggaggagactccaaaaagaaagggagccaaagtgtttgggagccttgaaagggggttggataaggttatcactgtgctcaccaggagcaaaaggaagggttctgccagagacgggcccagaagactaaaggtaagcaggctggaattctttcatatggagcagaagctgactgctaatggactgccttttttttttaaggtgctgaatgaattgattagtgttttttatttgagtatttattcacttagttaatatatgttttttgagcaactaaaatctgcatgttactgtgcagtcagtaaatagatacagtcactcccttcaaggagcaaacagctatcattcaaatattcaagaacaggtggagggattagtcacaggggcaacatggaggtgaggaagcagggggcacagatggagagctgagagctgccttaaggagggggacttgagctcagttgtgtccctgattcatggatactttgtaggccctcatgaaatatttgaatgcatgggaagataattggaactttgagtgtggtgtgtgtcaggaaaatagtgagtgacaagcggggaaggtaggccggaagggcctcaaggcctggctaagaaggtgtggatcttatttaatagacccagtatgctttaaaagggttaatgtgtcactggtgtggacaatatatttagtcaaggaaggaaaggaaaaataagctgttagttgatataaagtactttttattctcttggattctctctgagcattcattcaaacatctgatgaatacatgtttgtttggtggaaggggagtaattaagaggtaaagggacgaatgagacagcccattccttgaggaactcttaggctggctgtgaaaacaggctgggatgttgttctgaaacactgggctcagtgctatagtaaaaacacattccaagaggtgtgggcccaagcaggggagaagatggtagtgtgcccatcatttggggactgggtctatgtttagtttttgcactgagactctcgtaatgagcaaatctgggcggtttgagggaaggaaaatgctgagcttttgggcagaagggtgttttagaggagaatgttctgtgatctcatttctgttctgtcttaaagtggaagaagataggagttatccactagcagtcattaccttgaacttttgtagtgtgctgagacgttacatatggctgtgtattaggcatattttatccttttgttctgaaatttctctggttggagatagttaagtatttcaagcaccgacactgagatttaaaaaaaccatagtaccattgcactgaaaaatgttaaataaaattaaggaaactagttcaaccacatatatacacattattgagaagctaagcagttaccaaatactaacggataatgttctaaaaatggtcagttatgtaaatattttggaacctgaatgcatttttcaatagaaactactgtggtgttagttggctttctaggtagttctccagtacttccagaatgtaggagaaaaaccacaggattgggaatgagaagacctgggttctggctccagctttgtgctgtatagctttgataaatcattttattcctgatctcctcagtgtcttcatttgtaaaatctggaaataatgcctaccctggcaacctcacacggctgagatgtagaaacaagactctacatatgggatgctacatggcatattaaatgctttatgagtataaggtgacatgtttccaatgtcaaggattactatcagtgttgagcattttaccacccatgtatagacccatggtcctaattagcacagtcctaagattgaaaactttaactttagatcattaacactttttaatgcttttaagtttttgcaaaactgaaggactttctttgggaaattaaccttattttttttcacctacttcaaatactgtactaaaaactatacacttaccggaagagttgcaaggatagtagaaataataccttagttttttaagatagcaaatcatatgtagttatgtcctcttttaggaagcagtctataaaaaatccaaaatttaagtagataaattaggattcattctttattttaccaaagcagtaatatattgtgatttgaaggtgttcagtttattattaatatcatcttaacagagccaatttagtttggtgaaaagagtgctggatcaggaaccaagaaagagagggtcccttcgttaacactcagtttcacgacatttgctctatgggtgtattgggtgcactattatttatctggtattttcattatgttgactctcctttaacaaatggatttatagagatataactgacatataataaacttgcacatattttattttattttatttgttgttaattttttgaggcagagtcttgctctgctgcccaggctgtggtgcaatggcatgatcatagctcactgcagcctcaaccttctgggctcaagtcatcctcctgcctcagcttcctgagtagctgggatgcgtgctaccacacttggctaattcttaattttttttgcagagacagggtctcactatgttacccaggctggtcttgaactcctgagcccaagtaatcctcctgccttggcttcccaaagtgctgggattacagtcatgagccactacacccggccaactgtgcatattttaaagtacaattaatatgctttggcattatatataacatctgtgaaaccattgccacaatcaagataattttttaaaactcaaatttatttaaaaggaaacctttatatcattagggtttttttgttgttgttgttaattatgttttcgaaatcagttgggaacaaatacatatttaaaaatatttatccatgtgccacccagaattaccttgtctatcttgtatcacactatgagaagcactaccttaagaaatttgtatctcttctttgggccataggttcttattttgaaaagtaagatagttggatacttttcttcctaggcattttgttatttatacaatgaactcaaacctgaaagatatagaaactatggttttgtttgacagtgaaggtacttaccaggaagggagggatttttgtgtgtccaggacccactaaaacagtgcctaccacatagtaaacattcaaaagtagttgttgaatgaatgaaggataaatatcaattaggaatgaaattatctctgagaattaggctctcagtcaatgagaaaaaataatatgacatcacttttttaaaggaatacctgttacatttatttcctcatagaactgtcataaaatcagctcctggaactctataatattctttaaataatccagaaagagttaaggaaacatatccaactaggtacaaagcaaactttgtatggtgtttgtttatctttccgtggtatacatttcaggactgttaatgtctcttaaaatagtgtgggaaggggaaaataggcaaagctcaaacagttagatgggtgctctttaatatttatttctttaaaaggattggtaggagaggaagatgaaagtatgaaaaggaagctatgggtgtgtttactaataaccataacttctccaagctctcccagtgggccattaactcactaagagttgactgtaaattcctttgatattttttaggaaatagttccatttgaaacagtactatattgaggagttttggaactcttgatctggtgtgatggtctttgtgttgatgtaaaaatttacttctcatctcttctttttcttttcttagcttcactataacgtgactacaactagattagtgaatccagatcaactgttgaatgaaataatgtctattcttccaaagaagcatgttgactttgtacaaaaggggtaagaagcacatttacaagctgttgcatttattagtatcttttggactttgagaaaataggagttggttgggcgcggtggctcacgcctgtaatcccagcactttgggaggctgaggtgggcagatcacttgaggccaagagttcaagttcagcctggccaacatggagaagccctgtctctactgaaaatacaaacaattagctgggcatggtggcacatgcctgtagttccagctacgtgggaggctgaggcatgagaatcacttgaacctgggtggaggctgcaatgagctgagatcacaccactgcactccagcataggtaacagagcgagactctgtctcaaaaaaaagagaaaatagaagttgatctcctcacccctgtgctttagaaaaaatgtatttctcccacctcattcccaaaagcttttgaggtagtgttattgcttataatttattctcttttgtttggttcaagctataaaagttttagaagcacagatattgtcccactttatttcaaaataggaaaattcaaaattcttctggctttcttgtagatcctctattttcctttgattgtctgctttacaataatatttataaattataatctaaatttgtgagacatttcaaatgaatcagggatttatacagaatccttctcttcatgactggctgttttacagggctgggttttcagtgctttaggaagttttttcaccttacctctctcccgctgttgaaggaactgccatcaaagcctccttggttatgatctcctggtctcaatagccaggcctcttctggtcacccaagatggccgtatttctaagcatttccattcaattatttccctttaaaatttctttattaaagcaaccagaagagacatgcatggatttaaacatgtaaatagaatagtcaatatagagtaagatttgaagaaacaatcttgtgcagatataatttttagtttttagttatctgtaaatgttggcaagcattccttctgtgaaccctggcattcctctcaggcttcattagaacacatctctcccactctgatctcttcttcatgcttggggctatgagcctctgggcatacctctgtcacaggtctctcaatgatctattatctaacatgtgactaaattgttctatgcctcatcttcttgtcaagaatcttaacttcagggtgctccttttggcatttttgatgttgactgcttatttttgagagatcaagcctctttcccaaaacacatgactaagttagtaagaaaaagaatattttggtacataacagtatgaaacagaaaaaagtacataactgaaacaatgtaacttctccacacatctgtggaacagcacttaatcaggaacccttaagtatttagggaattgaaacttaaaatcagtcctatttattgaagattggtaagacaaacaaaactctaaaatagaatgtaaactaattaaatattattacatgaattaaatttatacagctttgcaggatcatacgtatgtcttaagatgtgtttcaggcttcattttgactgggcctttccattctcagagtagataatgcggcagttctatctataaatgccgtacgtttcagttatgggaatataccatttccttgggctttttcttctgcttttctttctgccataaagtgatgtgatgatcgtcataagaggttatctctcattactaattagaaaaacctcaaaaacacacgtgcctttctgacaggttactggcttcagctttatttatatgaaagacaagtttctgacaaggctcacacacatgaaatattatctttcttgcgctttcctttgttgtgaatgttgtggaaatgcccaatgtttgcggattacacgttgaaaggattgcataaagaatgccagatttcttgagcatgaatggcatgtatagctatgaaacaggggcttttctttggagcaagggagacttgtaataaagccttttcatgcttattcttaggatcctagttcagtttctgggaaaacaccagtcatactctattactaaagcatagctaggtcatttggaaactgtaaacagtaatacattgcttaatatgaaataatggttcatttcctccactggcctcctagaggcttagaaaactcttatacagaatatggttctcctactaactagcttcttatcttgtttttcacagttatacactgaagtgtcaaacacagtcagattttgggaaagtgacaatgcaatttgaattagaagtgtgccagcttcaaaaacccgatgtggtgggtatcaggaggcagcggcttaagggcgatgcctgggtttacaaaagattagtggaagacatcctatctagctgcaaggtataattgatggattcttccatcctgccggatgagtgtgggtgtgatacagcctacataaagactgttatgatcgctttgattttaaagttcattggaactaccaacttgtttctaaagagctatcttaagaccaatatctctttgtttttaaacaaaagatattattttgtgtatgaatctaaatcaagcccatctgtcattatgttactgtcttttttaatcatgtggttttgtatattaataattgttgactttcttagattcacttccatatgtgaatgtaagctcttaactatgtctctttgtaatgtgtaatttctttctgaaataaaaccatttgtgaatata

SEQ ID NO: 7 - DNA, 29465 bp, Homo sapiens
ctgcgcctgcgcgagggctacgcgcgctccggccggggcgcgggcgcgctctcaggcgggctccggcggcagcgacgcgagcgcggcgatggggagcggcggcggtgagtgcggggcgatgtccgctggtttctgccccacaccccttctgcctgccctgcggggcggacggtgggtcccgcgggaggggaggccctggcggcctgaagagggctggctcgagctctttaacccggggcggatgtcgcgtcccgcgcagggagccccggcggccgggcgcgcggtttaaatgcccggcgggcgcccgagcccctcggagccttcccccgcggcgacgttttccggccctttcctggggcaacgatcgggtcccggggcagcgatccggcgatcgggtcccggggcggcgatcgggtctcggggagccaaacaccagcgcctcctggtcggggaaagggctgcggagcgcgtgggggcgaagcgatcccgcagcccggccgggccctgaccgagcctcagtccagcggggccgtggacctagctctgtggaaagcagcgttcggccccgcgcgcgttgaggcacaggaaacacgaactgtggtttcagctattatcatagtatctgtcctggagccggagaatgaggaatattttatggagaggtctatagaatctttgagaattcgtcgccctggaatacgtttggcttttgcagctgatttaattgctaacaggaagaccccggtcaagagaggggagccgggagcaatcgctaggaagtcctagcaaggcggggagggatttgggcccacagaggggagtggcgcttcctttcaggactggaaggaaggatggatagaaaggtagatttgtagatggggaggcaggatcctgaggttcctgtctgagggcttctgtttccctgtgaaataagggctaaggtcatctgcttagagtgaggaaggggttgctggagtaggagttggaaaatccggctgtgggaagaggagagagcacatctgagaagcatgtccgggctgcctgcctggtgggtggaatgcccgtctcacctttaatgattgcatctgtacacaaacctacaggtctaggtttgtgttgggacctgagcaacaaccttactgcgtagctgtcaactccgcattctacaatagagggcacactgagactctgcagagctgagacttggacgcacactgccccggcctccaagtctgtggcttctctccagggccgacccttctaatttggacttgaaaaccagactcttcaagcccacagatctttattgaacattatgcaccttggtcacgtgtgcaaaaagcaaagctatccagcaaaggccccaggagttttcctgagagtgaaatagaaggaaaaccgtcctcagcttcggcagctttttccccttcctgcctgtcatgtgggctctggatcagaaagtttcccaatagccaagttacatgacatgcgctatttgccataaatatttgttgaatatttgaaaatgaatgatctcttctgtaatttgtgcaatgccactcctttacataatctttgtttgggacaagaagcatagttccatcttttgtggcacagggaatagtaaccattagatcatcttcagatgtaacttttatcctttttttttcccttcaagggtgtgtatatagaataatttttcatcttatcaaggcttctgtctttttttccttcagtggtccactgtaggtgtgccaagtgtttctgttatcctacaaagcgaagaataaggaggaggccccgaaacctgaccatcttgagtctccccgaagatgtgctctttcacatcctgaaatggctttctgtagaggacatcctggccgtccgagctgtaagtccctgcatgaaaacactatgagccctagcattgttgattataccatcaggccttgtgttcttaactgtcagaacaaaactttggctaaaaaagaggttggggcagaggccaggcacggtggctcatgccttaatcctagcactttgggaggccgaaggggggtggatcacctgaggtcaggagttccagaccagcctggccaacttggcaaaacccccatctctactaaaaatacaaaaattagccgggcgtggtgtctcacgcctgtaatcccagctactagggaggctgaggcgggaaaattgcttgaacctgggaggcagagcttgcagtgagccgagatcacatcattgcactccagcctgggcgacagagcgagactctgtctcaaaaaaaaaaaaaaaaaaaggagggcaaaaaggaaacaaggatgatatcattaccagatgctttctttaagacattctgattacagaaattcctactgctgtctcctagcacactaaaattgcctctgttcattgcagtgtcaacaaagaaagtaccttttttttttttgagacagagtctcgctctgccacccaggctggagtgcagtagcgcaatctcggctcactgcaagttccgcctcccaggttcatgccattctcctacctcagccttccgagtagctgggactacaggcacccgccaccacgcccggctaatttattgtatttttagtagagttggggtttcactgtgttagccaggatggtctctatctcttgacctcgtgatccgcccgcctcggcctcccaaagtgctgggattacaggcatgagccactgcacccggctgaaagtacccttttatggcagtgaaatttgcatcccttaaaaaataggatagtgtttaaaagaataagaatacattcttgaggacaaattccatgtaacatttaacactgaaatggactctaggagttattttctagatattggaaccataggcttactttgagtgacttaacctagagtatatagtggattcatggggaaatgccagcaagaacccattttctgactcccaaagccacctccattgcaggtgcgacacactttatggaccccagggggtgctgaatttccaatggcagtggaaactttggtgcttaaagtgttcacctgtgctccaggtcctggcctggacactcctgcgttggcccagcgcttaggctccgggttctacctgagacctccatcatgggtgttgttctttgccctgagtccctgtgacctgtttccacactcccactagcaaggcctccagcggggaagcacaaaacacatttccgtcctgcctgcccccttttagagtgtttcccctgtctttgggggtgatacctttgcagggatgttgaaccctctttctcagcctaggtgtttgtttcctccttcccagatcattgtcctctgccctgctttagaacctcagagaaactcgtttctgggctcttttatctgctcaaagtgacagttactttcacacagagattggggacctcaactacttgggatggcgagggagacaggagaccctacatctgcctctcgtcctcaagagcctccaggtgtggggcttttgggtggtgcctccatcacccagccccggcccccgttgttctgcaggtacactcccagctgaaggacctggtggacaaccacgccagtgtgtgggcatgtgccagcttccaggagctgtggccgtctccagggaacctgaagctctttgaaaggtatctctgcaccctgagaatggctcagtcttctcctgccttggcctccctatgtgccagtctgtgtctcacggcctgattcagcaacgattttcctgttgctgtctcccatgacattgcctcataccctggggagtgactgagggtggcagacctcacgcatcaggccgcacaagccacacaccttccagcaggctatgcagtcagtcatccctcacgccactgacacgggcccgtggtgcctccagagggctgtgatccattcccacatgacccagacaagagtcaccttcctgtggaaacttcactcagccttccttccctttggtcaaaaccatctgaattctatcctatagcgtttcactcactggctgatcccaccccaacctgcaccccgcaccctggcccctgttcacatgtgctcatggtcccaggtacccgccgccctcagaacaaaccaaggaaccacagctcaggcggggatttttcttttttgttgttgttttttgttttttgttttcgtttttgtttttttcttgagacggagtctcgctctgtcaccaggctggagtgcagtggtgcaatctcagctcactgcaaccaccaactcctggttcaagcgattctcctgcctcagcctcctgagtagctaggattacaggcacgcgctaccacgcccatctaatttttgtattcttagtagagatggggtttcgccatgttggccaggatggtctcgatctcctgacctcctgatctcaggcgggcatttttctgacagggattcgctgtgagcctcgtccatctgagttgccagaaatccagatcgacagccaaccagggcaggcagccatgttgccgcggccatgcttgggctgcttccagggggaatgtatatatttcttattgagacattatccacacatcacacaattcatccatttaaagtgtataactcagccgggtgtggcgtcacacctgtattcccagcactttgggaggccaaggcgggtggatcacttgaggtcgggagttcgagaccagcccggccaacatggcaaaaccctgtctctattaaaaatacaaaaattagctggatgcggtgatgggcacttgtagtcccagctactctggaggctgaagcatgagaattgcttaaacccagcaggtggaggttgcagtgagccaagattgcgccattgcactccagcctgggtgatggggtaagactgtctcaaaaaaataataataaaataataaaatatggctgggcacagtggctcacgcctgtaatcccagcactttgggagaccaaggcgggcggatcacgaggtcaagagtttgagaccagcctgagcaacatggtgaaaccctgtctctactaaaaatacaaaaattagctgggtggtggcacatgcctgtaatgccagctattcaggaggctgaggcaggagaattgcttgaacccaggaggcagaggttgcagtgagccgagatcgcaccactgcactccagcctgagcaacagagcgagactccgtctcaaaataaataaataagtaaataaataaataaaatgtataactcattggtttttagtatactgagagttgtacagacatcaccagtacttaactttagaacgttctccttaccccaagaagaaagcttgtccccatcagcagtcacttcccattttccccacaatcctggaaactctagacaacccctaattgattttctgtctctccggatttgccttttgtgaggatttcacatggaatcatgcaacacgtggtctttcgtggctggcttctttcacggaccctgatgttttcaaggttcatctgtgtcatagcatgtaatggataattcgtatttgattacatgttattaagaaatgttcgaccgagcgtggtggctcacgcttgtaatcccagcactttgggaggccgaggcgggtggatcatgagatcagatcgagaccatcctggctaacatggtgaaaccccgtctctactaaaaatagaaaaaattagacaggcgtggtggcgggcacctgtggtcccagctactcgggaggctgaggcaggagaatggtgtgaacctgggaggcggagcttgtagtgagccgagattgcgccactgcactccagcctgggcaacagagcagactccgtctcaaaaaaaaaaaagaaaagaaaagaaaaaaaaaaagaaatgttctagagccgggcatgatggctcaagcctataatcccagcactttatgaggccaaggcaggaggatcacttgggtctggaattcaagactagcctgggcaacatagcaagaccctgtctctagaaaagaaaatatttttttttgactagctgagcatggtggcacatgcctgtagtcctagctacttgggatgccggggtgggagaatggcttaagcccaggaggttgaggctgcagtgagctgtgatcgcaccactgcactccagcctgggcaacagagcaagaccctgtctcagagagagagagatatatatatatatatgcacacacacacacacatatatatgcacacacatatatatatgcacacacacacatatatatatatatatatatatatatatatatatatattcaattcagggaacaagtattctgacttcttcaagtgctgtagtagttcataacgtttgtggcataaaatattgtgatgctttatgttcttaatgtttcagggctgctgaaaaggggaatttcgaagctgctgtgaagctgggcatagcctacctctacaatgaaggccgtaagtcctcaccccacctgcatgttggcgcttcagataagtgtgagcctttggccctatgaagaagtggtccccgtgttagcagttcagttgctgtccttgctctatccgatggcctgcctccccattccctctcaggagctcgtgcccagatgtaccctgctgagggacctgctaatgatactctgactttgcaggttacgaaagtcgcctcttgttttagcaaaccctttaatttcagttggcaaagagtgactgagccagagcctcagcacgggggctgtttgggctccctgccctgtgcgccatgagcacgcagacctgcctgtggatgctggccctctccttggccatcctcttagaactctcgagacagagttcagcgtgccctgtaacacagagccaggcttctaaacgggaagcaggtacaggcaggttagaactggcctggtgcctggatcccttcatccccagaggccaggtgctccttgaaagaaacttgcgcagccttttcttctaccagttaactgcttatctgctcagcaccccaaggaacgagcccatgatctgtcccagctctcaaaacaagtaaacactgggatgtagcctcccacatttgtacttctaaacgatctggtgtcttgctgggagagagtccctacctggccggctggcagaattgtgactgacagggaccatgagcaacaccctcctccagaatcaggggagccgaggtcctacccctaccctcccatcaaagagcagttcccagacataaaattcacacaccatacagttcacccctctaaagcctgcaattctgtggttttttaggatattcacagggttgtgcagccattgccactgtctaattttagaatattctcctcgtcccaaaaagaacccccacccctgccctggacccattaccaggggtcaggcggtggttcccagctggagggagggtgggacatgaagcgtcgcggggtctccttcccctgaccttcagaatccaggcttccgggaggaccacagcaggggcattgatcacaatgacccacctgttctagacattaatgaagtagggggagaaaagacaggtgcccccatcctggagggctctactctcctgaaacacagctgctttgcactatggtgggcttcaggcattacactttccaccaagaccatggagagctttccacattccgtccctaagagacatccctgggctctgtcctgtctgtccccgcagtgtctgtgtctgatgaggcccgcgcagaagtgaatggcctgaaggcctctcgcttcttcagtctcgctgagcggctgaatgtgggtgccgcacctttcatctggctcttcatccgccctccgtggtcggtgagcggaagctgctgcaaggccgtggttcacgagagcctcagggcagagtgccagctgcagagggtgagtctgggcgaggggcagcacctgcgaggccacctgcagggtcccaggacacaggaagaccccgagggtagatcctggaccctggaaagtcaggagcctaagggaagtgaagatgcagaaaactgagagtgcagatatggggaacgcatctggaaatcagctggcacagaggaggaagcctgagagccagggtgggctgtggagttctgggtacacgtgctgacagctggaaacatggggctgaggctgcatggggcagtgggagctcaagacacaaatctggccaggtgtggtggctcacgcctgtcatcctagcactttgggaggccgaggctggagaattgcttgtggccaggtgttcgagaccagtctgggcaacatgatgaaatctcgaaacctcgtctctacaaaaaatacaaaaaagttagccaggggtggtggtgcatacctatagtcccagctactcaggaggctgcggtgggaggatcgcttgagcctgggaggttgagcttgcaatgagccgtgactatgccaatgcactccagcctgggtgacagagcaagaccctgtttccctttaaaaaaaaaaaaaaaaaaagactgaaatctgggagtggccctctgcaggggagggagggccagacagcagggccatgggcatgggacccaaagacagacaagggagtggtggcccccgggcagttctctgtgctggaaatcacacttctttctcctttttttaaagactcacaaagcatccatattgcactgcttgggcagagtgctgagtctgttcgaggtgagtcaagttgttctctgcactgggactttgtgttcgatacatccctagccgagatcctggaactgaaaagcagcagaagggggtgtccaaggcccaaaacaaaaggcaagccttgcccagaaaggcctagctggagaagccaggggacacatgtgggcctggccacgggctccgatcctggctccatgacccgcctggcaggggagtgggggacggtgagaacagcagagcagatctcaaggaggcatcgaacctcgatgctcactcgtctgctggccctgctcctcgtgggcctctcctgctcgtgtggacctctctgcctggccaaaatggtgaaaccacgtctttactaaaaaacacaaaaattagctgggcgtggtggcgggtgcccataatcccagctactcaggaggctgaggcagggagaattgcttgaacctgggaagcggaggttgcagtgagccgagattgcaccactgcactccagcctggcaacagagtgagactcagtctcagaaaaaaaaaaaaaaagtatggaaaaggaggaagatggtgagtagagtgattgaacatcaagtaaagaataagggccggtcatggtggctcattcctgtaatcccagcaccttgggaggccgaggcgggtggatcacctgaggtcaggagtttgagaccaacctggccaatgtgttgaaaccacgtctttactaaaaaacacaaaaattagccgggcatggtggtgggcacctgtaatcctagctacttgggaggctgaggcatgagagttgcttgaacccgggaagctgaggttttagttagccaagatcgtgccactatactttggcctgggtgacagagggagactctgcctcaacaacaacaaaaaaaccagccaggcacagtggctcatgcctgtaatcccagcactttgggagactgaggtgggtggatcacctgaggccaggattttgagaccagcctggccaacatggtgaaaccccgtctctactaaaaatacaaaaattagccgggcatgatggtgggctcctgtaatcccagctactcaggaggctgaggcaggagaattggttgaacccaggaggcggaggttgcagtgagccaggatggcgccattgcactccaacctgggcgacgagtgaaactgtctcaaaaaataaaaatgaaaaagaataagggaacaatgaactctgctgggatttattctaggatgaggagaagcagcagcaggcccatgacctgtttgaggaggctgctcatcagggatgtctgaccagctcctacctcctctgggaaagcgacaggaggacagatgtgagtggtgcctgctctgggtcggggggagttatgctggacaaaggcgtagttgatgctggtccttggatgcgtttctgtccacaaaagggaggtggctcttgctgctcccggtctctcagcctccgggaaccactggtcagtcggctattcttggtacccccaaaaatgactccaccatttgagagagaagaggtgggaagttagcgtagtgtcggcccttctgggtcttggttctgagttcctcccaagacacagttgtacaaaggctcggtgatctcccattgacaggtgtcagatcctgggcgatgcctccacagcttccgaaaactcagggactacgctgccaaaggctgctgggaagcgcaggtgaggtgcggggctgggatgacgtggggagctggcctttctccctccagccttggggcaggactatctgggctcccacattggggggcaggactatctgggctcccacatgggaggccaggattgagggacaccctaagatcggttcagcactggaactggtcctaaaggacaggtacactgtgagaagagctgggaaatgcgttattcatctctgcctatccactcttgcctctcagccagccaacctcttaattttcaaatgcttgtgagctatagctgctgtcaaaatttgtgccattcttgaaagttgtcccataggtagaactgatcttgacaacaaaacttgaggctacttgagagcagaggggcgtggagagtcccttcctgcttcctcttcctgttagcgccttgcttgtcatgtcacctggtcaccaagtcatccagggctacaggcaggaaatcaagcattggtagactctcccctcacagctataaataagttgttagggccaggtgcggtggctcacgcctgaaatcccagcactctgggaggccaaggtgggcggatgacctgaggtcaggagttcgagaccagcctggccaacatggtgaaaccatcgctactaaaaatacaaaaattagctgggcgtggtggcaggcacctgatactcaggaagttgaggcaggagaatcgcttgaacccgggaggcagaggttgcagtaccactacactccagcctgggcgacagagcaagactctgtctgaaggaaaaaaaaagttgtcaggacgaatcaaagaaagctcctatttgccaaatggatagaagcttgttcttgtcaccccaccaagtgggtggcagagtgatctgcgctcaaatgctagggacaaaattacaaattgataatggcccagcccgaggtgtcatagcacattgtggtgttcacgtccaaaaagccagtctacagatttacaagaaggccagacgtgatggctcacgcctgcaatcccagcgctgtaggaggttgagttgggaggatcgcttgagcccaggagttcaagaccagctctggcaacatagtgagactccatctcgacaaaaaattttaaaattagctggatgggctgggtgcaagtggctcatgcctgtaatgccagcactttgggaggctgaggcgggcggatcacgaggtcaagaggtcgagaccaccctggccaatgtggtgaaaccccgtctttactaaaaatacaaaaaaattagctgggcctggtggcatgtgcctagagtcccagctacgcgggaggctgaggcaggagaattgcttgaacccaggaggaggaagttgcagtgagccgagattgtgccactgcactccagcctggcaacagagcgatactccatctcaaaaaaaaaaaaaattagctggatgtggtggcgtgtgccttgtagtgcagctactcaggaggctgaggcaggaggatcacttgagcctgcgaggtcaaagctgcagagagccgtgatcgcaacattgcacttcagcctgggctacagagggagaccctatctcaacaaaaacattgtttacaagaaatgcaacaacgtagttctcgtggaagttcaaggggcctcagtcaattctcacaaaagaggaaatagggccgggcgcagtggctcacatttataatcccaacactttgggaggctgaggcgggaggatcacttgaagccaggagttctctctgttgcccaggctagagcacagtggtgcgatctcagctcactgcaacctctgacgcctgggttcaagccttctgagtagctgggactataggtgcctgccaccacgcccagctaatttttgtatttttagtagaggtggggtttcaccatgttggccaggctggtctaaaactcctgacctcaagtaatctgccctcctcggcctcccaaagtgttgggattacaggagtgagccactgcacctggccaaaaaaaattaataataaataaataaactcaagtggttagaaattggaatgttcaaccttactactagtcataagagtgcacttttaaatgagatattttgggctcatgatattagcaaattatatatatatatatatatatatatatatatatatatatatatatgtttttgtttttgttttgttttgttttgttttgttttgtttttgatggagtcttgctctgttgcccaggctggagcgcagtggcacaatctcggctcaccacaagctccgcctcctgggttcatgccattctcctgcctcagcctcccaagtagctgggactacaggcattgcaccaccacgcccagctaaattttttgtatttttagtagagacagggtttcaccatgttagccaggatggtctggatctcctgacttcgtgatctgcccgcctcggcctcctaaagtgctgggattacaggcttgagccaccgcacccagcccttaattatatatatataatatccataattagatatatttataatatctattattatattataacataattatatttagtctgccagctatttataatatataatattatataatataatattattatatataatatataatattatataatataatattattatatataatatataatattatataatataatattattatatataatatataatattatataatataatattattatatataatatataatattatataatataatattattatatataatatataatattatataatataatattatatataatatataatattatataatataatattattatatataatatataatattatatataatatcatattattatataataattatatataaatatgtatttatatattgtataacatataattatataataattataataatataatatatatcatatataatattatatattatattctataatatataatatattctataatatatgtaatattatattctattatatataatatatattatattatatatattatattataattatatattatatattatataatatataaatatatattaatatatatgattattatatattattatattatatatttttatatatttatatattatatattatttatgttaattatatattatataattatattatatgttctataatatataatataatattatgttataatatctataatatatattatagatatattatatataatagatatttttatatataatatattacatattatatattatatgttttatattgtatataatatatattatatataatatatatataatatataatatatatatatttctctgtttttgggtggctagctggtaacttctgaaaatagctgtttttaataatcacagtgtttgctgggatgaagctgtgatgaggcaggtgctcctattcctgggtgtaaacattggcagaagcctttcggagagcactggggcgtatggccagagacttaacacagcttccccaggcattagccatgtaagaaactgagacctgagccacggtggaaaggccactgacatttcattatatatcttttctcatgtcatctattacttatacaaaaaggaataataattaaaacctgagccatccttgttcccgaagcttgtgaaggtttaagttaagtagggcagtgtgtccacatgcatttggtgcctgaatgggcctttgcttcagaaatggaaaactgcaacatggctgctgtctcacgctcatgtttgtcttttcttcctcagctgtctttagccaaagcctgtgcaaatgcaaaccagcttggactggaggtgagagcttccagtgagatcgtctgccagctatttcaggcttcccaggctgtcagtaaacaacaagtcttctccgtgcagaagggactcaatgacacaatgaggtgaggcattcaggccggggcttctaatcagagcggcgcggaagccagcctccaggggaagggagccctttccacttaaccccagttacctgtgacagggcggcatagagttcccttatcaccctttttttttttttgaagtggagtctcgctctgtcgcccaggctggagtgcagtggcgcgatctcagctcactgcaagctccgcctcctgggttcgagcaattctcctgcctcagcctcccgagtagctgggactacaggcacccaccaccatgcccggctaattttttgtatttttagtagagatggggtttcaccatgttagccaggatggtctcaatctcctgacctcgtgatccgcccgctttggcctcccaaagtgctgggattacaggcgtgagccaccgcgcccagccttgggtgttttttaaaaccagtaatgccaaagttatcgtggactttttggaagaaaatatcctactctgctttcttcagttacttttttttttttttttgagacggagtcttgctctgtcacccaggctggagtgcagtggcgtgatctcggctcactgcaagctccacctcccgggttcacaccattctcctgcctcagcctcctcaggagctgggactacaggtgcctgccaccacgcccagctaatttttttgtatttttagtagagatggggtttcatcgtattagccaggatggtctcaatctcctgacctcgtgatccgcctgcctccgcctcccaaagtgctgggattacaggcgtgagccaccacgcccagccaccttttttttttttgagacagggtctggctctgtcacccaggccagagtgcagtggcatgatttcagctcactgcagcctccgcctcccaagctcaagagatcctcccaccttaccctcctgagtagctgggactacagatgcacaccaccatgcacagctaattgttgtatttttagtagagacagggtatcactatgttgcccaggctagtcttgaactcctgggctcaagcgaacctcctgccccagcctcccacagtgcagtgatcttttttaagccacagaacacattgaacatcttttttttttttttgaggcaggctgtctgtcacccagggtggagtgcagtggtgtgttctcggcttgctgtaacctctgcctcgggctcaagcctttctcctgcctcagtcccccaagtaggactacaagtgtctccactctattcagaaaggcatttaccatattggggcatcatttaccgtattggggcattcccttgcgactgtccaccttctcccgctccctgcacgccccgagggtcagggttcatccactgtgggcagaccaacggctgtgggctgacttttcactttgcgtcaggtcgaggtctcaaagcgcttgtgtttgggagcaccaggaacacagtcgaaggatgtggggcctgctttggggctgggacccacggagcctcccgggcttcctgtgacatggcctctccagccttggttccagggtaaacccatgattccagagctagccagcttatttggtcgggcccaacaggtggggttgaaatcgcagacagggacacatggagaacgcccccaccagttcccacgtgcttctctttccgcaggtacattctgatcgactggctggtggaagttgccaccatgaaggacttcacaagcctgtgcctgcacctgaccgtggagtgtgtggaccggtacctgcggaggaggctggtgccgcggtacaggctccagctgctgggcatcgcctgcatggtcatctgcacccggtgagaagcccccttggcccagctggcagggacgtgctggcctttcccgggttcagggtcacctgcccttcatgtgctcctcactggtttggttttgttttgtgttgtttttttttttttcccgagaccaagtctcgctctgtcacccaggctggagtgcagtggtgcgatcttggctcaccgcaacctctgcctcccaggttcaagtgattcttctgcctcagcctccagagtagctgggactgcaggcgtgcgccaccatgcccgactaatttttttgtatttttagtagagacggggtttcatcatgttggtcaggctggtctcaaactcttgatttcaaatgatccgcccgcctcaacctcccaaaatgctgggattacaggcacaagccactgcgcctggccctcactggttcttgactcatgagccacgagtgtcccacctggtcagacatggagtgccacgctgagggccttttgcaggcaggggtggcagaacagccttcagcgtgtgggggccgctgtgtggggtgcctgcatccaggcaattcatcctggcatgcagtctcaggacccaaagtgtggcctcgctctggcaggcacaggctggactgccctgtcccctggctcctgagggcagcaggatgactgatcagggagggtggcagttggctgcccttctctgaagttgggttctaaagtctgttgccagagtttcctacactcttggagttagagagtttttcgtcccccactggtgccctgcagagcccactccagccacgtgggtgtctctcagcagcagcgtgcgtccttacacggcagcctgtccttttcaaatcagaccactgctttcctttaactaatgctggatcccctagttccgcctttggaaataacgtggaaatgattctcacaatacgatttgcatttcctaaaccagctgtccccagcatggtctacatttcccgaggaagtgctttccagaccgactcctctgtagagcctggtgggtgaggataggcttggctgcacacagcatatgtgtaagctacagagacttgtttctttcttgcacaggtaacccagaggcagaggttccaggctcaggtcattggcatgttttttgtttcatgaggaagcagaggagccccatctcccatcttaatctctgccaccaactagggtgctgcccttgtccctgtgacacctgtacctgccacattcacctttgcactgagcttagtcttgtgaccacatctcaccagacgggaactgggaggtgtagtctcttcgggcctgtgtgtgccagctcgatgcagtgtcattcccatggaaggagggagcaaaccctgccacaagcatccagagctgtcttcagatgcgctcttgggcctgaatccagcgtcccaggtcttccgaccagagacgactgaggaggtcgggcggccgcctccctggatctgactgcacatccatcactgcaacctacgacaaagctcctgggccacaaccggctggcagtgagagaataactgctaaaaacgtttcagggagctgagtccaatttcttccccaaccacaagacctgattgcagtggtccatataactatcaccacagctccctcaaatcaactctgccttattatcttttttttttttttttttaaatccggggaccaggcacggtggctcacgcctgtaatcccagcactttgggaggctgatgtgggcggatcgtgaggtcaggagttcaagaccagcctggccaacatggtgaaaccctgtctctactaaagatacaaaaaattagctgggcgtggtggtgcatgcctgtaatcccagctactcaggaggctgaggcaggagaattgcttgaacccgagaggcagaggttgcagtgagccaagattacaccattgcactgcagcctgggcaatggcgcaagactctgtctcaaaaaaatacaaacaaaattagccagacgtggtagtgggcgcctgtagtcccatctacttgggaggctgaggcatgagaatcacttgaacctgggaggcggaggttgcagtgagctgagatagcgccactgcactaatccagcctgggtgacagagggaaactctgtctcaaaaaaaaaaagattttaaaggctgagctgccccccacctctgctctcagaggtgccctgcccccaccagccatctcacaccccacgctgggctctcattggccactgacatcttgtctttttggcgtctgcagcccccacgctggcaggtgtagtccctgcgcctcttgtcctcttggtcaagtgaatgacgcatgcaacctgcagagtccccaggacagagcagccaagggacttggcctcagtccaaggggaaggtgccttgcggggggccgctggagcagcgtgttccctgatagttggcgctggttgacaacagagaacagggtgaccatcgcctagagacagtcaggattcctgcggccacacagtgccgggcacagactttccaacaacccttgggccctttgcctccaattcctagatctggtgactcacccaccttctgggtctataacatttctaccccactgatagagctgtcacgtgacaggcaaatctctgtccttggtgtcttttagcaaactgaatgctcagggcacttgggccttttgcagacatttgtgagtctgcctaacagccttgctgctttctgtctgccttgtggctctcatccctctttccagcactttctgacctcccctttgttattattatgatgattattttttgagacagtgtcttgctctgtcacccaggttggaatgcagtggtgtaatcaaagctcactgcagcctcaacttcctgggcttaagcaatcctcccaccttagcgtcccaagtaactgagactataggcacgtgccaccatgctctgctaattttttattttttaactttttgaagagatagggtcttgctttgttgcccagggtggtctcgaactcctggctgagctgtcctcctgcctgggcctccccttttttaaatgccccttgtcagccacaggcagctggctccattatgaagcctctgtttgtcaccaaagcccaacgccatggctccctccctaccttgaggcctcctaaagccttgggtccctccgccccacccctgccccaggaagtgggctccaccctgagaccccttctcggcgttgcaggtttatcagtaaagagatcctgaccatccgggaggccgtatggctcacggacaacacttacaagtacgaggacctggtgagaatgatgggcgagatcgtctccgccttggaagggaagattcgagtaagcagcggttccattttccttattaatcttcgttgtcgctgtgctggagggtgggggtgggcattcagctttcctgctgtgggagggcctcatggactcagagagcagctgtctctgctgtgcccaaagccatggagcaggaggccacggttgcaccacgtcgccatctgcgctggtgcgctacgcgtgcagcatcggcgtgaacatcatccgggccagaccctgcgctgggcctgcatgcggcactgcaccaaggagcccccgagcgctgagagcccacaccccgtcccggctgtctaggtccccactgtggtggattacaaggaggtcctgctgacgctagtccctgtggagctgagaacccagcacctgtgcagcttcctctgcgagctctccctgctgcacaccagcctgtccgcctacgccccagcccgcctggctgccgcagccctgctcctggccagactgacgcacgggcagagtaaggagtggcccttcccagggatgcctgtgtcggggaaggtgctgacataggaggaggctgtggggaggaaaagagtccagcatccatttgtcctggttacttcttggggggtgagatacagcacggctcctaccttcagtgatgtcccagatttctgaccatgagcctgcacgccctatgtatgggtttttttcaaaactattttaaaaggattgcaaccctgagctccaagaaactccacagcagagcccacagagctatagagcgggagtgttcaggcggctgtcaccacagcccctccgtcccctccatcccctccgtcccctccatcccctccacccctggcctgctttcctccccagcacagccctggaccactcagctgtgggacctcaccggattctcctatgaagacctcattccctgcgtcttgagcctccataagaagtggtgagttttggccgggcgcagaggctcatgcctgtaaccccagcactttgggaggccgaggcgggcagatcatttgaggtcaggagtttgagaccagcctggccaacatggtgaaaccccacctctactaaaaatacaaaaattagccaggcgtggtggtgcacgcctataattccagctactcaggaggctgaggcaggagaatcgcttgaacccaggaagcagaggttgcagtgagttgatatcacgtcactggactccagcctgggtgacagagcaagactctgtctctaaaaacaactggccaggcatggtggctcacacctgtaatcccagcactttgggaggccaaagcgggcggatcaccgaggtcaggagttcaagaccaacctggtcaacgtggcaaaaccctgtctctactaaaaaaaaaaaaaaaaaaaaaaaaattagctgggcgtggtggcatgcgcctgcaatcccagctactcaggaggctgagacaggagaatcacttgaacccgggaggcagaggttgcggtgagccgagattgcgccattgcactccagcccaggcaacgagtgaaactccatctcaaaaaaaaaaaaaaaagttccagtagtttcttatctcacacatttttcacattgagagcagctgctcccaacccaagctcattgcacaggcagcagaacatactagaaaaaatgagggcatctccctgacccgtggtaacttgtgcgtgttgtcaagttgtcatctagctcaggcactggcacaccgtggccctcaggcggcatctggctgcttttgcgaatggggttttcttggcagcagccaccctcactggtttccacattgtctgctgctgcttttgctctggcggtggctgagctcatagtgcagcggacaccacgtggcccccagtcaggaaaatactccccttcccttgagagaacagcttctgccctgatgcagctgctgggatagagctatcctctgtctcactgagaagatggagactgcgggtgggtcccttgcgccgtcgtgcccggatgtgaccccctgtctgccccagccccactgggcttccctccacctgccccggcccctccgcccttctctctggtgagcctggcccggccctcgccacatctaagccccttcactcgccctggcagcttcccttcagcccacgttggtttgttccatgcagttcatgaagtccctaccgtggtccaggcgctgggggagagggcaggacagagagttcagaggtcaggtcgtgacgagagaaacagcaggcaggcgcgcggggcaggtggcgcgggcgggggcgactcccttcagggagcgtagccggggtcacctgggcatctgagtccagggcaaagggggcagccatgccagggcccagtgcagaccagtggggctgggggccatgagtggagtcatggcagtgaggggtgagggggacaagcacggggctgaatttgtacccggccagccatctccgtctcccctcctcagctgtgctcacagacttgctcctcccacctctcggcacccccactccctggtctcccacttccccgcttctgccatggcttccttttcctcagccaaatccagcagactcagcggtgtgggcttttttttccttttttgagttgggggcccaggctggagtgcagtggcaccatcctagctcactgcagccctgacctcccgggctcaagggattcttttgtgtcagcctcccgagtagcagaaaccacaggcaccagcacagcaggcctgggtgcttttctccagccagcattacgctgaccctccctccctcgggggcttcggcttcctgccctaggccatgcggcctaggtgttggtctcccttcccacccaccccaaggggccccggaattctggctttctgccactcctcagactccttcctgggagacttcaccacttccagaattcaggccacatctcaaccttgacctgccacccccctgccagcgtgactcagccaacggcctgttgcctgttctggccctggtgggtcgtggtgcatgaagccctgtgtgcccagctgaggcctccaccagccgctgctgcttctccatccctgcatcctcgtcagtgcagtttcctcgtgcgctcacagcttggggactggagctatccgtggcggctgcccggcctcctggaacactgtggcagccgccccgcacatgtcccgtgtacgtcacccagggcctcgctgtccggcttccaggatgagatcagaactccctgggggtctcgatgcccttgagcagccccttctgtggcccatctgctttttctcccaccatgctgtgctccagccacaggggacctggtggcatctcccgggctttggcatgtgctgctgctcatgctgctttctcctgcagtgcccggaccctgtgccttctgggcaaggaacgaggctgacagtagaagggttcgcatgggtctcgtcccacccacctttgcttatggggagcacagatcgtcccaaccctggccaccaaaagctgtttctgggctgcgtttattctcttcctcctgaagaagttaattttttttccaaacaagataaattagaaacgttatttagaaactacacttcctttgattgtgtgatttaacgggcttttattcacacagttgtgcttgtcatcacaacaatcaaattgatgacattttcactttccccaaagggacaacacacccctcagctgtcaccctcccgttccccccaacttcctcagcgctagatgacccccagtagtctactttctgtccatggatgtttcccattctgtacattccatataaatggcgtcatcggacaagtggccttctgtgtctaggtgatttccctcgcggtaacgtttgctgggtttgtccatgtggtgtgtgtccctgctttgttctttttcatggctgaataatattcccctgcatggaccacatgtgtttatccatcccgcagctggtggacattttgcctattgtgaacagtcctgccatgaacattctagtacaggtttctgtgtggacatagtttttcctttttcctgggtctttacctagagaggaattgctaggtcctgtggtgactgagtttaaccattcggggaactgccaggtcagattccagagtgactgcaccattttgcattctcattgctcacttcagtgaactgaagctaaaaatggggtgggggtgcctcacatgtccactccacgtgactctgtttccagcttccatgatgacgcccccaaggactacaggcaagtctctctgaccgccgtgaagcagcggtttgaggacaagcgctatggagaaatcagccaggaagaggtgcctccctcccgccacctgggcgtctcatggggtgctggggtgtgggcgggcctcaccctcggggcctctgcaccccctaactctagcttcccctcaggtgctgagctacagccagttgtgtgctgcattaggagtgacacaagacagccccgaccccccgactttcctcagcacaggggagatccacgccttcctcagctctccctcggggcggagaaccaaacggttagttaccctgcgttctggctgcgccatacaatgctggcatcctcgtgccggcccagttccctcagcgcttcctcacacagagaggcccccaaggcttgtcaggggagcagcagatcccaggacagtgaccctgggacggagccctgcagtcatgcctcgggcccctgcgtaacctccactgtctccagcccaggtctccttcctcagaggctattgcctctcgctctgactgggctccctgtggaggaagatggtttcgagcacgcgggagcctagcctggctctagccctgcccgtgcctgtcatgcgcgtcctggacttctctgctccatgatgctgctgtcactcccggcactcgagctgtgacctgagtcacatccccagcacttccctcgccacccgtgtggacctgtttacccgcctctcctatctcagcaccttggctgttcctcctggagttaacttcctctttctacctcacccgcctggagaactcctactgattccacaaggccccgatgaacagggccctccctgtgctgctggccctgcgccgtgacccctcagcaccatgtgcaccagtaaccttcccaagggcaggcactgggtggctgggtctttcctgtcaatataggaccaggcagggctgcctccagaagcgttgtgtcgggagtgggctcctggcaggagacctcaactcctggggagccctggggaagcagccaaagcccctgctgctgcttcctccccaagaagcgtgacagcactttccattgtgtggaaggcaggagacctgaccctcctgtgtcactccacacacgcaccgactccctggggccagggtcatcacgaggaaagtccatgcagatacgcacggctactccaggagggggcctggccctggccctgtgctcagcctcgctgtgttaaacccgcttctcagaggccccccacagccccatcagtcttctgagacagacccccacgggtgacactgggatagctctctccaccccccgccctccaccaggccctggggtcaggaagtggaaaggctcagctggtgtggcggcttttcccaggctcacgcccacacactggcctctagccccatcctgagcaagacttgaccccagttgggtgtgggtgtcagcaccgcccaaggccaggccattccatgcaatctgcctggcgccgggctaagcactgcctgcaccttattaatcaacaccagaggggccgggtgcggttgctcatgcctgtaatcccagcactttgggaggccgaggtgggcggatcacctgaagttaggagttcgagaccaacctgcccatcatggtgaaaccccgtttctactaaaaatataaaaattagctgggtgtgatggcgggcacctgtagtcccagctactcaggagcctgaggcaggagactcacttgaacccgggaggtggaggttgcagtgagccaagatcacaccactgcactctagcctgggcgacagagcaagaacacctcaaaaaaaaaaaaaaaaaaaaaaaaacactggaaggtggcatcatcctagaggtttccaggggaccagatggttggcccacgccccacagctgagccgggtgggctgggcttcacacccagacctggggcctgagtttgcctgagctgtcctccaggttggccctgcctgaagggcttatacctgttctagcttcaccggcatcttcttcgtagcagaacctttgggagcacgtggtgacaggctggggcacgcgggtgttagaggcaggtgtggagggcctggcctcccagcgccgccgtccatgactgggtctcctgggctctctccaccttgcaggaagcgggagaacagcctccaggaagacagaggcagcttcgttaccacccccactgcggagctgtccagccaggaggagacgctgctgggcagcttcctcgactggagcctggactgctgctctggctatgaaggcgaccaggagagtgagggcgagaaggagggcgacggtgagtgtggggccagggtgcaccagaagggacatcacacagagggtggctctcaccgagggcctctgggcacccggccctgtgcgagcgctgtgggaggaagatgtgcacagagtgcggggtggggccagctcctgccccgccggggagtgtgtccagacatggggagagaggaggggagagcccccaaaagaccacagctgctcccaccacacagggatgagaggacttaggccacacctatccggctcctgctcattccgtgttgggaggacctcactaggatgagggaggcagagaccctgtctggagttcatggagatccttctaggcctgtagtctcatgcctgtaatcccagcaatttgagaggctgaggcaggaggatcacttcaggctagaagttcaagaccagcctgggtgacacagcaagacaaaaaatttaaaaattagctgggcatcgtggcgtgcgcctgtggtcccagctactcaggaggctgaggtgggaggatctcttgagcacaggaggtgggagctgcagtgagccgtgatcatgccactgcactgtagcctgggcgttctttctagaatgttgtttgaggtgtgcccacgtggtatacgtgacactcctcactgccctgctgggatcactgccctgtgcaaaccccaggcagactgcggggtccttgccagaagcccagttagtgtgagtcctgtcagtttcccggttgcttgcttctgcgtccacttggcttgagctagatggccaacttgtcatctccacatttgttggagtcatggcgggcagctgtccaacttggaagaggcatgtcacccacgcttctcaccacaggagggtaacacaggggaccgtagcaaggtagaagattcttgacctggacttcagggtcctgacctggcagggggtctcccctgatgcttgggtgtgacatgacttccctccccaccaaccttcctgcagtgacagctcccagcggcatcctcgatgtcaccgtggtctacctgaacccagaacagcattgctgccaggaatccagtgatgaggaggcttgtccagaggacaagggaccccaggacccacaggcactggcgctggacacccagatccctgcaacccctggacccaaacccctggtccgcaccagccgggagccagggaaggacgtcacgacctcagggtactcctccgtcagcaccgcaagtcccacaagctccgtggacggtggcttgggggccctgccccaacctacctcagtgctgtccctggacagtgactcgcacacacagccctgccaccatcaggccaggaagtcatgtttacagtgtcgtcccccaagtcccccggagagcagtgttccccagcaacaggtgaagcggataaacctatgcatacacagtgaggaggaggacatgaacctgggccttgtgaggctgtaagtgtgtcagcacatttgccgcagtggatgtgtactgagggggctggaggcgaagggtgggagcatagcataggaacgctgcatagaccatggaggcctttgcgcagagagcagagaggatgacttgcggccaccaagtttctgtctccgcgggagtcccgtgcaagccatcagaatgttgaaatgagggtgaagagctcagatccctctctttggaaagtttagcctggaagcagttggccacactgtgtggagggcacctctctgtcccttccgtgtctcactgtctctggaagcttcagcccatgtgtgtcctggtgttcccagccccaccagagccccgtgccgggagctgacagctttcacgcttaaggcacgtgtgacctgggtagtcagacaccacttgagcccctgcccacatctgctggtttggggcttcagtggggagctgacagctgtgagcacaccactgtcccctcatccacctcggcctgcatggggcacccacttccttctgggtggggcttccatggtaagggggcctgcgtccctgcacactgcgaggactgccttggccacaggcccactccctacgacacgtgactcgttttagagctctgtcccagaggcgttcgtatgtgacccacagatggcgtcaatgtgaacacctctctttgtgctgaatttctgggccattcttttcctgtcttatttctaaatttccttcttccaagatgaaaacaaaagaaaaacttaaaacagaaggtattaaaaaaacaagagattcccaccattatttaggttcacctgcaaaacaaaaatcttactccagcccctcaatgccatcctgacacactttatgcaaaaagaattttcccagataggctagccagaaaaaacttcaagtcctctgtaacatctgaggtgaccaagaggcagaagagcagagcagtcgggggccgtgtcctggctgatcccaactgcagctctgctgtgggggcccgtgggagggaggcagacccctgggctttcctgctggccacggagactctgctcctgcatggaaagggagcctgggagccagcagcccacgcctggggagcctgcctggggccatgtgaccatggcctctccctgggaacgggctgaccacaacacaccctgctgccatccacttctgtttactctgcaaatgtaagaaagaaccacttggccagaagtgtcccccagatgcttttttttttttttttttggagacagttttgctcttgtctccccggctggagtgcagtggcatgatctcaactctcaactcactgtaacctccgcctcccggatactcctgcctcagcctcctgggtagctgggattacaagcacccaaccacgcccagctaatttttgtattttcggtagagacgggatttcaccatgttggccaggctagtctcgaactcatgacctcaagtgatccgcccacttcggtctcccaaagtgctgggattacaggcatgagccacggcgcctggcccccaaatgctcttgaaccggaaacccagggatgggagatgctcactgagctgctgcttttatgtgtgctggtgctatgtgtgttcatgtccgcggcagctgtctttttgctactataagggaattctggccaccctgggtggggtgtggtcggggtgagaacccaagcgttggaactgtagacccgtcctgtcgactgtgtgcccctgggcatgtgtgagcctcagtttcctcatctgtaaggggggcaatgatacctacctcacaggggtgttgtgaggattaaatgtgaggaggatagtggcagatg

SEQ ID NO: 8 - DNA, 34077 bp, Homo sapiens
gcagagcaccgcgccttagccgcgaagttctagttcttgctgccggtcctaacgtcccgcagtcttcgccagccagccgtcccgcatgcgcgtttgggcggcgtggagcctgctgccatgaagtcagcgtgagtacgaggccgccgagcagggagagagggcggacgggggccgaggcctcggggctgggggcaggcgtctccactcaggccgcggccgtacgcgggcagcgcggacagcatcccgcccggtgctgctgcggccgcgaccccaaagtgggaacctccacgtgtggccgctccgcgggagcctgggcgcggagacccctgccgcgtcgccccccgccgccccgcctgggcctccaaggggccaggaagggtcggcccggagccggggttgttttacgccgcacccggttcccgggggcggggcagtcctcctcggggtcccgggacagcctttcccttctccctcgctggctgccgccgcctccagagtgcagttggccaacttagtgcgggtcggaggtggtctcgtgtgtggagcagagcgagtgtgctgggcattggttagatgggctccgtttctggagagccctggcaccggtgatcgccgctagcttttttttcagccgagcaccctgtccttgaggccgagcccatccgcttacacaggccagttacttctgctgtattttgtggccgcagagaacctccgcccacattcctaagctaatattttcggcgcagcatcattcctgggtaaagaaatatttgtcgtgcaaaggagaggattggctttattaccatttagggagtcgtttgcaaaagacaacttgtttattaagaggccgaagtcaaaatctttagatgaaaaaaattatatataagaaatatacgttgagtttaacttaagcccaccacaaagtattttgcactgaataacacgaatttgcttgtgtttcatctgagaatatgtttggaaaaatatttttaaactacagtcgaagccaataatcttacttaattttaatgtgttaaatgtatatctagcctatagataaatgtgaagggaaaaagatgagatgctagagaaatggtgaaatcaatcaaaataactttttgattgcccctacttaagaaaccaagaaattggcagtttgggaccagattttgtttggagacaaagagtaatgttttgagcattcaatgactggttgttccttgaaagtacaggcgtaacccttgacgaaagaatggtttcctccatgtgcatttttatagtgtattgaagttaatcgcttgtcagtctgtaaagtgtgggcagttataatttgtagtgcctctgttaaattgttgctcaagaaaatatgcaagccattttaagtatagaactaatcagagaataagtaggtagctttggtaccaaaaatgtattctaaagcaaattttaattacttttggattacgcatgccacaaacactctgctactatgattattaatgttatttgggatgcagtgttttgcaactgctaagggataatttacagataacctagaaagattgtataagttttaggtgaggcttttgtattcgtgttgaactgaaaaaaaagttattattattttttaatctatgaccaggagagctaagacaccccggaaacctaccgtgaaaaaagggtcccaaacgaaccttaaagacccagttggggtaaggtatccctgtaaatttatgtgtggtgtttaagaaacttatctcttcagtcctttctgtcttatgtgtatgcttggaagggaaagaagaagacatgtggaagtataatcaaagaacatttagttaaatggatgtactacattgtgtaaaactagtgctagctgtgaaattttctctataagattaattaaattagtccagtaaaatgaagtctttggttgtcaactgcataccttctgtaattataatttggagagttagataattaaaaatctccaactgggttcatattcatcccagagaatatgaactgagttcatgccatacagtaactgatggcatgaggagagttccaaacttcttgggaccaagtttaattcagttaaattatgaagaaaaaatgaagcaggcaaaaagaataagaattttaaaacaaaacaacaaatggcaaacaaaaagggttctttgctctgaggtattttaaatctatccctcgttgccactggagtgggtccctggctctgagttaagggaaccgggtgctttgcacacagctgaatgagttttcctcaagccccctcccctgctttcaaaaatgtctctgtaggctgggtgcggtggctcacatctgtaatcccagcactttgggaggctgaggcgggtggatcacctgaggtcaggagttcgagaccagcctggccaacatggcgaaaccctgtctctactaaaattacaaaaattagctgggtgtggtggtgggtgcctgtaatcccagctactcgggaggctgaggcaggagaattgcttgaacccaggaggttgcagtgagctgagatcatgccattgcactccagcctgggtgacaagagagaaactctgtctctaaataaataaataaataaaaatgtctttgtatattaaatgttgggttaagctgacaagtttttaaattgacatccatttccaagaaattctaacagttttaaaaatctcgtgtgacatgttgttgacttttagagatattagtagtagtataactattatttgtgtacaatataatagtgaatacactgcaatttgatttttattaaaatttattttaattttgtgtgtatttaaagtattctcatatctaatacatacttgtatttgtcaatctcaagtagcagattttaattttcttagcccttggagatacagagctcttaaattgagagactgaatgtttgttgaatgaatgaatgaatgagaagcttaagtgaaaaatcaggcaaaaggtcgaactttcttcttaaagcaccttcctatttcttcaggtatactgtagggtgcgcccactgggctttcctgatcaagagtgttgcatagaagtgatcaataatacaactgttcagcttcatactcctgagggctacagactcaaccgaaatggagactataaggaggtaattctgatttggaccaagttgtttttactcaatatgttgtttcctgaatgacttctagatttttagatgtaacaaagttcatttgtgagcccacattttcaaaagacttatttacttcattataaccactgtatctaaagtgtttttgacttctgggatgcacagacatacctttggtatgctggggttagaggattgcttttagcagataatttcttacactgagtattattgtttcttagagcatgtgttagggatgatttaatgtggaatgatacatgattgtgctaggcagttttatatatacaacttgatgtgtggaaatgaaaataacatttaataatagacattgtttacttgcatcaacctcctatgcagtgtttttatttttagtaaagttttgagtcagctcaaaaatattgtttagcaaatgtgctaagctaatagttggagggtggaaggagattaaaaaaaagagcatgacatactccttgcctttagaaagtttataacttaagatatatggtaaacaaataattctcatataaataagacagaaagttagatgtgctaaagatgaggggaccgtgggaatgcagtaggattaattcaggctaccatttctacttctagctgtcactcactcttttgtgcctactattcctgtgaaattgctcttcagaagactaccagtggcctctttgctgctaaatttgatgtatacctcttcatcctcattttaacctgtttgtcagcagcactctcctgtctccccctccagctctccttgtatctccagctgaaaccttttctctggctctcaacattcaaccacttacttgatatctctgcttggatgtcacatgtgcatctcaaattttacatgcccaaaaaggagttcttgatttttcttattccctctctaaatacttcctcccttgttttcttctcaaggaatggcactatcgtgtgtccagttgctcaagccagaaacctggtacctaccttttacttgcctctccttataactagttcattagtagctcctatcagttatattccaacatgtgtcttgaaactgtcctttcatttccatctccactgccaccaccctagtctgagccccattattaatcactgagaccagagctactgtaatgaaggagtagcttttttatttttaatgcgtcacagctgagacttttgtacaacttgtgctagatggaactgcccgtgtgagttagacaatagggaactagttcataatctcttcatagagatgagcctattgaatacatgctgaaatactgataattgagcagtgccagatggaggctcatgcctgcagtctcagcactttgggaggccaaggtgggtggatcacctgaggtcaggagttcaagaccagcctgaccaatatgatgaaaccctgtctctactaaaaatacaaaaattagccgggcatgatgacgtgtgcctgtaatcccagctactcagtagcctgagacaggagaatcacttgaacccaggaggcggaggttgcagtgagccgagatcgcgccattgcactccagcttgggcaacaagagtgaaactccatctcaaaaaacaaacaaacaaagaaacaaacaaacaaaaaacaactttctaaacatttaagtagtctggtaaccaatctcagactggcattggtttgctgagtgtgctttgggtatcattgacaagacttccaaagcccaactgcctccacttggaatcttctctaatccatttctacagagcagacagtgatcttttaaaacataaaatctcattttcctgttcaaaacctttcaaagaataaaatctttgaacagacaaaatcctgcttcatccgtctcccatctgtctctccaccttcattcatcttttagtattcatccaatcctttgagtttcttggataaggcagaatcctggctgttagctgttgccttaacctggacttctctttttctgggtcttagcatgggtcatcgttgggtttcagcttaaatatcacctcctcgggttgtatagactacccaatcagaaacagcaccccacaacccctctcccctggtctgtactctgtatgcctcctttacattacttaaccacaatctatttgtttacttgtttattgtctttcctctaccataatgtaaacttccagggaatatgtaccttatatgttctgttcatcaaatagtaaatatggcttcagcaagaatgaatggtctgggagggttttttggaggagcaggtctttaaggatataatatagttaaacactgatttactgagttttacttctttaagtaaatttcaagtatgtataaatataggtatcgagtaggtatcgagtaggtataaaaaggtttgatggggattaaaaatagtcactgctttctgacagaaggcaacattgtataatgaaaagagcattgctgccgggcatgatggtttacatgtgtaatcccagcactttgggaggccgaggcagagggattacttgagatcaggagttcgagactagcttggccaacatggcgaaaccccatcactactaaaaatacaaaaattacccagcgtggaggcatgcgcctgtaatcacagctactcgggaggctgaggcaggagtattgcttgaacccaggaggcagaggttgcagtgagccgagatcctaccactgcactccagcctgggtgacagagtgagactctgtttcaaaaaaaaaaagaagaaaacaaaaacattgcactgatgatggctttgatactaattaactccatgggctcagagaagtttcaccttcgggcctcagttttctttaccttgaaaggagggagtcattcatgaggactgtgaggtcatctatcttctcagtattagcctatgtgtatcctttcagttccaagattctttgttctttttgaactctaaagctgatttttacaggatattttattaattgtatttagagagccttgataattgaagtattcttgctttcttaaaggtcacaatttatttaaaatgtatttcatgtaagaactcagagatgagataatatttacagtttacttctggttttaaactatagtacatcaaaacgtggtattatgctgctatgccattttattttatatgtcttttttctttttcttttttgagacagggtctcacttgttgcccaggctggtgtgcaatggtgtgaccacagctcactgttttttggtgaggtttttttgttgtttttacttttaaaattttttattagatgagcttgcccaggctggtctcttaactcatggcctcaagtgatcctcctgcctcagccttccaaagtgggattataagtgtgagccactatgcccatgctttgctattttaaatgacacctttataaagaaaaactaggaaacagtaaagttgtgtatgacataatgcttgtagatttccacaaatctgtgactatgaatcgttacaataccttttgatctctgtcacttaattaaaacaaaatcagccttagattagaagcattagtagacttaagacttttctacatttttggccaggtgtggtggctcacgcctgtaatcccagcactttggaaggctgaggtgggtggatcacctaagatcaggagtttgacaccagcctaacatggtgaaacccgtctctactaaaaatataaaaattagccaggtgtggtggcacgtgcctgtaattccagctacttgggaggctgaggcaggggaatcgcttgaacccaggaggcagaggttgcagtgagccgagattgtgtcattgcactccagcctgggcaacaagagcaaaactctgtctcaaaaaaaaagagttttctacattttctttagtagttgtgactgaaaacgtttaccagtttataattggtatgatataggtatgtcatgactttttagtaactaaataactaagggttccaactgtaaaaagaccatttatattttttctttgcatgcttagatcttaaatgtcataaacaccttaagtttaaggagatgtatttttagcctagataatagtggaattctatttagtgcatttttttctctctccacagactcagtattcatttaaacaagtatttggcactcacaccacccagaaggaactctttgatgttgtggctaatcccttggtcaatgacctcattcatggcaaaaatggtatgatatgactcttggagttttgttagattttcctttttctcctcttctgataaaacttttttgatatttatatatttgatttatgtttggtgttgaatccatatttaatttgttagggtggtgctaaacttgccttttttgagctggctaattgttagtgttttctaatgcagtgaagaaatactctaagtggagaacttctaagatataactcattgtgacttgctacactgtaggtcttctttttacatatggtgtgacgggaagtggaaaaactcacacaatgactggttctccaggggaaggagggctgcttcctcgttgtttggacatgatctttaacagtatagggtcatttcaagctaaacgatatgtaagtatgattcttttgtgttgtgactatcttactggactaagacacctatggatacagtagtagtaaagaagaaccaaagcactggattcattttgaaaccttaactgttccttagtttttaaacatatttcttactatttaagttaaattctaaaaaacgtggtgtgatttttttttttttgcccccacttcaggttttcaaatctaatgataggaatagtatggatatacagtgtgaggttgatgccttattagaacgtcagaaaagagaagctatgcccaatccaaagacttcttctagcaagtaagtaattatatttgtctgcagcactggcctaggggcacaggattctttcctgtggtttgcccagacatgaggaatggtgaacattaaatagagaagttgacttttgtgagattaaagttaaggaatgttcttaagttctttgctcagatgttttctctttggctttgagcacattttgtttcaatcactgttttaagagggtgccactctggatggggagagggtataaaagccattgttgtgtgttcgggaggacgtgggaatactgttggcaaaccatgagtatgaataaagctgctttgtgcatttctgcttgtaattgcagatatttattttatctgttagtttccccttgggatcagttacttttttttttttttgagacagagtctcactttgctgcccagggtggagtgcagtggcatgatctcggctcactgcaacctctgccttccaggttcaaacgatcctcctgcctcagcccccctagtagctgggattagaggcacacgccaccatgcccggctaatttgtatttttagtagagacggggtttcaccatgttggccaggctggtcttgagttcctgatctcaggtgatccgcctgcctcggcctcccaaagtgctgggattatagctgtgagccaccatgcccggctgggatcatttacttttaaaatggacttataacgtatacaattgaacttttctttttttagacgacaagtagatccagagtttgcagatatgataactgtacaagaattctgcaaagcagaagaggttgatgaagatagtgtctatggtgtatttgtctcttatattgaaatatataataattacatatatgatctattggaagaggtgccgtttgatcccataaaacccaagtaagtaataaagagagccccttcttagctgttaatgttggggaagttactttgcctcaaggagttttagtttcttcagttatgaaagagaataatgcttgcatttgttttcagaatgaaatgatataatttgtatatcacgtggttttgtgtttgagtatgtttattattaactagatatgtacctgtattagggaactagtgggttaaagcatctaaggagaagagggacccaaatattcatcttggagattacttttgaaaactctgggccctgggctatgttttgagaaggatcttaattatataattaagaacgtttcaagaacctgagacagtaaaaggagttttgtaggctctttaaccacccgtgtcttggtgatttctacagactggagcctaaagctgttatctatacaagtaatacttacatatcttctatcattcattaatatggtatgatatctgcactgtaattccatcagagttgaaatactacttcctagatttccttgggtcttgcctttctgagacgtaagactggttaccacttggcatcacaaatgataaatctgcatttgtgccagagttgaccctgggatcttatgtttaatattagtatcttgttcctgagttgatggttttgtttttcagctaaaggcttgtctttaatgctgtctttattagggcctctcaggacataaataatacgaagacctgtggcttatatttaactttgtatatctaagggaacattattggagaaacagctggatttagaaaatcattagactgagaatacataccagtatatccacttttaattacatgaagaatttatggactctggttgaggccatacttgatacaagcatttctgtggttcttagtgagtcacattttgatacagttatcttcaccagagtccttgaattttcatcacgtttattgggaaaacaattacaatatggctaagtaagctaaatgtaaaaatattaacactcttaatactaagagtttatgccaaggaagactctttggctctgtttaacatttcttcaagtgagaactttacaaagggacttatttctggagtgacctatctatatttacccttggaatgttggtaatagtaaaaatacttgggttaggttgtggagcaatacatggaagagttaaaaccttgtgagacagttactttttatttatttttgagacagggtcttgctctgccatgtcagctcactgcagccaacctcctgggttcaggtgatcctcccgccttagcctcctaagtagctggaactacaagcacaagccaccatgcctggctaattttctaatttcttgtagagataggagtgataggggtctcactaggttgcccaggttggtctcgaactcctggcctcaagcagtcctcccaccttggtctcccaaagtgctgggattacaagtgtgagccaccatgcctggcctgaccatcactttttatatcaaactaattactttcccatttgttttaaagtgtcaactgtcttgactctaatcttgagtatacccattttcatgtatgctcgtgtgccaactttttgtttggtttgttctaaatgagattattttcaaaggatcatatcttggctttatttagttatacaaaagaagattgacaaaagtaccttgtgtgctttgtaacctttctgggtaactccttaaatgaacatacaagggtgcttgtttggccctgaattcagatttaatttgttaggttggtgttagacctgcttttttaagctagttaacttttagtacttttaatacaatgaaaaactattacaagtggagggtttttaagatatgactcattgtgattgtcacatagtctggactgaacatgttggtgtgagatggctgctgtagaaacagtaacttctaccttattcctttggtaggtggaacagttgcagcacacccatgaggaacacagattttgtgtatgtgatggtgttggctcttttcttaaggagaagggtgcagttatactatggttggcattctgtggcatgtttgcatgtaggttattttccattgtcactgggctggctgctgtctctaagccctccttgcttcctgaaaaatctgctattgactatcagtgatggtggctggtaaatgtctctaccctcaccattcacaagacttaagaccaaacaggtagctctcatacccaaccttcatcttgtcatacagactaaaacttcataagccactttgaaaggattgccactcctggtatataccaaactctttctgaatttgttttctgctgttgctgaggaggtcagaactggttctatctgctagtcttttcaaattaggaaaatactagattttgatgcttaacctgtgcatgtgatgttgctgtaatactactttggtctctaaattgtttagtgtattgtttcatgtgctttcttagagcaaattagagcaaagcttttaaaacaaaattggtttctgttatcttgttacttaactaatcttgactatttagctttacaatcttatctaagtttaatatttctctggagtattatacgttatatatatattataaaatatatataattttcattagaagaataacatgtcatgtcacttggcgttttagtcctagtcttaaatgaagataccagcatctcataatttaggagactaatcttttttttctttcccatagacctccacaatctaaattgcttcgtgaagataagaaccataacatgtatgttgcaggatgtacagaagttgaagtgaaatctactgaggaggcttttgaagttttctggagaggttagaaacacctagaactagaaaaatacagaatgatgaatatcacctagagttgctactaagtttgatggcaattttttttgacttattagaaagcatgtataatgaaatgactgagttcaggtttgaccaatgatttctctgttgtcctaggccagaaaaagagacgtattgctaatacccatttgaatcgtgagtccagccgttcccatagcgtgttcaacattaaattagttcaggctcccttggatgcagatggagacaatgtcttacaggtaaagttgtagtatgtggagtttttctggttctaactctatccttaatttttggaattagagtaatccagccaacatggcaaaaacctgtctcgagtaaaattggaaaaatcagccaggcatggtgatgcaccactcctgtaatcccagctacttgtgtacctgaggcaggaggatcgcttgaacctgggaggcagaggtacagtgaactgagatcgcgccactgtagtccagcctgggtgacagagtgagaccctgtcttgaaaaaaaaagttaaattagagaggttttattgcaatgaagattgctctagaataaatatacagttggttctctgtatctgtgagttctacatctatagattcaaccaactgtggattgaaaatattcgaaaataaaatgctgcatttgtgctgaccatgtacagactttttttggtcattattccttaaacaatacagtataacaacttgttacatagtgtttacattgtattagatattataagtactctaaatatgatttaaaatatacaggagggctgggtgcgtgcgtggctcatgcctgtaatcccagtgctttgggaggccaaggcaggaggatcacttgaggccaggagtttgagaccagcctggacaacaaaacaagactcttgtctttgcaaaaaaataaaataaggctaaaaaataaaaaaataaaaaaatagaactttaaaaagtgtatgggaggatgtgcataggtcatatgaaaatactacaccattttatacacaagatttgagcatccatggaatttggtatctgtgaaatttagtatccataggagatcctacaactaatccctcgaggacaccaagggatgactctgtatgtaggcgatgacattaaaacttttttttccccattattatagttttgggaagctggatatcgaatcttagagcctgaattttgctgtgaaaaaagtttgcaaatctttaaaaatccctttggtagaagtgataaaataagactgtgattttttctctctggcgactccttctgtaagtggaaattcagttagtggttttaaaatgtcagtaattcatttttcagggtaggtatagtttaggaagtggctagtgttataagttgttcatctcttggtcgataggccagtagggtcccccatatgcagatcactatttactgcctggcctgccacagtacaaggcttgtgtcaattagtaacagcatttgagtctgagtatacataatctaataactgtaatccattaaagtgtaattttattcaaactgtatcatgaaattgtggcattatgaagatttataagtggcaggagtggtattgaagacctccaggatttgaatgctcatttctatttatttaccgactagctataataaaacctccttataaggttgtgagaattaaaggaggtaatgcgtgtaaagttcttagtccagtgcttagcttatagtcagccctcaataaccgttagctagaaaatagttataagggccaggcgcagtgactcacgcctgtaatcccagcactttgggaggccaagacgggtggatcatgaggtcgggagattgagaccatcctggccaacatggcgaaaccccgtctctactaaaaatacaaaaattagcagggcatagtggcgcatgcctgtagtcccagctactcgggactgaggcaggagaattgtttgaaccagggaggtggaggttgtagtgagccaagattgcgccactgcactccagcctggcgacagagtgagactctgtctaaaaaaaaaaaatggttataagtcagccttccatatgcacctgatttccattgaatcacatctaatattacagcattagttcggtaccacttgactttcacttctttttataagaattatttgctgggcgtggtggctcacccctgtaatcccaagcactttgggaggctgaggcgggcggatcaactgaggtcaggagttcgagaccagcctggtccacatggtgaaaccctgtctctaccaaaaatacaaaaaaaatgagctgggcatggtggcacacgcctgtaatcccagttactcggaaggctgaggcaagagaaccgcttgaacccaggagggggaggttgtagtgagcagagatggcgccactgcaatccagccgggaggtagagcgagactctgtctcccaaaaaaaaaaaaaaaaaaaaaaaaacaaaagaattatttatagcattatgaaattataagattattaaatatctgattatagaagaatttaggataatcctgttctagactcttattcagcaaatatctgctgagttcctactcagtggtaggcactgtgcagcatgctggtgataaggtagtaaaagacagagtccctgctctcagggggcttactgtctgatgcagaaggaagaccagccaattgacaagtaatcattaatgtcatgagtatatttatcatactcttctagcaaactctcccctaaaataggtatcctttgcctgtcctgtgcattttgtactgtgcaaatgttcattaagacttagcttgttgatatgaatctatttaaagaacattataaaccagttataacccattttaagttattggctttgtgatctttttaggaaaaagaacaaatcactataagtcagttgtccttggtagatcttgctggaagtgaaagaactaaccggaccagagcagaagggaacagattacgtgaagctggtgagtaaagcatggtatttatttattgctacaactttcagaaacttgcaatgccagtttattatctacttatcaatgggtggttctttgttttttaatttttattttattgagacggtcttactctgttacccaggatggaatgcagtggtgtgatcatggctcattgcagcctcaaactcctgggctcaattgattctcccattgtaaccttctgagtagatgggactacaggtatgcaccaccatgcctgtctaatttttaaaaattttttgtagaggtggggtctccttatgttgcccaggctggtctcaaattcctgggctctagtaatctctcaccttggccgccccaaagtcttgggattacaggaatgagccactgtaaccggcctcgatgggtggtttaagcacaattgtcctccattagataatttagaggctaagtttatagttaggctggtttggtattaatctattacaatacactgatttctttaagaatgaggaaagttgtattcaattagtctgggtgcggtggctcacacctgtaatcctggcaatttgggaggccaaggcatgtggatcacttgagcccaggagttcaagaccagccttggcaacatgatgaaaccccatctctacaaaaaatacaaaaaattagctgggcgtggtgcgtctatagttccaaggtacttggaggctgaggtgggagaattgcttgagccctggaggtcaagactgcagcaatccctgatctcaccactgtactccagcctgggcaacagagaacctgtctcaaaaacaacaacaacaacaaaaaaggactctatttttagtgttgtaggtcagaattgggtccttgaaatgttatttcaatacttattagtggtaaaaattggcttctagagatgggaaaattctgaacacaagccaattgaaggctttaaatatatatatagccaatctgtatatgtgttttttaaaattcatgcatgttatgtcctgttacctttttgtagttttttaaaaattaatatatcatagttgtacgtactttttgggtatatgttatattttgatagatgtatgcagtgtgatcaatcagtgtaattgggttttctgtcaccttgcatgttgtgttttatgttaataaacatgtattgagtacctactatgtgccaggaattaaacacaaattaattcccattaattctctctgctggagcgagcccatcctaatagaggagatcagtagataaactagattgtttgagtagagtatgatgggagtgcagggtagggctgcctaaaccaatctgggagtgggaaggtgaaaaattgagtaggagtgagctgtatgaagcaggataggattaaaggcaacgttcctgtcccaggaggcagttgcttggtcctgagatactatggcagagtcaaagtagctgaagtagaggatgtaagttggtgaactatgagaactgaggcaggagagcaaggcaaggtcatgaagacccctgtctgtcatatcaagaagtttgaattttatcttgaaggaataatgttagctgccaactattaagggtctagtgtgtatgatagtatccacacactagataggtaggattgtatcacacccatttttcagatgaggaaataggtttgggaaggttaattttctcaaggctggagccagattggttggactctcatagcttgtgtctttatactatgtcatacagcctccccttaaagaaggattagtcttttagaaagatcattttgccagtgtagagaaataatttaccaggagcgagcctaaatacatgaaagagcagttaggagccttttgccccaattcaggtaagcaattgtgtgacctggaggcaaaggtcagacaacactgagagctagttaggatgtggagaataaggaggtgtttgattgaggagaagcagttttaggagcaggtataggcaggtaatgagttgtatttgaaatgttcaatttatgcaagtgaaagtgccttgtaattggatgcagaggtacatggatttggaaggagagagattttgacttgaggtttataggtttaggctttgccaatagagaaatgattggctggatgcagtggctcacgcctgtaatcccagcactttgggaggccaaggcaggcggatcacgaggtcaggggatcgagaccatcctggctaacagggtgaaaccccatctctactaaaaatacaaaaaaattagctgggcgtggtggtgggcgcctgtagtcccagctactcgggagcctgaggcaggagaatggcgtgaacccgtgaagcagagcttgcagtgagccgagatcgcgccattgcactccagcctgggcgacagagcgagactccgtctcaaaaaaaaaaaaaagaaatgattgaagcaattgggtgagataagataattcatagcgaatggagaggaacaagctgagagcagaagcttgaggaacagcaagcccttgattattagcttgggatggacagagaagggtgatagctaaaagggatttgagggattatgaaatgatgaaaaaatacacacacacattatatatgtacattagaagatagtaaagacttgagtttattcatatgctgaagagatgatgtttaagtccagtggtgagaaatggggcctttagagctgcctctaccctggcccaaaggactcttgcaatttgtctgaatcatttgaatttcatgagagtggactgtgtgtgtgctgtctgtcaatgtctacccagtgcagcttacctactaggtgttcataataaagtggtgattattggcggagcaagatcctggaagaggcaggaaaatctgaatctagatccaagaggaaggattaactttgatgggacaagagctggtttgggaagaaagtaaaaacttgaagttttggatgctttggggaaaagctagaaaggactgttagtgttaatatagagttagggagtgagagagaaaaggagattgtagttggggcatatggcagaggctccaggtttttagaagtggtacacttctgagggatagggtttgggctgtcagctgtaatggaatagagataaagatttactggagctgggacattgggaccctgtgactacagcatatgagaatgattgttgttctcatggacaccgaaataaaccagggactggcatgtaggaggaatatttcaaggcaataaggaggaactaggaaaatgttgctagcctctccctctgtttaccatacttgtagaatgtcagcctttagaaaacaagtagcttttttttttttactccaaaaggctacagggctgcagcaagagataaatggttaggttgcagggctgtgtgccatggatgtagggtgaagcctatggacccttcctggtatagtatttctgaaggtataacacagagaggattacagaggaaaccaattgcattgaaatgtgttttaaaagtattcttaagtttgtcatacagtaattatgtgcttctttattaataccttaaagacacagcagcaggtctgattaaataaatgcagtgtaatgatgaacataaatatcttgatgagcaacaaactgtaacatgctataaaaatatctgtgatttgtattgataccaattacaggtactactaatgctgtggtttttggcctgcattcataattgaaggaactagtgaattccagttggtttggtaaaaagtaaataatgtaatttattttccatctaagtatgcagacaccccatcatgttcccccggacaatatagacctcaggttaagaacccctgaccactagggaaagctatcaatggattattttgtgagagatttgaagatgcagggaaatctgttaataacatgagttcctgagagcacagtggaagaagaaagaacattaggagtttgggtcaaggaacgtaaatcatgaatcatggaatattacagaggtacagatgagttctgtattttgggaggtgtatccaagatcctccaaggaggccaagggtgaaagcataatcgagttagctgacctcaatcaaggtttcaaaatgaactcattcttatggggtctaatcagatgagagctgcattcttgaaagcttgattagactgttagacttgccttggctcagaaatccaaataagagtggtcagaagtaacaagtatgccacctaagaaatccttgctgagatgtagaggggacagagttagctgattctgaagacacttgactgttagaaacaacaggagagcccctctagatgcagcaagagcttcagactcttgcatgcttcttatgagaatctaatgcctgattatctgagctggaatgatttcatcccaaaccacacccctcaagcctcaacccatctgtgtaaaaattgtcttccatgaaactggtccctgatgccagaaagtttggggatctgctgccttagagaatatattttatttatttattttttattttattttattatttttattttttagccacataaaaggtagcagcacacttatttggaaaacaataatttcaaaatcatctcctgaactcagaatcgatgggtcagggtagacaccctaagtaaacaggtgaaatcttcattaattgttcacttattaagtaaaaatttaaattaattgattatgtacagcagtgtttttccacatttccctgataagaatcatttggagtactctgtaaacacagcttcactggagattaatcccatcaaattgatttagtggctctgggatgggccacagtagtttggaaatttttatttttacaaatgcttcctgatgatgaccaaatccaaggaaatttgggaaacactgatctggaacataactttcagttttccctgcagtttttaagtcttgaacgactgatcatcctagagataacccactgaaaagtcttctccaatccagttttatgaaagaaaactctagaacatttggtttgataaaatttttccgaagcaccagaagtactttactttggctttttaaatttctggtccatcccttctagttcatgttttcttgaagaatccatcttctttgagttgagccacagcaatctaatcttttttttaaataattggtttcttattaaaggattgcgacatttaatagccgttgcttgcttttgtctttctcccttctccctgaaacttgttaagagatgcctcaatattctggcctttccaccttcaatctcatactgaccacgccgtgtatgccagcctggatctcatagttttctttaactggttcaactccctttgttgtcctggtcaagataacatctccttcttccaaggtcatgatcttagaaacatagttgatgatgtaggggatggaaaaagtcatggaggatgtctcaccctcctgtcttgagttcgccgttgaccttgagccagagcctcagattgggaggatcagggatcttctccttgggcacgaacgcgctgactgggcaggaggccataaagctcttggccagagtccaaggcagccccttcttcttgcactcatcctgcacgtccctggcagtaatgtccaggcacagggcatagctgctcacgtagtccatagctgcgcggccatgcttgcccatcaccatgcccagctccagctcgtggtgcaggttgcagctgtacgcgggcatgaggatgggcgagccctcaggtgtgtaggccgtggacagcttcagaaacagcacggactcgctcaacaccgcgttggcatctccctggtgtggtccccatagttcctccccacacagacgatattcttcccccacccccagaagcgggacggtggcctgggggtcgccatgattcctgtcaattgcctagagaatatattttaatatgaggatattaaacatctctatataagatattccttcagagaatttaggatttggaagaaaccttatagtcattaactgtaatgttgcattttgtggaaaatcctgttggtagaatccctgaaggatggctgtttaaccttcccagaaatactgctattgaaagagagcctggaccatgcatagacagctctttatattgagccacaaaaatttgttatttataatttctatctagtagttgtttgaagttgagattttataggcaaacagaacacactttagctactatactgttgttctgaaatggcgtctatgtatttttttctgtcaggtaatattaatcagtcactaatgacgctaagaacatgtatggatgtcctaagagagaaccaaatgtatggaactaacaaggtaagcagcagccttctctgttcttttgtatagtttcatttgtgtgcattttttttgcgtaacacatttggatatgaatgtctttgtagatggttccatatcgagattcaaagttaacccatctgttcaagaactactttgatggggaaggaaaagtgcggatgatcgtgtgtgtgaaccccaaggctgaagattatgaagaaaacttggtaattttaatgtatttgtcctataaagtcttgagtttttgtcgggaaaacagttacttggatgagcagaatgacattttgaatattttaaaaatggatagagaaccattgattgtagaagtaaactaggcttggtgtggtggcttatgcttataatcccaacatgttgggaagctgaggtgggacgatcaattgggcccacctgggaggtcgaagctgcagtgagtcgtgttcatgccactgcactccagcctggtgacagactgtctcaaataaataaaaataagcaatctttgcttcatttagtaatttctgggacttggatatccttatttttttttaaactccatttgttttgtgttttagcaagtcatgagatttgcggaagtgactcaagaagttgaagtagcaagacctgtagacaaggcaatatgtggtttaacgcctgggaggagatacagaaaccagcctcgaggtccagttggaaatggtatgatttggtgttgtatcatttgtccactcattggtctgtctgtttctctcttttttaaaaaaaattatttcatttaagagaaatgtttacataccttctgaagaaccaagcacataataatttgaacaaaatttaaatgagcttattttgcatactatgattcttaggtaagtaaacttatgtcagctcaagaaattgcaatggttagttgcactggggctgtatgcagtgttaaacttgtttaaataagctctttctctcctatgtaactttttgtaattttctataattcaatacagaaccattggttactgacgtggttttgcagagttttccacctttgccatcatgcgaaattttggatatcaacgatgagcagacacttccaaggctgattgaagccttagagaaacgacataacttacgacaaatgatgattgatgagtttaacaaacaatgtaagggcaaaactatttgaaataattttatttaattattttttttttttgagacatagtttcactctgtaccccagggtggagtgcagtggcacaatctcggttcactgcaacctccgcctcctgggttcaagcgattctcctgccttagtctcccgagtagctgggactacaggcacatgccaccacgcctggctaatttttgtactgttagtagagacggggtttcgccatgtaggccaggctggtctcaaactcctgacctcaagtgatccgcctgcctcggcctcctaaagtgctgggattacaggcatgagccaccactcccagccaatttgcaataattgtaacttctgaaattgaaagtattttcaatgaatctgagttatatggtagattgcatatttaaggaagttaaagaaaattgtgtctttagaactttgaagcactcaaggcattgtttgattagtatgacaaggcatttttccacagctcttttttgtattctaaggaagtcaaaaagaaaaaagtgagcgtgtgttctttcttttgttttttacagtgatggagacacaaagaaatattttttagtttcccctgtctacatagtggggattgtaattgtttctacctcaggatatgttgtgaagataaataagataaagtatgaaaatcctgtagaacagtaaattctggtacatagtgaatgtatctcagtgaatgaatgtatctacttttttttttttttttttttttgagactgagtctcgctctgttgcccaagttggagtgcaatggcgcaatctcggctcactgcaacctccgcctcctgggttcaagcgattttcctgcctcagcctcctgagtagctgggattataggtgcacaccaccacgccctgctaatttttgtatttttagtagagacggggtttcaccatgttggtcaggctggtctcaaactcctgacatcgtgatccacccaccttggcctcccaacatgctgggattacagacgtgagccaccatgcctggctctactatttttattatcattattcatttgaatctttaccaaaaagttgtgagataaagtggtatttaaatttccatactgaaatgaaatttgcccagaaatattaattaactcgcctaagtcataactagtaagtgatgttccaaggatttcagctcaggtttaattaatcccaaatagtagtgttgtttctatttttgcgtttgttgttgtgaagcaaagtacctgtaaggattgggaagagaatgctatagtgcacagtgaaagacttgagtattttttcagcatttaacagaaagcttctgtgaatatcttgtcaactggagaatgaagctcctgatttccctctaaacttgttttctcattatagactgattctcacagagatttgctgaataactacattttatctagtgtctgctagcaaaagttgatatcattgtttgttttagaactggtgtaaaacttgacctgtatgtttttgtttcagctaatgcttttaaagctttgttacaagaatttgacaatgctgttttaagtaaagaaaaccacatgcaagggaaactaaatgaaaaggagaagatgatctcaggacagaaattggaaatagaacgactggaaaagaaaaacaaaactttagaatataaggtttgttttgacattattatgatagatgtatgtgctggtgttttagcactgttctctgagggagatattgtgctccaacggcctgtaaatgctgcttattaagagttctcggttgagtgcggtggctcatgcaggtaattccaacactttgggaggctgaggtggccagatcatctgaggtcaggagttcaagaacgagcctggccaacatggcaaaagcccatctctactaaaaaagtacaaaagttagctgggcgtggtggcgagtgcctgtaatcccagctactcaggaggctgaggcaggagaatcgcttgaactggggaggtggaggttgcagtgagccgagattgagccactgcactccagcctgggcgacaagagcaagactctgtctcaaaaaaaaaaagagttctcaggctgagtgcgggggctcatgcctgtagtctcagcacattgggaggccaaggcagggagatcacttgagcccaggagttccagaccagaccgggcaacgtggcgaaaccccatatctacaaaaaaaattagccaggcatggtggtacatgtctgtagtcccagctactcggaaggctgagatgggagaacagcttgagcctgggaggttgaggctgcagtgagctgggattgcacgactgcactccagcctaggtgacagagcgagagcctgtctcaaaaaaaaaaaaaaagttctcaattggttgtttactaatcctcatcccatgctaaggaggaaatgtgagtgaaatgaagaatcatatgttctttaattttatgagagttttaacagttgaaaaggatgttctctgacccaaacaagggagctttctagagcttagctttggttgtagcttgcttttgaatttattagaaatatttccttagtatgctttttttttttaatgagataaatgattaaatgaaatggtataaaagtgccagcatcgggccttggacgtaacagatactcagtaaagcttaattggatctgtatttggtttacaaatcgattgtaaaagtataaactcaggattaatctcttacaatggggtagaaggaaataccgttttgttgggaagcattgcagcactgtgtaatgtatgtctgttctctcatttacagagggtcatttagaggtttggtgggggtacacattcataagagaagttagtctcaaccaatatagtttttttaaattctgaaaatagcctaaaaactaaattttagcccttaattttaggagaaagtaattttcacatgaagttagttgtaaatgtctttgggtgaggagcttgtttaacatgttttcatttctgagaatgggggtgggaattcagatgaaatgttagagaaaaaagtgctttctccatgatgtttctttccacaaatatgcttgcataagcaaattaaggaagactattttatagcgacatgaaatgtttatataccaaatattgaacatagtggtctaccttcctagattgagattttagagaaaacaactactatctatgaggaagataaacgcaatttgcaacaggaacttgaaactcagaaccagaaacttcagcgacagttttctgacaaacgcagattagaagccaggttgcaaggcatggtgacagaaacgacaatgaagtgggagaaagaatgtgtgagtatcgtttgggtagtgcttgtctcagagtcggatgatttattttacattgtagttaggttcgatattttgaattattgtatttgcggtagggttttggtggtggttgttaactctcaggaagaattggagaactgtcatttttaggaaataaagagattgggtaatctggtgtactcgtttgctgtgatggaatgataatatacattgccactgataatctgtaggagcgtagagtggcagccaaacagctggagatgcagaataaactctgggttaaagatgaaaagctgaaacaactgaaggctattgttaccgaacctaaaactgagaagccagagagaccctctcgggagcgagatcgagaaaaagttactcaaagatctgtttctccatcacctgtgcctgtaagttatttgtaattgtgtagtaactttgtactagagaaattttgttcagattagatgactatttctatgaggatttttacattttataatacttacatttctgaaatttctctaaaaatattttaaaatttagaataaacacaaatttagcacaaaaaaatagaacaaataattatttgtaatgttaagtcttcatgtgctaacattatagaaaagtaatgaattgtttctctcagtttttcagtcttgctcattaatttttctccaatttttctagctttctagtaactatattgctcagatttccaacggccagcaactcatgagccagccacagctacataggcgctctaactcttgcagcagcatttctgtagcttcctgtatttcggaatgggagcagaaaattcctacgtacaacacacctctcaaagtcacatctattgcaaggcgtaggcagcaggagccaggacaaagcaaaacttgtatcgtgtcagacagaaggcgagggatgtactggactgaaggcagggaggtggttcctacattcagaaatgagatagaaatagaagaggatcattgcggcagggttagtgccagtattattttaacgcattgtagcaatagattttatcttctttgttttttgtaacttgtgtctgaaagttcattggaaaaatggttgggctatagtataaagaaggtctaatttctcagttaatttgaaagattgacttacggaaattgaggcctggctcctcatctgaaaaagcctaaacacatctggcagcggaagtgtgttcagtgaacacaggtcagtttggtgcatcccagagtagtctgagcttttcagctgcatacgctaataagctttgcacagaattggtgaatgtgtcttaaagcatactttccatatttttcttttggttccccttccccaaattagattttttatacctcctttcatgccctagttttaaaaattgttttcccaaatttttattttgaaaaatttcagacccaaagcaaagtagaaagaatagtatggtaatgtctttccctccttgcctaagtttaccaattgttacttgatatagatatgtaaacctttttcccctaagccttgtgaaaggaaatcacagacttagagacacttaatctctaagaataaggacattgtactacctagccacaatctttatcacatccaagaaaatcaacattaattaattatcctctattgagacattgtgcagttgtcccaaaattggattggcttttctttttttttttttaaagacagagtctcactctgtcacccaggatggagtgcagtggcatgattatggctcactgcagcctcagtcttcctgagctgaagtgatcctctcacctcagcctcccaagtagctgagattacgggcaggccaccatgctaattttttattttcagtagagacaaggtctcaccatgttgcccaggctggtattgaactcttgaactccagcaatcctcctgccttggcctccaaaggtgctgagattacaggcaagccactgcaccagccagcttttttttcaatccatgatactatgaaagtgtatgcattgcatatcatgattatgtctttcatctcttttaatataaaatagtctcaccctgtccccctactttttttatttttatgacattgactattttcattgaagagtttaggccagttattttaaaattactgatttccatgcccaataaattgcttttaatcttgaggcatttatctcaatttacatttgcctcattcaagggtatttaaataaattcactttcatatttttcttcttaaagattaaggtaaagtttcttttgaatctgaataaatggaccaagttaatgtttgcgaattttatatttagtaaaatcttcacaaagctctcttagaatatttcttctaaatcttacagtaaacatttactttagattttcttatataagtcagggtatagatgaatgttcatttatgtggcctgaattcctgattattaagggatggtgatgaatcccaagttatttaccagggaaacagatgattctaaagtctcttaagttctttactttgcagatttttccttaaacatttttagacagcaaattaggtaaatggtcattctgaccaactctagtcagtcattttatgaaagtttataggctgaaaactattcaaggcttgcgtatgccttgcaaaccgtaatgagatatctaatttggctatgagatatttaagggaatttactagagattcttacgtgaaatcaaaatctctttagaagtgcagcagaaaagttactgtaaggttagtatctgtgcatctaagtttgttggtcaaaaattatgtcaggtggactgaatttatacttcagtgaggaaaaaatttaaatatttgtttcataaatgctagtagattgtatggattatcatctttctgaagtgtgtttcatcatatgcttattgttaaatgtttgaagaaaacctttgtttttgctaaatggtagatgataaggaccagactttctttcgtgttcaacattaaataaatcattgtaggaatggaaagttcctgtttgtcttgaggctcagcatctttagtggcaaactgtattgcccatgtcttagagctgtcactagtgctgcatttgtttcttgttaactatatagcgaaaatgattcagttcctcagatgtgcattttgaaattgaggtcttcatacttgactagctttgacagatttggcctgtgatagactttttccatttgctttcagttttgttttttgggttttttttttttttttttttttttttttttgagatgaggtcttgatctgttgcccaggctggagtgcagtggtgtcatctaggctcactgcagccttgaccttccaggctcaagtgatcgttctacctcagcctcctgagtagctgggaccacaggcatgtgctatcgcacctggctaatttttaaattttttgtaaagatggggtcttcttacattgcctaagctggtctcgggtgatccttctcccacctcagcctcacaaatgttgggataacaggtatgagccactgcacccagccctgctttcagttttacaaacaggagatgttcataaaattctaaagataattcattgcttcaaactataactatggcatatatgtgacatattattttcttaggctgaatgtgcttaatttagcattcccaggtttacatgacatttgactggaagcaacttgtttgtttttgaggcagggtctcattctattgcccaggctggagtgcagtggtgcgatcttggctcactgcaatttccacctcctgggctcaagcaatcctcccacctcaacctcctgagtagctgggactacaggcacgtgtcaccaagcccagctaatatatatatatatatttttgtttgttttgttttgttttgtttttgttgagtctgggtttcaccatgttgcctaggctgaacttgaacttctgagttcaagtgattcctccacctcggccttccaaagtgctgattacaggcatgtaccaccatgcctggcctagcaactagtcttttattgtgtgatagagactgatttgacactgtattatttatttgtttcttggaacctgtatgaaatgtttgggggaaaaattagttggtatattgtagccattactgtatttgaacttttcatgaagttctattatgagattttaaaatcttaactgaaagcactcagaagtatttcacatttctttaatcattttattcatatggttcttattatacctatgttcttaggattgttttctgttttgtttagaagcctagaaaatgtgtagggctttcattgatcttattgaagattttaacagagttgtggacataatagattacctctcaatagcagggataaatattggtttttgatcaagaatatgaaatgagttgtttgtcctgaaccacccccaagcaggaaagacttgcagcattaccagaattttttcttttatcctttattgaaagggaaactcccagatagaatgtgtaacatacaagttggtgttaaagatgtttgttggttttgtgtttaaatgcaaagatcatgtttaaattacttgaataaaatatttagctttggaaaggtttgctatgatactgtcatcaactaatgtagccaaacctgctgcacttctaataatacccttaaattaattctgggttatgcttgtttctcagttactctttcaacctgatcagaacgcaccaccaattcgtctccgacacagacgatcacgctctgcaggagacagatgggtagatcataagcccgcctctaacatgcaaactgaaacagtcatgcagccacatgtccctcatgccatcacagtatctgttgcaaatgaaaaggcactagctaagtgtgagaagtacatgctgacccaccaggaactagcctccgatggggagattgaaactaaactaattaaggtaaaaaactaattttcacaggagaaaaaaatatatttaaaaattcaacaaaagtccatttgtcctgctactcctttggtgacacacaggtagtgtcaactggaacatcagtaggtatttgatataacctttttgttagcagaaaattagtcactgcttaggttttaagtctgccaaactgggactaagtatgctttaaataggtatagattcttcggtttcttagaattctagatccatgatgtactttaattttttaatgactgtatatttagttttaaccactacttaaagtaatctaagcaaagaattcctattgctctccatcagttcaagataaaaaaacaaaaacaaaacaaaacgaaacctatgttaaaatttgacccgtcaaaattactcagtattgagctgcctaaagccgttttccagaaagagacttgcctgactatagaagaattcccctttgatcatagggtcagtgaataatcaggaaagtaaaagataagaccaaaaaaaaaaaaagctttttatttcaatttcaatttagagtttttgttcttattataattagctacaaataagactatactgtcatttgaatatgggcaacagggggcactcagagaagaaagtaccatgccttagagcgtgtagaaacttccagcaaatttcttgatccttagtgcagtttagtttttaaattacagatggagcaaaaggaatatttttttctgcaattatgaatgttactgattacattgaattggacttcttttatttgtgagagatatgtactcaaatttctaaattattttgatagtacgtactcagcaagtaccaagtaccatctgattttgtggatgggaatttctataaaatagaatcatgagaacagtttgaaatatatatgtgtgtttttcgtttgggtgtatcaatgtgtaacagtgaccttttcttttggctttagggtgatatttataaaacaaggggtggtggacaatctgttcagtttactgatattgagactttaaagcaagaatcaccaaatgggtaagtaaccatcaaaaatctctgtataaaagttggtcattttcttagctgctcattttggaggaacagaatagcctgtgaaatgtatcattaattctccaaagggatgtagatagtattcccctacttctaatatttttcctcttcttagatggaaaaataattgttgcatcatgtttcccctttttcagtagtcgaaaacgaagatcttccacagtagcacctgcccaaccagatggtgcagagtctgaatggaccgatgtagaaacaagggtaggggaaaaattaaatatttgtctgcctactaaaattaggtttgtcatgttttaaaccccacagctctagatttttatgctctttgaaaatgctgaggtataatctcacattgccagtgcaccatgtaggcctattcctagaataacaagaatccacttcatcaggaactcccttgcaagtgttattcctgaggagaatctcttggaaagaacatgggaaggtaggggtcaggaggctaagctatggccttagccaccaactctctttgcaaacttatctaaaatgagataagttacctggatgacctaaagacctttctggctcacaacatttgtggcctgtgccagaaataaattacgagtgactggtgttttaacgtaagagtctttgctgaactagaaagcaatattgcatttcacctaggtgtggagcctgctaaataactgtgttttatagactattgagaggagctgatctttttcctcttgtcattttcctctcagtgttctgtggctgtggagatgagagcaggatcccagctgggacctggatatcagcatcacgcacaacccaagtgagtactgactgtaattggggtcttgctgtgtgcttttttcctcctctggtctttacattatcactccttctaccagccatccacttattcttcagaagaaatatatggttttggttttccccttggactatctgggcctccatgggcagactgcagtaggcagctggaatgctgagagcctcagaaggctggataagagcaatcagagctgcaaggcaggcggtggtggaagattggtggctcatgttcatattctgccaacgctcataaagctttctgaggctgaactgagagtacctctaaggagggaaggctaaaggcttaagttggagactagacagctttgtgtaaatcattgtttcctgacttgcttcttggtcttggtgtagcaataggtgttcactaaaataaataacactgaatgaaagaatttatagtagggaaggaatcataccttttcttcttctgttaaacttatactcaggagtctgacccagtctttttccatattttaataaaatcccttctttacaaatacatacatatatgtatatcacatgttatatacatatatgtatataaaatgttatatgtatataacattttaaacatttacataccttactgagcaatttagaaaattgttgcagcaggataaagatgggaaatcctttctaaatttaatactaagataagcatattttataaaagttgtttgctttctcagagggacttgaattatctcatcataaaacagcagttctcaaaggcctcctaaagattgatttgctatgaatgtgttactaattgcaaagttcaactctaagtgctggttgttatgttttaggcgcaaaaagccatgaactgacagtcccagtactgaaagaacattttcatttgtgtggatgatttctcgaaagccatgccagaagcagtcttccaggtcatcttgtagaactccagctttgttgaaaatcacggacctcagctacatcatacactgacccagagcaaagctttccctatggttccaaagacaactagtattcaacaaaccttgtatagtatatgttttgccatatttaatattaatagcagaggaagactccttttttcatcactgtatgaattttttataatgtttttttaaaatatatttcatgtatacttataaactaattcacacaagtgtttgtcttagatgattaaggaagactatatctagatcatgtctgattttttattgtgacttctccagccctggtctgaatttcttaaggttttataaacaaatgctgctatttattagctgcaagaatgcactttagaactatttgacaattcagactttcaaaataaagatgtaaatgactggccaataataaccattttaggaaggtgttttgaattctgtatgtatatattcactttctgacatttagatatgccaaaagaattaaaatcaaaagcactaagaaata

SEQ ID NO: 9 - DNA, 70443 bp, Homo sapiens
agtcggcgccaaaatcaaacgcgtcctggcctgtcccgcccctctccccaagcgcgggcccggccagcggaagcccctgcgcccgcgccatggtaaggactgaggctacggtcccgcgtcttcttcctccctagtgtgtgggcttcgccgcccctcggctgcatgtggatcccggcctggcgttgaccgccattccgggccgcgggagcggtcgcccggctctcggcctcaccgtgtaggggcccagcccggccccgccgcagccactccgcactctgcggcgttccccgccgctcctgtccggagtcccgaggcgcgggggcatccgcggcctccccgccggctgcaccccgcgtctgtccccagggcccgttcgggcgggttaggttagaacgcgggaagcgttcgcgaacgtgacccgagaacttcaccaacctggatttatctaaaagaccacggggcccttgagaacctgggctccctacgcctccagcttcggccccgcgtggtgtagccccccccattaagaacggggagagaaagcgcaagtgggcgggagggactgcggggagcgaacgtcttgatcccaaagcgcactcctggtttgtcaccattgagtggttttctgtattgtaatatgtagagcacattccagaactgctcagtttcgagttacctaatggatcttcactgtgtgccaattagtcgatttctgtgaaaacgccccggtttctgccaaagggcaggagtcgctgctcttgtgccgggtgctgctggttgtgtagggcgctgttgcttttttaaggacgctctgcactgaattaggcttcctcgtgggtcatgatcagttaagtcctggtaagatcggctttgtgagcttaacgtctttctgctcatcaaatcattttcataaaccttcaaagtttcatgccgttttttctgcttcagttggcgaagaatcaacatctggttaaatggatctaagattttaatatcttcatttacttacgtggccgttaaatgttgccgagctaaggggggcagggtgggacaccaggatccagttgtatggtatttatttgaagatatttgtccagatgtagttataaatgataacggcttctttgtggttaaactaacaacccagccacctgggcgtgaagtgctctaaggagccaaacaggactacagttaaaacaaatctgttagcagtgcccttctgtgttacaatttttctctgcagagttgctggcctcgtataactgacttggagaactgtgcagctcaaacgcgcgttgtccttttacctaatctatctctctacacatgaatcacctgctaatactaaatgtgttaactctttagaagcttacctccgataatagagaatccttttaaaaaattaaagcttttgataagatgtggacttcctattttttaatatgtgatcgagaaataaatttagtgttggtcaaaggtaaacttttgattgattatgaattaatagctgttttcatttggttaggcatcctaagtaaatagttaatgagttcaggcaatttttgaaattggagaagtgcagtgctgaactctgagagcagcagtgatgtctacttaataattcttcataattttatcgtaattgattagtagggctggctgtaggaattccataacttctaactgagaaggttcctcagataacatgattttttaagtggtttaaaatacttccagaaagcttcatagtccttgagtcaggttttgagtctcctgacttactaatttgaatgcatctctaacttatactatcaggtttttcctagtcttaattaaatattagataaatcctcattgatttttttgagaagtttctaaatatgagtattaatatggcatctttttacattagttattttaattctggctatgatactcctactgtggttaataatagaaattatttctagtcatgaaagagactgatgaataaatcagcctgaaaacaaggtaaatggatgatacagctcatccacatttcttgagtaactttcatagctgctgagctgagtgttgagagctttcctaaaactgggtaccccaggacgctagattctcctcattgcctgcctctggggggcagattcttgtggagtgcaaggagctgtttcgaatatcaaaatgttaggagtctttcctaacacttcaggatctgctttctgctagtgcagcgacacactgaaattctaaagggattcccattgccccgcagcgcccttgacatggccttcagattctgggctgacaaaagtagggttctcaaccctggggcacaattaaaaaatatgttggagaggatttttaaaataagttggaggatttaaaaaatatgttgcccaggtcccattccagagattttgattccattcattagagatgagcctgggcatcggtattttttaaaaactcctgaggtgattctaatgtatggcagtttaggacctattggactagaaaaatatgttgaaggagtcttctaactgttatgaatttcatgcttgatttgtcagatactgcagaggtgagaatgaagggaggcaaatagagcagtcctggaccctagctctcagccctaggtttagtgagcagatctgtatgggttcctggagtttgcctaactgagatttctctgatttgtctcttcaagccaggcaatacatgatgtcactgaattcactatgattaattcacctgttatatctatgggagtatggtaggtgttggggggcttaggagcctgagcagcctcaaattttagagttgggggctttagatacatggtcctaaaattaagagctttatgtctcccttgtctaacttggcactaagccctggaaaggcaaaggcagttcatgttctgaagaagtttttcagtgtgctgatacggacaagtaaacatcttttcaatgtagtgagtgatttgatgaaggtgtgttctgggaatacatgcttagcctgtgaactcagggaagttctggagggagagtgcctaaactaagccttgggagatgttttggagttttgactaggcaagaagtgaggatgttctaggtggaggaacattttttttaaggatggaaatgagagcattcttcgagtagataattacaggcagtttttgtattacaagttgcttaggtctccatactgttaatggcaaagtttgaggtggggtgtggtggaagaggctataaaaggtaggttggggttaggtgataaagggccttgtatatcatactggggtactcagaaacgtctggatgtctgggagccactggagggttttgagcaaggcagggaaaaaggtcttatttatgttttcccagtgcggaatgtgaacatagagggtgagtcaaagtgtggttaggggactggaggtatattgcaggagatagatgatgaaggcctgaatgaggcagtggtagtagagatagaacagacaggacagataagagaaataattaaatgctgaaactggcagaacttggtgattggttggatgtgagataaggaggtgaaggtacctaggatgactgtcaggcctctggcttgggtcacgagatagtatctgagactcaaggtctagaacagcaagtttgtggggagtaggtatgagagaggaagagttcagtttagactgacggagttgaagtttgtccagcaggcgggtagatgcatgacactgaagctcaggagcacacccaggggtgaatgtaaagatttgaggtctcagcataagtgttaattaaaaccatgaaagcaaatgagatcaaagataagatattaggagatgggatcagtagccaaacccagcagaaaaacagtgtttgaaagtggaccgaggaagaagagaaaaatataaactttaagctatttatttacccatattactcatcaagaaacacctgatcattttattcctgtgggaatgagttagtgggttgttgtttttttttgtgtgtgtgggctttgttttgttttgttttgagacagtgtcttgctttgttgcccaggctggtctcaaactcccagcctcaagtgatcctccagcctcagcctcccaaagtgctgggattacaggtgtgagccaccgcccagccaagttagtgggtttctaggttttacaagaattaagactcactcactccagtatgtagccagaatggcaattccaaatccttgtcttcacttatgtaaactcacgttttctgatgatgtttttggttggatggggcagtctttaactgttgttttatgtctgctttttaagcaaacaatttatattcctttataatcccctacaatttttgagaaagatgcagatcacataagaaatattagtgtggagtttttttattagagaactggaggtgatagttctcactcttttttttttttttttctgtaaacctttggtttggaggaaatttggctcctttctcttttaacttaggatttagctttatatattctatgtacaatatattgtaaaatttattattaacatatatttcagctacatattgtcttaatttcaagttggctaaagggtattacagaagaataacctgagtgggcttccattttctacttggataggcctttcccccttccatcttctcttccacattgctgctataattaacttaacgaaaatgcaactctaatcttgtcactagtctgctttagaaattactcagcagctcctcattgtctagaatgaagtccactgtcagctggacagtcagctttccataacctgaccccacacctttctcatcccatctgccaatccccctacatacttcatacaataactgtcccccactgcttatccttctggggaattccatgtacttccataacattgtgcctgtgtgtggtctccccaagatgtgcttctaaccatttctcaatttgccaaaatccttttaatctctgtccttaggtaacccttcttcctctgcatagtggaattcattgtgttctgggtatttatgtaacaattggtgcatgtagctgttcattagctataaatagttgcatctatatattttctctgagagattgtaagcctttggaaggtcaatacagtggcttatcattggtttactttataaatgctgaatttctacaaaatgccaggctctgcctcaatttacagttaccatcttggcagcacctaccacagtggttggcagatagtaattaaaatgagtctttaggtctgactttgagagtatcaaacctgttggcatcagataagaccatgcataaaatttcaaatgttgcaaatccagttgttttcaaaatgtgtttaaaagcattgtttacttgttaatttttttgctttagtcaaagaaaaaaggactgagtgcagaagaaaagagaactcgcatgatggaaatattttctgaaacagtaagtcattttctttaacacttataattttgtgtaattttcatcttaagtatatgtcatccaatgttaactgtcccctctttgttaaacatcaatactgatcaatttcttgaagaatgggtaagattctgcaaatatttgtggttcctgtgagttatggagtgtgaaaaaccatatcccactgttggtagagtctctttcacccaagcagtcctgcatactggcaccagaatcttctgatgcatatatttgattatctcctctttctgcctgaaaaataataatgatgaaagcccacatctcctgagtgctgcctaggtgccaaccagtcttggatctcaaacaatagaagccatagttccaggattcaaaccagggaggatcatttgatttcagagggagtaccaaatactatgtctttgcattttaagtctgtctatagtgtaacacacagtcgatggtacagaggccttcatttattccagatatttgtgcctgccatcaacaggaaatatgtttaaagtttcatctcctaagtgaagagccagagttcaaacccaggtacctggctctacagcctactgtctcatggctttacactgttactggaaggcttttctatgtcttcaggttaaaggccacataaatctttgacctaaaagaacaccgacttcatatggcttggcaggacctacaaagcctagttggccccagtctactggctattttcatcatatacaaatgtgaagaagatggggaaaagtggtagaattgaatattaaattgataaaatcccttttcactttaaggcagattcttagtaaaaaaaaaaaaaaaaaacaaacaaaatacacgggatttgcccactaagtataatcttattgttcttaaaagtcattggcaattcagaacagggtgtcatattatgatgatgatatggttacaaagataaattggtgaagtctctatgtgaaaattatagcaattcttctgctgagttgaaatatttttcctatggtctcagcaagaaaagtaagtttaattccttcaagacagtagaaagctgaggagagtggttggggaaattattttgtcatttacaatattattatctcaaatataaaaattggctgtttctaactgaaaaattttaaaccttgtccttagtaacatcaaaacatgaaagactctgaggatcagcagtttaaggaagttcagtaattagtgaggttttccataaagctgggaattaattgtactgattgatttatttcatatattcctgtttctttttttcattatagcctaatcagttgctgctcatttagtctatcagttttttgacggaattgaaaagtataagagatttgggaaaagtaatggaggccatttcatttgttctttcatgaatggaatatggtatatccgggatccagactgatgtcaaaagttgatgaatattagatttgcttcaacatctcaaagcaaatcgccaataatggtgcaaagtgaaaagcatggattctggaattcagattcaggaatttggattctaatttcgttgttgcaattggcaagtaaaaattccaacaaaatcaaatatggctactcaggatttgttacagaatttgattttctatagatgtcaatagtagcccccttttcaagacaaatgtcatgggaaaatgcttataatttaatgttaagtagaaaatgtagaatataaaaaacaagacatgatgacaaatattaacaatggtaagatacagggggattttgttttacactcttttctttgttacctatagtgaacaaattttaaatcaaattagaaaatcaactaatgaagcagcatatactatattgcctctaatcataagtgggctgtctgtgaggttttggaaaccttttaaaaacacagtcattggtaataatgacaactcatagagagggtaggaaccttcagggactgtttgaggcacaaaataggccaccaataaatgtgttgagctttttaaaaaattacttcagcaaacacttaaatgagtagctttccattggcacacagatctctggaatggccatgcttatgcccagataatttaatataaatatgtaaatggagaaaaagagacatagacatgatcatgtatggatggatatatatgtgcgtgtgtgtgtgtgggttttggagctgctaatgtaataaattatttgcccgttgcacttaggaagaacatgagaacagtatagctcaataactgaaagcttgcatctggaacctgtttcactcaatagcttcgtgacctttaagcaagttacttgacctctctatgtctgtttcttcatctcttaaagaagatgataatagtacccagttcacagtgttggtatggggattaaataagataatatgattaaacaatgcccaggtcgtaagtgctttattaaatgttatctagggccaggtgccacggctcacacctgtaattccaacattttgggaggccaaggcaggaggatctgttgagcccaagagtttgaggttgtagtgagccatgatcacactctgtcactcaggcactctagcccaggtaacagagtgagaccctatcttaaaaaaaaaaaaaaaaaaaaaacacaacgatattatctaggattatatgtcttccatggtaccttacacatagttctttttacactttcttcatccctccttgattctctctgcttaatgctggggagtctaagaactaagatttacttgagatcatttgctctgtccacttcaatgaccgcacttgagttctgaggctacttctttccaagcctgtttatttatgcagcagccccactggggcagccagtacatctggagctcttccttggtgcctgcatttaggcagatatctcagtggttcatgttctttttctagggaatttaaagtatttgcaaagaggtttgattaactgttttttctaatgcattaaagacttaaagtcagtaatttattacatgttccctgagattctaaagtattatgtttaaataatttattcctcgatgagcaaaaattgatctcatactcgcactaagttcaatgacttaatattttcctaaatttgcgaactcttaggtgtagtgagatgaaattttttcaacattttattatgaaaattttcaaacatacagcaaagatgagtttttcagtgaatacccatatgcctaccacctagattctaccattcacattttattctactgactttatcacatatatatatatatatatatatatatatatatatatatatatattcatctatccacttatctctccatcaactcttttttatgtacttcaaaggagttctttatatacgtatatcctgggtagcacgcctttttcaggcatatgttttgcgattattttaatctagttggtatttgtcgtttcattttctttatagtgcccttggatgagtataaatttttatgaagtataatttctatctaattgcaattgccttttcaagttttttttggaagaactgtatcccaattttttcataacaataatcaaaatatttctaggtttttttgttcttattgttttgttttgtctgttgcccaggctggagtgcagtggtgtgatcttggctcactgcagcctccacctcccaggttcaagcgattctcgtgcctcagtctctcgagtagctgggattactggtgcccaccataacgtccagctaatttttgtatttttagtagaaacagagttttgccatgttggccatgctggtctagaactcctgagctcaaatgatccacccgcctcagcctcccaaagtgctgggattacaggcgtgagccaccatgtccagccacagtatttcttttctaattactacatactttagtttcttcaagtgatttaacttttgttatgcaagttcttttcaccacttcaaccaaggcttattagcagtagaaaataatattctagacaggttttttttttctggccataagatttaaatattctacacgcatattttcccttaatgttttgctttgcatgtggtagacatgcaacatgtatatgtgaatgattgataggtagccatgaaatgtataatttccctattgtttaggtatagctcttccatgaaaccttaaatgtaaacaaattttgacagttgcctgtttcgcttttagttagaactgctaaatctgtacagtgtcatacatgttaagcaaagcactgtctgtgttttcttaaagtgtcagaaaaggtaattcgttcctgttaccaagtgatccagcataactaggatggtggttttttgttattgtttttgttttgttttgttttgttttttgagacacagtcttactctatactcttgcccaggctggagtatagtggcacagtcatagcttactgcagcctcaacctcccaggctcaagctattctcccatctcagcctcccatgtatctaggactacaggcacgcactaccacacccagctaatttttttgattttgtggagatgtggtgcaagagtggtctcactgtgttacccaggccagtctccagctcttgagctcaagcagtcctcccaaagtggtgggattatagacaggagacaccatgactggcctataactagtttttatacttaagtgggaagattgttctttatgttctgatctccaagaactttaaataattgtatgctgctggccaagcatggtggctcatctctgtaatcctagcactttgggaggctgagacgggaggattgcttgagtccagaagttcaagaccagcctgggcaaaatggtgagaccctctctctaaaaaaatttttaaaaattagccaggcatggtggtgcatgtctgtagtcccagctactcaggaggctgaagtgggatgattgtttgagccctggaggtcaaggctgcagtgagccatgatcgtgccactgtactcccatctgggccatagagtgaaaccatgtctcaaaaaaaaaattgtatatatatgcaaattgtaaatgtatgcaaaaatctcttaagttctattgaaggtatggaatgagataatcaaagagtttctaataagctctaaaatgcttgattctattatactgttcatttccaggccaattttttaaatacaatttttcatgaacataaaattatgatgtatatataaatatgtagtagaacacgatagggtgactatagttaataatatattgtatatttaaaaatactaagagtgaaattggaatgttcctaacacaaagaaatgataagtgtttgaagagatggataccctaattaccacaatttcatcataacacattgtatacctatatcaaaatatcacacataccctgtaaatgtatacaactattatgtacccataataaaaatttttaaaaatgaaaatatacatagtagaaaataaacacgtgcttttcattttctttaaaaccctttaaacagaaagatgtatttcaattaaaagacttggagaagattgctcccaaagagaaaggcattagtaagtaccaaagttatactggaatgttttgggaaatatactgggatgttttgggaaatatcttaatattcattaagtcatcttttctgcaacagtctttcactttatggaaaacctaaatttctagagacaaagaaatcatcaccatccaaagataaccactgtcatgttgtcctttatttttctgtataatacatcctgtatattacattttgaatatatatccctgtcattaaatatccttttataacataaatgattgtatagtatcccattgcaataaaaaaatacttttaaaaatctagttgataagctggctggtagcgcacacacacttgtagtcccagccactctggaggctgaagcgggaggatcacttcagcccagctaggcaacatagcaaaatcctgtctttaaaataaaaatccagttattagactggtttccaattcttttgctgtcgaaaacaatgtgttgacaggcatccttctacatatctattattttttgtttggctgtatttataaggtggaatttccccaggaaagatatgtataaattgggctgggcgtggtggctcacgcctataatcccagcactttgggaggccaaggcagttggatcatgaggtcaggagatcaagaccatcctgcctactaaaaccccgtctctactaaaaatacaaaaaaatcttagccgggcgtggtggcaggcgtctatagtcccagctactcaggaggctgaggcaggagaatggcgtgaacccaggaggcagagcttgcagtgagccgagatcgcgccactgcactccagcctgggtgacagagtgaaactcagtctcaaaaaaaaaaaaaaaaaaaaaaaagatatgtataaatctgaagttttagatacagattgccacgtttctccacccatactgagagtacccattcaagtatccttgaattctttattgtattttttagtgtttttaatttggtagtcaagtcatgtctaattgctttattttcgatttcttcagttattaatggggttgaacatttttctcatatattggccatgcatattttattttatttatttatttatttgtttatttatttatttgagacagagtctactctgtcacccaggctggagcccagtggtccaggctggagcccagtggtgcagtcctggcacactgcaacctctgtctcccgggttcaagcgattctcctgcctcagcctcatgagtagctgggattacaagctcctgccaccatgcccacctaatttttgtatttttagtagagatggggatttgccatgttggccaggctgttgtcaaaccgctgacctcaagtgatctacctgccttggcctcccaaagtgctgggattacaggcatgagccaccatgcatattttatagatgcacattgatgtattttttgtgtgtcttttgttgtgttgtttcaaaatgaaaaaacctcttttattatgagtatacatacaagtgaaaccagacaaccactgagagtccctcacacttttatgtacaccacacaattattctctttacagtcatcagtgaacaattggttctgctacttcttaaagatatgcaaatttcttaagtttaaatacacagttgaccctggaacaacacctatgttgttcaagattgggataccaatcccccacacaattggaaatctgcatgtaatttttgactcccccaaaacttaactactgatagcctgctgttgacaggaagccataccatgtatttactattcattaagtggcagtggatcatcataaagttcttcatccttgtcatcttacattgagtaggctgaggaggaggaggaagtggtgttgctgtctcaggtggcagaaaatccatgtatataactggacccatgcagttcaaacctgtactgttcaagggtcaactatacaatattaattacaccagtgtcctaatgtccccagacaaattgtaggtaatggaatctcaactgtatcttgaaggatcaaaaacaaaaaacaaaattcaatccagtctacaagatggaaaaatttattgtattaactaaattccttttcttcttacctattttccctcccagttattgacaatttttttctgcagtataagatgatggccaaattacccaacatcttttttaaaaaagaaacattatttagaaaaggaaaagataccatatagcaacagactatgagtgttaacaccattaaaattatttactaagcactgatgctagcatcttctattactagataatctattgggagagaaaaacttgcatttctgtagttttgttttgctttttcaaaggcttctcacaagtaacattttattgacattactgctatgcaccaaagtaagtatggaaatgatcatatctaatagattttttaaattaggcataaagaacaatttgccctagagtcatccagtgttactgctaagagttaggattagaactcaggtcctgttcttaatcctgtatattacttgttttcccctaggctcctgtataagtcatgctttgcttaaggatggggatacattctaagaaatgtttccttaggcagtttcattgttgtgcatgttgttatttttaagagcttattaactttttaactcttgatttgtgatatgttttgcaagtgtttccccagttatttgtcctttaattttatttatggtgtttttctaacatagagtctttaaaaattgtctcttagctgctatgtcagtaaaagaagtccttcaaagcttagttgatgatggtatggttgactgtgagaggatcggaacttctaattattattgggcttttccaagtaaagctcttcatgcaaggaaacataagttggaggttctggaatctcaggtaagctgccacagttaaaaagaatagagttgctttataacggagagttgttttacttcatcctctttttgtttagcagtttcttttgaatttttgatatgcattatttgactgaaagtctaaagataattaacatctgtttctcctaaacaatatgaggaacttagaacgttttaattttcatcttcccatatgtcaagatattgtttttgttgttgctgtttttattgttttttaattttctctttatcaatagatggttttttggaagcagttttagacttacagaaaaatattgatggaaaagtacagagagttcccaaacgtgccctttctccctcaccacgcacacaattttccctgttattgacatcctatactagtgtaatatgtttgtcacaattgagtcaatattgatttattactaactaaattccgtagcttacattagggttcagtcttggtgttatacattatgtgagttttgacaaatgcatgatgacgtgtatccacaattatagtattgtacagaatagtttcactgccctaaaaatccgctgtttcctacttgttcatccctctcttctcccgaaaccgtagcaaccactgatctttttactgtctctatagttttaccttttccatatagttggaatcatacagtatgtaaccttttcagattggcttccttcccttaacaaaatgcatttgaggtttctccatgtctattaatggcttgatggctcatttctttttattgctgaataatatttcgttatatgaatataccacagtttgtttatccattgagctattgaggaacatctgggtcacatccaagtttgggcagttacaaataaagctgccataagcattcatgtgtaggttttgtgtacacataaattttcaacacatttagtaccaaggagcgtgattgctggattgtatggtaagtttatgtttactttctaggaaactgccaaagtatctgtttttgcattcccaactacagtgggtaagagttactattggttcacatcactgccaggatttggtgttgtcagtgtcttgtattttagccattctaatagatgtgtagtggtatctcattgttgttttaaattgccattctctaatgacatatgatttggaagatctttttttttttttttttttttttgtgagacggagtttcactttttttgaccaggctggagtgcaatggtgcgatctcagctcactgtaacttctgcctccctggttcaagtgattctcctgcctcagccttccaagtagctggggttacaggtgcacaccaccacacccaactaattttgtatttttagtagagacggggtttcaccatgatggccaagctggtcttgaactcctgacctcaggtgatccacccaccttggcctcccaaagtgctgggattacaggcatgagccaccacacccagccctggaacatctttttttatgcttatttgtcatctatgtaaaaggaggtgtttagatcttttgcccatttttcaattgggtttttgttttctcgttattgagttttaagagttctttgtatattttggacaccagttctttatcaaatatgtgtttttcaaagatttcctctgagtctgtgacttatcttttcattatctcaacagcatctttcacagagcagttttcaattttaatgaagtccaactggtcaatttttttctttcctgggacattcttttggtgttgtaactaaatagtcgtggccaaatccaggggcatgtagattttctcctatgttaccttctaggagttttgtagttttgcattttacacttagatttattatccattttgagttaatttttgggaaaggtgtaaagtgtgtgtctaaattcaattttttgtacatacatgtccaaagtaactgtattttagtataatttacttcttttctgtatgtgtgtgtgtgtgtgtgtgtgtatatatatatacacataaaaatacacacatatatacacaaaaatatataaatatttttatataaataaataaataaataaatactataaatatttttgtgtgtgtgtgagacagggtcttgctttgtgtgtatatgtatatacacatatatacacacatatacatatacacatatatacacatatattcatatatacacatatatacatatatacacatatatatacacatgtatatataactactaaagtacccagggtcttgctttgtcacccagtctggagtgtagtgtcgcaaacatggctcactgcagcctcgacctcccaggcccaagccatcctcccgcctcagcctcctgagtagctgggattataggcacaccaccaaactctgctaatttttgcacttttttgtagagacagggtattgccatgttgcccaggctggtcttgaactcctgaactcaagtgatccacctacctcagcttcccaaagtgctggtgggtgagccactgcgaccggcctgtaaccctgtgcactttatggatttaaaaacacttcaagaaggaatccgtactgaaggacatcctttagtaatttgttcagccagagtttaagagtggtaaactctcaatctttgtttgaaaatgtctaatttatcattgcttcccgaatatagaattcttagttatttttcctcagcattttgaaaatattacttcattgtcttgtggcatatgttgctaatgagatgttttgctatcattctgattgtcttgttttccttagtaatctctcttctgtttgcttttaagatttccttcagtctttgatgttatgttttgatgttttatcatgaatccgagtttgcatgtttttatttcctcttctttaggaccctggctgctgcttccatgaaataattaaagtctcctattatagaaaattctggctgggcgcagtggctcacgcctgtaatcccagcactttgggaggctgaggcgggcagatcacgaggtcaggagatcaagaccatcctggctaacacggtgaaaccctgtccactaaaaatacaaaaaaaatagccgggcgtggtggtgggtgcctgtagtcccagctactggggaggctggggcaggagaatggcatgaacccgggaggtggagcttgcagtgagccaagatcgcgccactgcactccaggctgggcaacagagcaagactcaaaaaaaaagaaaaaaaaaagaaaattctaaggtggtattacttaagctgtttcctgttccctaatagctctgttctttccttctgggattcctatttgtatcctcattctatcgtctatgttgtttaagaactctttattttttccatgtctttccatgtctgtgattcattgcagttaattttctcagctctctttcacttacagttctttccataactatttctaatctgctacttagctgttcattaagtctttattttaataattagattttatctctagaaattctatttggtcctttttcagttctgcctatcctgtttttcctatactgttctatttcattatggcttctattgctttcatctcttttataactttaaacatactgatatggcttggatctgtgtccactcccaaacctcatgtcaaattgtaatccccagtgttggaggtggggcctgatggcaagtgattggatcttgggggcggtttctcatgaatggtttggcaccattccctcagtgctgttcttgtgatagtgagtgagttctcatgagatctggctgtttaagtgtgtagcacctcccccgctttcagtcctgcttctgccatgtaaaatgcctgctcgccctgagtaaaggatccctgaggcctccccagaagcagaagccaccatgcttccaagtagagcctgcagaagcatgaaccaattaaacctcttttctttataaattacccagtctcaggtatttatagccatgtgagaacagcctaatacacatacttaacttatattttcagattacttaaatatgtcaaatttggggagggctattaatttgatctgtgtatctgctggctactaccatttgtagtatttttttaacctgtatgttttttagtttttatttatgagctcacattcaattggtgatgtttagtctgtgggagccacagatgctctgtgaaatagtggtttaggcttgttttttttagtctctgggtactttagtagttatggaccaatttttatattaatttcttggcttacagttccaccgcctcatgttttatacaggatgagtactgcataaaatttagtatgcatgtctatacatggcatggattgagagatttgttttcctataggtgactttcccccacccccacatgaagtgcaagatggaggtaagctccttgttattttccatggagtttgctggtactttgagctatatgctggagctcagttctagctctccttgtctcatgacccttcacacctgttttcctggtgtgcatgttagactcctagcccctagttacttttctgttgttgctctttgttttttcatttctgtcacctggggatagttcttttttttttttttgagatggagtttcgctcttgtcacccaggctggagtgcagaggcacaaactcagttcactgcaacctctgtctccagagttcaagcaattctcctgcctcagcctcccaagtagctgggattacaagcgcccgccaccacacctggctaatttttgtatttttggtagagacagggttttgccgctttagccaggctggtctcgaactcccgacctcaggtgatccacccgcctcggcctcccaaagtgctaggattacaggcatgagccattgcacccggccttattttattgttttattcatcattcaaaaaatgtttttgcatgttttttgagtaacagaagatgtgctggattttggaaatacatgccctcagagagctttcagtcagttgtaggaggacagtgggagaaaaggaagaggctagagaaggattggtgaagagataggtagaggccatgtcttataggttcctctgtggcatgatcaggagttcggacctacctaagagggatggaaagccaatggaaatttttaccagagaagttacatgatgataaatgcctttctgaagacagtatgaagagcaggttgagggaaatggagcctaggatcagagaaatcagctatgcggctattgtaattgcatggttaacaaatgaggacccatattgaggtatctgcacactcactaggatggctactatcaaaaacacagagaaggccaggtgtggtggcttatgcctgttatcccaatactttgggaggtcgaagtgggaggatcacttgagcccaggagttcacggccagcctgggcaacacagcaagatttattacaaaataataataataaatttttttcaaaagagaataataagtgttagcaaggatttggagaaattggagctcttgtgcactgttgatgggaatgtgaaatggtgcagctgctgtggaaaacagtatggtggctcctcaaagagttataaatagaattaccctatgattcaacaattctgtggtgtgcatctgtggtctcagctacttggggggcctgaggtgggaggatcacttgagcctaggaattcaagaccagcctggcaacatggcaagactccatctctacaaaaaaatggtaaaagtagctggggatagtggcaggctcctgtggtcccggctattcgagaggctgaggtgggaggatcgcgtgagcctaagagtttgaggttgcagtgagctgtattcgtgccactgcactgcaggttaggccacagagtcagaccctgtttaagaaaaaaaaaaaaaatccatttttggtacatatccaagacttgaaagcagggtcttgaagagctatttgtacacccacattcatagcagcattacagtagctgaaaggtagaagcaacccaaatgactttcaatgaatgaataaacaaaatgtgaaagtggaatattattcagccttaaaaaggaatggaattccttttatttatttatttagagatagagtctcaccctgttgcccaggctgaagtgcagtggcacagtcatagctcactgcagcctcaaactcctgggcataagcaattctccagccttagcctcctgagtagctaggattgcaggctcatcccaccacaaggaatgaaattctgacgaatgctacaaaatggatgaaccttgagggcaatatgctaagtgaaaagccagtcataaaaagacaaatactctatgattccacatatatgaggtatctagagtagtcaaacttacagaaataaaaaatagaatgaggcctgacattgctgaccttggaagatagttccactggcactcctgtccctgactgaagaaccagatgttgttgccaccaaaaaaaaaaaaaaaactatccaagctaccagtgacaattctggaaggtatgtgtcattggctaagcctgggtcacgtgtccacactctagttgccaggagagctggcgaagtaaataattggggtttctagattttgtagtaggagttagctgcttcctgttggcacaaacagttccccaaaacagaagcagggttcagatgctgagcagcacccttgctcccatgatagataactcataaaataagagaaaaaactctagaaaggaacacaggacatggagtcaaaataacaacaaatttattgaataccactatctgttgtgtgttagatactgttctaggcacttgggatccattagttaacaaaggttgaaagcagggagatcagataggttattggaataatccaactgtaaagttacagtggtttttttatttattttatattttttatttaagaaaaaggaaagagaaggcctcagaaaagagaggatctttttttttttctttttaagagatggggtcttgctctgtcacccaggctggagtgcaggggcacaatcatagctcactgcagccttcaactcctgggctcaagcagtcctcccatctcagcctcgcaaagttctgggattactggtgtgagccattgtgcctggccacggtaatgatggtttaaaccaaagcagtggcagtggatttgtgaaaaaattgttggattctggacgtagtttgaaattagagccagtaggatttccttatggaatggatgtagagtgtgaggtcaagaaaggaattgtattagttttttatggctgccatagtaaattagtgcaaacttggtggctgcaaatgcaaaaatttattctcacagctctggaggccagaagttaaaaatcagtgttactaggccaaaatcaaagtgttggcacagctgttgctcctccagaggctctctgggataatcttccttgcctctttcaatttctgtgggctgccagcattctttgacttgttgctgcatcactctaatttctgcctcttggtcacattgctttctgctctgctgtatgtgtcaaatttccctttaataaggatacatgtgattgcatttaggatctgtcatagtaatccttgagatcagtaatctcatctcaagatcttgaatcccatctgcaaagtctttgccacataaggtgccattcacaggttccaaggattgggacctcctatctttgggggacattatttaacctaccacagcagttgtggatgaattttttaaaaattcaactaagatagggaagactgcaagaggagcagtttcctaaaggaaaatcagaaattcagctttgaccatgttaagtttgaagtgactgttagacaaagaagtggaaatatcaagtagacaattaaatatatgaatctgtagttcagagacaagtctttataatttaaccaacggcttcactaatctcactgcagatgggggagtcctcactgaaccctgactctcaagttgttccacattttctttgaagttatatatttagagtgttattggttacaagtactaggacattactcacactagtgggtttgttttaaggaactagaaataggaatgggaaaacatgtaagaataataactggtatttattgagcacttgtgcctggcagtgaaccatggtcctaaatatattatctcatttaatccccacagtattatgaggttagtattatatttgttttatagatgaagaaactgagacacagagagattaagagcttgtccaaggtctcacagtaagtgtggaattgggattccgtctcaggtattttgactccagggtcctcattcttaatcaccgcttctcaaaacaggtagcctgtctttccattctccccttcttactctccccgcctctccccttggctgccagagttgggtggaatggaagtctcaaaagagcggtggctgggcagatattctaaaagtgctcaccttatctctcttttttttcaacagccttgctgagatatagtttatataccatataattcacccatttaaagtgtatgatgtaatagtttttaatatgttcattgatagatgtacagtcatcactacagtcaattttagaacattttcattacctcaaacagaaacgctctactctttagctattattctgaatcttctcagcccactcctcccacacagatctaggcaaccactaatctactttctgtcactgtagatttccctgttctggacattctatatgaatggaatcatataatatgtagtctttcatgactgacttctttcccttgtcatagtattttcaaagttcatctatgttgtagtatgtttcagtacttcattactttttatggccaaataatactctgttgtacacatataccacatctaatttatccattcacaaatacaccacatctcatgtatccattcatctgttgatgggcatgtgagttttttccactttttgactattctgaataatgctgctctaaactttgatgtacaagtttttgtgtggacatatgttttcatttctcttgggtgtatacctaggagtagaacttctaggtcatatggtaactctgtgtttaattatgtgaagaactgccagactgtttgccagagcaactgcgccattttatagttctgataacagtgtgttagggcactcatttctccacatcctcccaaaacctatttgaatttttgattctagccatccttgtgggtatgaagtggtatctcattgtggttttggcttccatttctctgatgactggtgatgttgagcatcttttcatgtgcttcttggccatttgtatatcttccttgaataaatttttattatattctttgcccatatctcttctcttaaacgtgatgctgtatttttctttcctgctaggaaacaacgtgcatattcatcactcagcaaatttttaaaatcttagttatgaatttagaaactttatacaaggtaatttacttatgggccttactgaacttccctgtcttcatgtttttttgttcttgcttttatcctttttgagaattcccttttctctcctctctatttagccaaattctaaacatctctcctctcagaaacctcctcaagctctcattgcttaaaatattcttacccttctctaacctcctgtaatattttttatcacaagtaaaatatattgctttggcatgtactgctggttgcctagctagtcaacattgtcctcctcttcttcactaacaaaacactttgttaaaggatagtgtgtcttactaaaaaatactcatctttccagactccctggcaactaatggtggcaatgggaagcaggtctgataaatgagatgtaagtagaagactagctttgactttcctgggaaagttttcactttcctgaaaaaggcaaagcttctttctcctcttttctgtgatatgcattactgagataaaaagcataaggatgaaagttctgttcattcatgtccatatcacattctcaaagaatgacagagcctggaaaaaagatcttgggtctctggtggcatcatgagatactgtactagccttatttaatccagttttagttaaatattgttatttgtggccgaatgtgtattctaaatgaatactactgttttgtagcctttaaaaaaaaagtgtgatttagattttgtattagttatccattgctatgtaacaaaaatatgtactccaaaacagggtgactttaagaaataccaaaacagggtgactttaagaaatagacattactatctcacagttcttgtgactcgtgaatcccagcatggcttagttgggtacatctggctcaaggccttatgtgaggtatagtcaaactgttggccagggccatattctcatctgaaggtttatctgggagaggatctgcttccaaatccaatcatgtggttattggatttagttccttgcagggtcttgggctgcagatctcagttctatgatggcttttggcccaaggcctccctcagctccttaccacatggttttctccgtagtacagctcacagtatggcagctggcttctctcaaagcaagctcatgtgtgagagtccaagacagaagcagtagtttttttgtatcttaatctaggaaacaacatcccatcacctcagccacattttattccctagaaacaagtcattaaatttagtttacactcaagagaggagattacacatgagcataaatacaggcatacctcagatattgcaggttcagttccataccaccacaataaagggaataatgcaataaagtgaggacagaaactttttggtttctcagtgcacctaaaagttatatttatactatactgtaatctattaaatatgtgataacatgtttttaaaaactaatgtacattaatttaaaaatactttattgctaaaaaatgctgatgagcatctgagccttctgtgagttgtaatctttttgcaggtggagggtattgccttgatcttgatggctgctgactgatcagggtgatggttgctgaagggtagatggctatagtcgttttttaaaaataagacaaccgtgaagtttgctccattgattgatttcacaaaagatttctctgtagcatgtgatgctgtttgatagcattttacccacaacagaactttgaaaattagagtcagtcctctcaaaccctgcctctactttgtcaattaagtttcaggaatattctaaatcctttgttgccatttcaacaatgttcacagcgtctgcatgaggaatagattccatctcaagaaaccactttctttgctcatctataagaagcaattcctaggaccaggctcggtggctcagtcctgtaatcccagcacttcgggaggctgaggcaggcggatcacttgaggataggagttcaagaccagcctagccaacatcgtgaaaccctgtctctacttaaaatacaaagatcagccggacgtggtggcatacgcctggaatcccagctactcaggaggctgagacaggagaatcacttgaacctaggaggcggaggttgcagtgagctgagatcacaccactgcgctccagcctgggtaacacagccggactccatctcaaaaaaagaagcaatttctcatccatttaagtattaccataagattgcagcaattcagtcacatctttattctctgcttctccttctcattcttattcttgccatttccaccacatcagttacttcttccactgcagtcttgaacccctcaaagtcatacatgggggctggaatcaacttcttccaaattattattaatgttgatgttttgacctcctccccttaatcacaaatgttctgttttgttttgttttttgagatggagtctcactctgtcatccaggctggagtgcagtggcgcgatcctagctcactgcaacctccgcctcccgggttcaggtgattctctggtctcagcctcctgagtagctgagattatgggcaggcaccatcacgcctggctaacttttgtatttttagtagagacagggtttcacgatgttggccaggctggccttgaacttttgacttaagtgatctgcccacctcagcctcccaaagtgctgggattacaggcgggagccaccatgcctggccacagatattcttaatggcatctagaatggtgaatccttcccagaaggttttcaatttactttgctcagatccgtcagaggagtcactgtggcagttatagccttactgaaagtttttcttaaataataaaacttgaaagttgaaattactccttgatccacaggctgcagaatggatattgtgttattaggcatgaaaacgttaatctccttgtatatcttcctcagagttcttgggtgactaggtacattgtcattgggcagtaatattttgaaagaaatcttttttctgagcagcaagtctcaacggttggcttgaaatacccagtaaaccatgctgtaaatcgatatgctgtcatctgagctttgttattccacttatagggcacaggcagagtagatttagaataattcttaagggccctagggttttcattgagcattggcttcaactaaagtcaccagctgcattagcctctaataagagtgtcaagtgtcaccctggcctttgaaactttaaagtcaggcatggacttctcctctctagctatgaaagtcctagatggcatctttttccaacagaaggctgttttgtctaccctgaaaattttttgtttagtgtagcttggctaggtcttctggataacttgcttcacttcatagtacttgaaacctcgtcttgcacttttacattatggagatggcctctttccttaaactttatgagtcaacctcttctagcttccaactttttctgtgcagcttcctcacctctcagcctacagagaattgaagagagttgaggttttgctctggattaggctttggcttaagggaacgttgtggttggctcgatcctctacccagaccactaaaactttctctatctcagcaatacggctgttttgctttctcatcatttgcgtgtttactagattagcacttttaatttctttcaggaacttttcccttgcactcacaacttggctctttggcacaagaggcctagctttccgcctgttttggcttttgactgtatcttcctaactaagcttaatcatttctggcttttgattgaaaatgagagatgtgtgacgttttttcacttgaatgcttagaggccactgtagggttattaattggcctaatttcaatattgttttgtctcaaggaatagggaaggccaagggagggtgagagatgggggaacggtgagtcactggagcagtcagaatacacacagcatatattaagttcactgtcttatgtgggcatggtttgtgacaccccaaaacaattacaatagtaacatcaagatcacagatcaccgtgacagatataataataatgaaaaagtttaatgcaagaattacacagagacaagaagtgagcacatgccattggaaaaatgacaccaatagacttgcttgactcaaggtagccacaaacttaatttgtagaaaacacgctatctgaagtgcagtaaagcaaagcacaataaaaacgaggtatgcctgtgcaaagagggatcgttcaggccatcttagaggatatcataggattttttttaaaaaaaactttttatgtgtgtatatcttcttagttttttaaaagcagctctaatgagaaataaatgacatacaaaaacctgctcatatttaaagtgtattcttttataacctttggcatatgtatgtgtccacgaaactatcaccacaatcaaggtaattgaacataccaatcaaccctaaaagtttttttaattcccctttgtaaaatcattctcttccttccctacactgctcccctcctcctatccccaggaaacttgctttgctttctgccactattcattagtttgtatttcctagaattttatatagatggcatcatgccgtagtgtgtactttcccccacccccagcttcttttactcaataaaattattttaagatttacccatgttgctttatgtattcattcatttctgttgctgagtggaatttcagtgtatgaatatacaacagtttattgatgaacatataggtattaagctcttttattgaatgcatagacattaaggattatgtgcccttgatgtatttatcattatgaaatgacttatttattccaggtaatattctttgttctggtgttacataggaactctttcttttgagtaactctttctataggaaatctttttttttttttaatagtagcatggcatatctttttctgtttacttttaatctttttgtattttcatatttagagtaagcttcttacatatagttgggacttgctttttttgtataatctgacaatttctgccttttaattagggtgtctagaccatttacatttagtgtgattacctatgtagttatgttaaatctgccatcttatctcaactagtctcaaagttacttgaggacaagaactgtgttttatttattcaacaaataattattgagcctcaagtacttaccttcttaccagacaatcatttcttcctaaaactaggcataatgggggctgattcagcatttcttggttgacttcagagaaattctttgcatttgagggaaaaggtcaaatatacggtttttatttctttacttctggatttcacataatttctacttagaaagtggggaagcttgccaaatcttaatagaagtaagcaaggaattcttgttagtacagtgaatctagcttttaaaaaattgagcttaatgtcagtgtttattaattctgaatgagagaattggcatccagtgtattttgtgacatggccctctttccccactctcacgtaccggagatcaaagcttaatctgacacacctgctcataagttgaagtcacatcagaggctaacacataggtagatcctatacctcctgttctaagcagtccagaaataaatgaagagcaaggttttgatacgtcatttctaaaaggttgatagcccttggcatttgctatagataactatttttttaactcaaataaaatgaccctaatgccatttcgcagacctaaacctactttaatctttcactggatgttgagaagtcatgagagtatcaccctgtgcccctcagccattgttctgaagatcacttatcattttagagaagcaatatggcttcatggaaagagtagtagttagaaagcagacatggatggaaatcacagcttcacttcttgaccagctgtacaatattagaaaaatatcttaagccttttaaagccttggtttcctagtttgtgaaagaaagcttacacctacttcaaggcggttgtagtgaggattaagtggtatgtgtaagatgcctggtactttaggcagtcagtatatggtggccgcagatcagctaaatcagtattgactcaggaataaataccgtaagctttttcatttagttagaacaaatatttgagggtctactgtgtgtaaaacattttaccagatactgaaggtagttcataaaagtagaggtcagggtccagacttcataagaaggaacttgtaacctgtgctgaagatgagatatatacacttggaagagtaaaatgagtgaaaagtaatacatgccagactgcctaaatgagcattagagatgaaaaatgcttcaagagatggtgggattcacataaagatagaagccactcagttcatgttggattgaactaggttccaaacttaaggttatagtaaagatcagcttattctacatattgccaaattataatgttaacttcccttgagtttcttgttaattacttccagatgggggttgggggagactctttaattttttttttttcatcactcttctgccagtgattccaattatgtgcaggaatgttcttgtcccttgagaacagacattcttataagctgaaaaatcaggaaacatttttttctcttgcctttaggttgtatgtgttgattattattaaatacagtctataagcctcatggttataattaacgtttctctttaacgtcttctaagatagcagacaaaccagcaactgctcattggctgtgttaactttggcggttattttctgtgtggctgctccgtgcatgtgctgtgctaagttttttgggcaataaaaaaataatagaatatgaggttcacatccagagaatttacactttaattggtaaggcaaaatgaattcctgatatagttaattaacttattggaaaaagttatttaactgtgtaatgtttaatgtatactcagtgccaaatactgtctttgctatgggtcctaattgttatacaagtttaaaggatggcaggatttttatacatttatatagctatgggagacttcttagaaatgattattttgagctgaaaattgggtaggtttagagggatggaggaaattcccaagggaaaacagaaggaatatttattgagcacttaggtacagttttaagagcttttgcatgttttgtatcctttgattcttacacttgcatgaagtacgtattgctgctaactctattttatgtaagagaaaatggaggcactaagagattgaataatttgcccaaggtgacagtattagtaaatgatgaagcaagattcaaatccaggcattcttactccataatccttgtttgtaaccacagataaacaaagctttaaagcagattacatttagtggatagttggtgaccagcttggaaaagatatgcaattttttgttatatagtaatgggaaaataaggttggaaatcaaatggaggccataatatggggtgttttatgtttggttgaattttgttgtgtacatgtacaccaagcagaggaagctggaaattttcctgtcagaatgtttttatattcttttgcttacctaattgcttaaaacaattagattatatgtaagcttagaaaatagctgttatattctgatattaagcaaaaaattttccttctctgtatatgtggttgaattttgctgaaaataatttgaggtgtagtgatttatttctgaaaagctgaaataaatctttgtattggcttggaaaaataattgttaaactaacatctctagctgtgacacagatgcatttctgaagacttttaacataaattaataattttaatgggcaagaaaagctttatgtggaagtgatgaaagtggtagtgcatgttctaatctgctagttctcctgaaatatatgtaaatttttttagtatttggatgatagtgaagcagctattttggctcgacagataataattataaagattaattatgttgtagaaacttccaactgaaatgacatttctctgtatgctgaagaatatatagaaattattaaaagtcaagagatgactttttcttcttgatagctatttctagaattttagctggaacttgttcattttcccccgtgtggtaatgatttagtcactgtgtgtgtggatgtgtgtttgtgggtgtgtgcacacacacacttgaaagagaaaaggagtgagtgtgtttgtggtctttctgaatattttttctaaggaaaagccaggtaaaaatgtgtaaggataggttcttcccatcatcttctggttctcttctttgcccttcccaaataacttggtcttaagaatgaaagaacaattcaacttcaagggaatgacttcctccattttactttggcttgtgttagtggacatagcatggggtactgtgatgtgcacacagccaggaaagagcaatgttgtaactgttatgtttaacctgctattcccctggagtcacctggcaatacaggaagtaactgaccactactgacttgaaatgcacattttttagtctttttccaaaaagaatagaatttccaaaatttatttttgtatttgtacccctgtccgtcccttccacacttcctgttctgacttacatattccttttctctggtgctgtggtaccccgagcataactctaatctgctggactatgctacaattgttggcttactcaaccccatgtcttagtcaacttgtatcagtacctagcaccgtttttggcatgtggtagattcaagtatttgacaagtgaatgaaaattaaaggaaataaagggtatgaagttattcttaacaaaaaccttatactaatttggagaattttattaatatggcagcaagtctatgtagtggtttttgactgagttttatttaaagttaatgggtcagaattatgaaaatcaaaatctttattttgttttcttcccctgctgacctcttccttagttcttcatccaagttctggtttataccccacttgttgccactggaaggtagtttggggacatattttttagggattggcttatgataaggattacattttgaaatccatactaagctgaattttagatattgtgtattggtttagggaggacactaacagatattcttaggacaacttaagtatttgttttgttttgttaccaatttttagaagtgaatatatacagttctttatagctaaaactgagtgcatcaagagtaggttaattattgggctgtgtagataacttgaaatgtttttgaataaaaataggcatctctactgaagtttattcagttctgtaaatgtttagtgaatgcttgctatggcaggcattgtgattgatgagagggacataagaatgaattaggtagtttctgttctctagaacctctcactctaatgaagagatggccatgtcaacaaatcattgcaatatggtgtgatatatgcaatgctgaaaaataatgatagtacaaaagagggtgaaagtcagttctgcttccgaaaaggctttatagttaaggagacgtgtaagttggtgctagaaagatctgtgggagctcataagggaattgaagggtgaagggcactatagcgcagtgatttaagggagtagactctagacctagactccctagattcagatttaacttccgccatttacatgctgtgcctggcttttttctttttctttatctataatggaccaattatagttgtatgtgccttgttctttttgcttggaagttttttaatcccttcctcctcagcagagtataatacttttttgtgctgtgactgtcttttatatatatcttttctcaagtgaagtccttatgtgccttgttttctatggcagactttctttgaaggcagggtctatatcttaatcgttttctatctcccacgtggaatgcagtctctgagacacactgaaacatacagaaacatgatgaattttgagtgaatgcataaatcaatatatcacagccttgtttctgtcccagctattgtgtactgggtccagtagtcttactccctggcccataccttttctttgactcccagtctacacatacagcagaaaaggtggtttccattaaatagttattttagtaatcttgattttttttctagaactcagcttcagaaatacatattgtatagaaataattaaatgtgaatttttaacttttttttctactagcttacctgaattatattttgctgggcctgagctcagcattacccaaagtaattctgtggaatggatatatgataagtgttacataaaagggggttctataatcaaaggaatttgagcaatcctgggttgacaaagataaactagtttgacttttctaaagctttaatatgccagcatgcattgtgaatctcattcaacccatttttatgagggattggtgatccatggaatacactttggagaaatgctgcctaagtttatgggttcattttagcaaataagactatttactgtcctagactactttttctccccagagctgacatatattctatgttgatacctggaatagtctcaccagttggcaaatcatatcccaacatgtgcaaagtgctgttgataacaactggtgttttttgactcctttgctaattaaatatacctgtatggagtctctgaaagagcccaatccacattccttatccttaacaactcccttcttataagggacttcagtatagtagtcaactttcttagtgcatgtataagtgtctatagattaaacatctgttctctccactgatttagcatactttaaatttgtatctctaacatgacattagcaagtgagaacttttgaaaccacaaaagcgggctgcgcgcggtgactcacgtctgtaatcccagcactttgggaggcctaggtgggtggatcacaaggtcaggggactgagaccatcctggctaacacggtgaaaccccgtctctactaaaagtaccaaaaaaattagctgggcgtggttgcaggcgcctgtagtcctagctactcggaaggctgaggtaggagaatggcgtgaacccaggagacggagcttgcagtgagccgagatcctgccactgcactccagcctgggcgacagagcgagactctgtctcaaaaaaaaaaaaaaagaagaagaagaagaagaaaagaaaaaaaaaaagaaaccacaaaagctacatattctattttaaaatactgatatttccattttttaagtaagtctgaactggacagagccattctaaaaggccaggaacagtggctcaatcctgtaatccagtgctctgggaggccaagatgaggatggcttaagtccaggagtttgagaccagcttgaccgtgatagcaagcctcatctctgcaaaataaataaataaataaataagaaaaattagccaggcgtggtggctcacgcctgtaatcccggcactttgggaggctgagatgggtggatcacgaggtcaggagttcgaaaccagcctgaccagcatggtgaaaccccgtctctactaaaaatacaaaaattagctgggcatggtgatgtgtgcctgtaatcccagctactcaggagactgaagcaggagaatcgcttgaacccgggaggcagaggttgcagtgagccgagaccacaccactgcacttcagcctgtgcaacagagcaagactccatctcaaaaaaaaaaaaaaaaaaaaaaaaaaatcaggtgttgtggcgcacacctgtagtcccagctactcaggaggctgaggtaggaggatggcttgagcccaagagattgaggctacagtgatctatgattgttccacatatttcagtctgggcaacaaagcacgaccctatccccccataccaaaaaaaattattcactgtagatgaaaagaataaagaaaattaaatggtctgtggtatcattcaaaactaattactgtggacatttttatataattttttttctcttttatatgcatgaatcaggatatttttagccacaaataacagaaaagtagatcaaagttggcttaaataataggagttgattatcttatgtaacaaatttggaggtagcttctttcaggattggttaatcccaccacacattgatatcagaggtctggactagatttctttttttttggcattttttggattttcctttttacatgcaagtagttactgcagctactgtgtcctaccatgacaacaccaaagcagaaagaaagatgaactgtcttcttggacatctctctttatccaggagaagtatcccagaatgtctcctgtcccaagtaggctttcttttatgtcttattggccagatctgaattccttgctcacactgaaaggatctaagtgaaaaaaattcatgctctgggaagggaccatcctctgagcacattaccacctcagtctgaacagaaattgtagttctcttaacgaagaagggctggctttggagaggcaactaacaggatctgccaaattatatctctgtgcacttaaaagccactttttctaaaccgaattgtcttattacttctctgttgacctggataatccagaattagatatataattgttgaaattaaacgactcaaagattgtggggggaataaggtaaataaactaagatttttttactggtaagttattttaaataatgctgaaaagtataatattacaactctgaagcttatatgaatttgtgtggtataacttaagacatcagagttttttttttttaaggcagactgtcgctctgttgcccaggctggagtacagtggtgcgatctcggctcactgcaagctccgcctcctgggttcacgccattctcctgcctcagcctcccaagtagctgggactataggcgcctgccaccacacccggctaattttttgtatttttagtagagacagggtttcaacgtgttagccaggatggtttcgatctcctgaccttgtgatccgcctgcctcggcctcccaaagtgctgggattacaggtatcagccactgcgcccggccagagatttatttttatatttattgtctgttttgcttttgtggtaggtagctttgggctgggcttccaaaccttcctccagcaatgattctcctttgctgttgaagctatttggtagatgaacctgagaaggctgaccctacagctatagaattcccattcccaaacacccctcagtgtttcatatgagatacaggtttgtggcagccattcttcaaaaatatactccccccaaatcagacaaccttgaaaagatttattctacaaaaaactgggcctacaattttgatgctgctaccaggtagtggcagagtgtcaaagttatatatattcttactttcctgaaatagccttaatttcaaattgtttgggctgttttgctgcccccaaagcatatcgatatttcataaattttaaaatttcagtattcataacatctctggctgctatatatataatatatataatataatatatatatatatatatatatatatttttttttttttttttttttttttttttttaagagatagagtcttgctgtgtttcccaggctggaatgcagtagctattcatggccatgatcccactactgatcagcatgggagtttttacctgttccgtttcctaccagggctggttcacccctgcttaggcaatccagtggtccccactcccaggaggtcaccatattggtgccaaacttagtgtagacacctgatcagcatagcacacaacagcctagaactcctggccttaagcgctccttagcctcctaagtggctgggactacaggtgcacaccaccacaccaggctatatacttagaagtttcataaaaataaccttgttaggagggtgctttttttcatttaaagtctagctcttacttgactcaagggcatggtttaaacatccaggcctgtatttcatcacattcagatacagggccttgttcaggttcctcagtatttatatttacttaaccataacttttgtatatgataacttattttgaaaaaaaatagcttaactttagattctaaagaaagcaatctcagttttaaattatattaattgttattttttaaagttatatgcattcacctttcagataacctctaacactttggtttaccatcaatctttgtttggtgggttgctcacaactcttgagctagtttgccattagaatgtgttcgcttgctttcttcgctcttctttagctatatagcccatggaagggaaggcattactttgcccttttaattttttgaaatccaagtcctcttgaaccattctactgtaagaggcagaagtagaaaagtaagagtattattctcttaaaaagataaaagcctttatggccaggtactctaatcactgaatatttctcagactttataaatttaatgggaagtttattttaacctgatctaaatagaaatttaaatctttaagttaattctatttaagtagaaattgtagtttaaactcttaactggtgtttcttagcaaataatttgttttattttagatcgatgccttctaataaacaaaattaaaggaactgaataacattacattaaaacatttaaaatagtaattaaacaatattttcattagaaatttcaatggtggacaatcttaattctcataagtattcagaaatgccagaagtaaaactgaatcaagtatgagaaactttcagcctagacaacttgagtgacatgatggagactactgaataggctaacttttaggcccattctttcccaatgctcttggaaaaaaaataggaaaaaagcaattccatatgtgaaaataattttgctgatctttagcatctatgtagatctgttgggaggttctttcagtttttataatacataaaattaggaccttggccagcaagcctgaaatttgttgagtatatgagtatttccatggactgcatgtgacccacacacaaaagtgagagaacaagagctcacctcgaactgtgttaaattctgtcccagagaagggcattgaaacctaacggagagtctgtgtactatgaatctctgaaaacccaggctgggaggaaattgggggcaaacagagaagccggatggtgagaggtggaatgttgggtagcagccagaaaaatagaatgtgttttctacatcatgtggattgcagctggggagtgtccagcagggacacccacaaagaacccagaagtgtggcctaaaaggatttagcttaaatatatcctaggcccagagaacactgaggcattttaacaacaatacttgttaagtgtatttcctgtctcgtttacctcctctctctttctctccttttctccaggccttggttgggataagggacaggaagctgaacttgcagtcagtggactggtagaactctagactaaaaaagagacaaagattacgtgccctccctagcagacttctgttgtgactcctgaagcactctccatcatgtccttattacagaggtagcatgaaggagagagggaagggtaaagggcacatccgcttccaacatctgatcccatttcattggacaaaacttagtcatatggctacatctgatttgaagtaggcggggaaatacagtttcttgttttttatttttagctagacctattgtctgaggtcctgttactaagaaagaatggatattggtagacaattagtggcctctgcaacttagccctcatctctgaatttgttataggagaacccatttctcaggtctaaacagtctgtaaacattcataagtttatatgtaacttccttcatggcatcagttggattttgcatgtctttgactctcaaaatatctgaatggtttctaactggattctgcgtaagcctttgactgtagccacgaccaagttcattgtcctgacactgttaggcttctgttggatctttcatatctcttaactacttcttaatatttttaatccttcctagaagttaaaaatggttccttttaaaatctgcctgctttttttcatccatatttccatttctactttctgctttttttttttttttttttttttttttaaagagccagggcctcactctgttgcacaggctggagtgtagtggtgcaatcatggctcactgtagccttgactttgtggctcaagtgatcctcattcctcaccctcttgagtagctaggactacaggtgcatgccaccatgcccagctaatgtttaatttttttttttttttttttttttttttttgtcagagatagggtcttgctctcctggccaggctggtctcaaactcctggcctcaaccgatcttcccaccttggcctcccaaagtgttgggattacaggcgtgagccactatgcacagcctatttctacttttattactttagtcttattaaatctagttgaggtactagtcacttgttaggctctgactctgcctgacagttcgttttttcacattgtaattgattgtggtcctatctttagcaggcattattttatgtgtgtctcagcatgtacttattaagtggcttcacttgtcctttatgtttcttacttgatgggattttcatactctttatgtccattatttaggatttctggactacatttcttatttccaggttcttaatgtgttcctcagggttggattgctggaaatttaaccctctggttaagtggaacatgaatatgctgtattcttgctagcttcacagagtgttttcttttaatgactactgtcttacagcatataatgaaaaataagttaatccaaaaatattcaacaaacatccagtactcactacatgcaaagcaataccttaagttgttcattacccagctatattttgtgaaaagatctgagccaataatactgtaactgtatatgtagtaggtactttataaatgcttattgaatgaagagctttcctggcatgcattacttcattccagccactcttattcttggacactttgttgtatgtcccaaaatagaggaataggatgttttaaatttgatatctcccgaaatttttcacaaccttcatagttggccagcactatatgaaagagattattattaaagctttatgcattgtaacagttaaaatatttactgtgttaaaggcagaaaatccaggtttaagaggggagattgatttaacgactcatttaagttcaaatttttcaaaagtagagtatggtccaggcacagtggctcatgcctgtaataccaacactttgggaggccaatgcaagaagactgcttgactccaggggttcaggaccagcctggtcaacatggtaaaacactgcctctacgaaaaatacaaaaattagcccagtgtggtggtgcacacttgttttcccagctgctcaggaggctgaggtgggaggattgcttgagcttaggaggtcggggttgcagtgagccacaatcatgccaccgcactctagcctgggtgacagagtgagaccctgtctcaaaaaaaaaaaaaaaaaaagaaaagaaaatggtagagcatgcttcagacatcatttaagactctgactccatttctctgcatttatcttggctttgccttttgtgtgatgctcatgtcctcaggttggctttcttcatgatgacaaggtggatgccagcagtaatttgggctgtttgcctcgttgtagctatgtagtttagaatccagagggcagggagagttgtttcccacaaccactgaacaaaagactttgaactcatgtagacagtggactttggatgataatgatgtcaatgtaggttcactgattgtagcaaatgtaccatcttgcgtgggattttgatagcagaggaggctgtacatatgtggaattaggtcacctatgggaaatctctatacctttcattcagttgtactttgaacctaaaactgctctaaaacattgaagtgttttgttttttgttttttgtttttgtttttttttaatgaatgagtccaggcttggtgttcacgcctgttatcccaggactttgggagactgtggcaggaggatcgcatgagaccaggagtctgagaccagcctgggcaacatagtgagaactcgtctctacaaaaaaaaaaaaaaatttaattagccgggtatgatggtgcatacctgtagtcctagctactcgggaggctggagcaggaggatcacttgagcccaggagttttgaggctacaatgagctatgattgcactagtgcattccagcctgagcaacagtgggagactgtggatcatgaggtcaggagtttgagaccaacctgaccaacatcgtgaaaccctatctctactaaaaatacaaaaattagtcaggcgtggtggcatacccctgtaatcccagctactcaggaggctgaggcaggagaaccacttgaacccgggaggtggaggttgcagtgagctgagatcacaccactgcactccagcttgggcgacagagcaagactccatctcaacaacaacaacaacaaaaaagaaatcaaagtagacctaactatatatgcagatgtggaaatttctctgaaaatagcaaggcataagacactaagtaaagtataatcccctacatgtttttaatgttatccatattgatctatatctagatgtaaagcaaagaaataagacaagaaggatgcacactgggctttacaggggtcactctggggagggtgttgtagggatggtgcagaggaggtggaaaggcaaatgaggatttagctttgagtcttttaaaacgagaatgctcacattttaatcttttgagaatatattcatataacaggaaaataatttttaaaatactagttatatatgctcattatatagaaaacttaaaagtatgtttcacaacacagagataaccattgcttagatttagtgcattttcttgcagtggtttttgtttgtttgttgtttttttggtcatagataggctgtcattgtattatagttttccttctagcttttaaaaaactcagttgtatcccacgggaatttttcattaaaaatactttgaaaacacttccattggttgtgtaattatgacatatttataccatgaaatatgaacatttctctattgctgagacaggtatattgctcccatctttatatataaatatatctttacagtgtttattgtttccttatgattaatttttaaatggaatattacctttattagaagatacaaattttaaattttaacgtaaacaaggccaggctcagtcactcatacctgtaatcccaacacttggaaagccaagtcaggaagattgcttgagttcaggaattggagaccagcctggacaacatagtgagaccccatctctgcaaaaaaatgaaaaataaaaaaattagctggcatggtggtgcctacctgtagtcgtagctactcaggaggctgaggcgggaagattgcttgagcctgggagatcatgatcacaccactacactccagcctgggtgacagaacgagaccctgtcacaaagcaaaacaaggaaacaaaaaacccaaataaataaataaattgtatggctttttttttctttttaaagcagaatggaaatataaccttttttttttccacaacatactgcacgaattttgataaagcagtagactgatctagttgcttttgctattatctctttctcattctctgttccttggcattctttcccatctgtgaccgtctctatattcctcccttaatgcttcgacatttttttaatttctaaaaaagaataaatcagaattccaatgcagccagcttgaatcaattattctgtgtcttatgaatagtcagttcctccaggcaatgaattagccctttagaaaacattggcattatgtttctcaatcctgattatctgtataggtgacctggaatgcatttaaagagaagcactgtgtcagttcctcagatctaaagatgaaatcctaggctgggcgtggtggctcatgcctgtaattccagcactttgggaggacaaggcgggaggatcacctgagcccgggagtttgagactagcctgggcaacatagtgagaccttgtctctacaataaaaattaaaaattaggcatagtggtacatgcctgtagtcccagctactcaggaggctcaggtaggaggattgcctgaaccctgcatttcaaggctgtagtgagccatgatcatgccactgcattccagcctgaacaacagagtaagaccctgtctcaaaaaaataaataaagatgaaatcctgtttttactaattataagtagtttttattgttgcagctgcagttttgttctgggttactgagtttttaaaaattattatttactttagtgaaatttggaagtggatttgttacagtatataattgtgacacaagatttttcccagccactttgccaactggagacctccacagccagcagcaccccactagccccaacccgggccttgctcagccccaggcctgctgctggaggtaccctgcccactcagcccacctgtgttacagcttgtactgccattggcggttcccgagctcttattctgcttccaagaagaacaagaatatactgacagttgaagggtaaggatggacagagaagaatttcactgagcgacagaacaggtctcagtggagaggggactcaggggatggtcccctaccccatagtccgatggtttctttcccagtgtggctgaatctggggcttttatgggcacagaataggggagtacatactgattggtttgtgagtatgcaaagaaagactaaaggcaccactcagaggtgagcacagcaatatagaaaaccaattaggaaagggtaggtatatgtaaaataggtgaagcgtgcggatcagaggaaagccaccaaatgggaagacgggttctcaatctagtccttggatttaatttgtagcttggctttcaggctttaaactgtcttcagcttggaggcgaggtttcaccagggacccgcctctatctgcctaggcatttttctgcctcctgccattatcaattgcattatagaatgttgaagactttgctctttaagggaatattatggtaaatacctttttatttatttatttatttatttatattttagatgaagtcttgctttttcacccaggctggagtgcagtagtgcaatcttggctcactgcaacctctgcctcctgggttcaagcgattctcctgcctcagtctcctgagtagctgggattacaggcgtatgccaccacacccagctaatttttgtatttttagtagtgacgggatttcaccatgttggtcaggctggtctcgaacacctgacctcaagtgatccacctgccttggcctctcaaagtgctgggattactggtgtaagccactgcgcccagcccatgcctttttaaaagtataggctatcacctctctatttttgtaaatgtggacttttgtatttcttttaaagacaaacattaagatgttttctacttcaggctacagtatttagcaataattcatctttgcttgtgagctagataatatttttctgtatataaatatcctgtgtgttttagttgggtttgttactgtaagaaaatagattcttgtttagttcactaattctcagaaatgtggtgtccccaactagcagcatcacctgggaacatactagaaatgcacattattgggccccaccccagatgtgctattcggaaactcaggaggtagagcccagcaacctgtgccttaaaaagccctttggctttttttttttttttatatgctaaagtttgataactactggttcagatagtttatatatggcgactagaaatctcagcttttatcacatgaggactacatttggtttatttccaaggtgtaggttaggaactatggcagtagtgcagttgtatagatgaaaagctgatagcatgggcagccccacaagagttgctttcattgtttgtttccagtggttgggattttaagaactacgcagtgagccaagaatccttcactattgagttgaaccaaattatttcagtacttaggataattagcagaagcttttcctttaataacatcatttggattgtgcctccctgtattaccaagatacttaaaatgacaaatcatgaattccatgcttcacatttgaaatatgtaagattattttcataattaaggaatttctgaatgagctctctttcaaatgcttttaagttgtaaataattccaaacagatgtatagtacctgaaagactcttaattaatatagttaaggtatatatcctggctgggtgtggtgactcatgcctgcaatcccagtgctctaggaagcccaggtgcactaattgctcgagcccaggagttcaagaccagcctgggcaacatgacaaagttcatctctacaaaaaaaatacaaaaattagccgggcgtggtagcatgtgtctgtggttccagctacttgggaggctgaggtgggaggattgtttgagcctggaaggcaaaggttgcagtgagccaagttcgggccactgcattccagcccctgtctcaaaaaacaaaacaaaacaaaaaaacagaaccagcccgtctcaaaaaaaaaggtatatatatgtgtgtgtgtgtgtgtgtgtgtgtgtatatgtgtgtgtgtgtgtgtgtgtgtatataaaatgttctttaattattggcttttatataattagtaactttttggataatgtctacctgtctggttattttaaaaacacttttaatggaaaaatgttatgctaaaatatgtatttttttaattggaaaaaattatttactcctaaatttaaatgttatgtatatattttaattagtccaggtaggtccttcagggtggaatattaacttctttttttaaattttttttattttgagatagagtatcaccctgttgcccaggctggagcacagtggtgcggtctcaactcattgcaacctctgcctcccaggttcaagcgattcttgtgcctcagcctctcgagtagctgggattataggtgtgcgccaccacgactggctaattttgtatttttagtagagacagggtttccccatgttggtcaggctaatattaacttttaaattatgactttattttataaatgggaactcttttttaaaagaactagactccggccgggtgtggtggcttacgcctgtgatcccagcactttgggaggctgaggtgggtggattgcttgaggtcaggagttcgagaccagcctgaccaacatggcgaaaccccatctctactaaaaatacaaaaaattcgtcggatgtggtggtgggtgcctgtaatcccagctactccagaggctgaggcagcagaatcgctcgaacctgggaggcggaggttacagtgagccaagattgcgccattgcactccagcctgggcaagaagagtgaaactccatcatacacacacacacacacacacacatacatacatatatatatcacacagcagattttttttttaacttaggaagataattactcgcaaggagaggtataactggtttgtggtggtgtctgcctggcattatctatagatcttgttcatgctatggattagaatcagtgactggaaaactgttaaaggaaagcttgcaacagttcctttatgcgtactgagaagtgaaagatttcccaaagcaagggtaaacctaccaactttttgaagatagtatttctgaattttaagcaaaaaaagggtatctattatctactctttacatataactagatcatattgtgaacagttaggtttttgttgtttttttgtggggggcagtttagttttttttttgagatggagtcttgctctgtcacccaggctggagtgcagtggcgcgatctcggctcactgcaagctccacctcccgggttcatgccattctcccacctcagcctcccaagtagctgggactacaagcgcacgccaccacacccagctaattttgtttttatattttcagtagagacggggtttcaccatgttagccaggatggtctcgatctcctgacctcgtgatcggcccgcctcagcctcccaaagtgctgggattacaggtgtgagccaccatgcccggccgtaaacagttagttttttataatcagccaacagaaattaaatctatccaattattaattattttctaagtgtttataattcaagagtgagggaggagtggaatattttttaagaaggcccttacctaatcacatgaatctgtaatttctaactagtttatagcaaaagatgtggagaatttggtatttggaattccctgtgattatttgttcccttgtagacccaggtgagattaataaaattgagaaaagaagccaacactctgaaattaaccagtcctttttgatgtgtaggcctacccacatgccaatcaacattcaatatctatagtctccttatgctagtattatttaatccatttccacatataacttacctactttctaagctgagtaaaaagtttaaactgatgacttttaagatatataaaacaggctgagtaccagggtgcacacctgtgatcccagcatgttgggaggctgaggtcggaagattgcttgagcctagggattcaagaccagcctgggcaacatggcgaaactccagctctagaaaaaattattaaaatagctgattgtggtggtgcacacctgcagtcccagctactgggaggtagaggttggaagatggcttgagcctgggaggcaaaagttgtagggagtcatgatcgtgacactgcactccagcctgggtgccagagtgagacactgtctcaagaaaaaaaaagagaaaaagatataaaacatagctaaaattggcaacaggctaacatttttttcttctttgagaacataatatgtaactatgcaattctttgtaaagtactttaataagtgacaaatttattattgacttagtgaaataagtcaggtattttgaaaagactttagtcagaagtgaaataaaatttgcagagagaatttatataaaagatttttttggattttcaaattcaatttctttcttttttttttttttttttttgaaacagggtctcactctgtcacccaggctggagtgcaatggggttatcacagttcactgcagcctgaagctcccaggctcaagcagtcctcacaccctcacacctcagcttcccgagtagctgggactacaggctcatgccatcacgcttggctaaatttttttgtatttgttgagatggggttttgccgtgttgcccaggctggtctccagctcctgggatcatgcgatctgcctgccttggcctctcaaagtgctgggattgcaggcatgagtcaccgtgcttggccttcaagttcaatttctaactaaataatagacctcaagttacttggagtaggagtggggaacctaataaatggagactatgtggaaaagattaaaggcatgctattcgttttatctatctgcatggaataaaaagaaaatgttttttaaactctttttttttttcaatgtaccctaatgattcatggtccttggttttcttcaaattggagaaattagttcccagtatagtgtttgactttgttttcttttttttttttttttttttttttgagatggggtcttgctctgtcgccaggctggagtgcagaggcgcaatctcagctcactgcaacctcagcctctcgagtagcggggactacaggtgtgcgccaccacacccagctcatttttgtatttttagtagagataaggtttcaccgtgttggccaggatggtctccatctcttgaccttgtgatctgcctgcctcggcctggggcgagtgctggggcgtgagccactgcacctggtggactttgttttcatcaactactacatgtcagtttatcttagcaagctgttttatttgtttttgattctctagttgtctgagggaagtcaaaagcatgcaagcctacagaaaagcattgagaaagctaaaattggccgatgtgaaacggtaagtttgtgtctatagattattttaataatggcaattctaaatattagagtaagcgacacagagcttcctgtgaggaggatgcatttctaccagaagagaaggggatcatagccaaggataggaacgtttgacctggtaggattcaccaattgtgagtctagattttattattattatatatggcagcatagcatagaagcataaaccctagagccagactgcctggatttgaaagtctcctaaattctgttttcacttctctctgctgcaaaatggggaataacaaaatctgttatacttcattgcgttattgtgtggattaaactagttaatatttgcaaagcacctagaagaggacctggtacatggtaagccctatataaatgtttatgtaaatttttaagactcttttaaaaaaaatttttgcatagaacaaactgaaaactatcaacatagtatctttggccttgtaatattttaaaatattaaaaataaatattgacctactattttattttttaaagtacaatatttttctaagtattaggttagagattttaaaagtcatttcactttctattttcatcattatctaaactatagatttatgactttaaaaaatattgaagatcaacatgaaccactaagcatttcatccgggtctctatttgtatcacttgattgggaaagaaagcaactggaaaacttgtcacatagtagaaagggatatagcaaagctttacagtggctttatgctttcaaagttatttcacatatattcttttatgtgaatcatcagcacagtcacagataggaattggagaatagtcatttctgaagaatattcaaggaaaagtaaactctgggcataacctgaagctgttctatttcctcttcagttgacagtagcaactactacttctttatttgttccttttgtttgttttttttaaacactggcaataacttgtagaaccaccttcaactaatggtgacatatgcttgcccagaagttgtcagccagtctactgttaatccactggaacaagtgcatcttgcggggaaaaacccactagcaaacatagttgccgcctgcagatatcagaagagtttagtggttcagaaacgttcctaagaaagatgaagtcttgtgctcatcctgatcttaccagccaggacttttcagagctacctagcccctatctgctaattattcttgatgatggtggtgatcctgctgctggtaaagaagaaaaatagctaacgtgtattctccttactctgagccaggcaactgctgttctaaatggattttgtatatttattgaatcctaccagcagtctatggcggtggctaccgttactgtctccattttgctttcaaggaactggaggcacaaagaggctaaatactttggcaaagatctcagtgatagtgattgtctaagattgtttcaatgcatgatacctggagaactattattatattcacattggatgttcaccactctgcttctcctgtctttttttctcctcttgattttgttttgttttttggtttgttttttagagatggaatatctctgtattgcccaggctgcccttgaactcctgggctcaagtgatccccctgcctcaacctcctgagtagctggtactacaggcaggcaccaccacacttggtgacagtgttccttttgaagcatttttatttgggtattgatggcaaataatgaccatcttcttatagttattttaaaatctctcctgagctgtgctaatacgatatacactaaccatgtgtggctatttatatttaaataaaaattagctacaattaaatttagtttctcggtcccagtggccacattgcatatattgagtagccacatgtggctagtaggtcttgcagtgaagagtgcagatctagaaagttttcctcactgctgagattctgctgggccgtgctgcttctgagcgtgctgctctgtatatgagtctcttgtacaaatgctagcaaaggaactctcttcactttggaaccaaaaggaacagctaaaagcaaagtagaaaaatacaaataaaaaatacaaggtagctggcaaccttacgagtcgtgttaggcagtttgaactttacttgattttgcctcggatttatcctatgattctgtactataatctttgccaacatttggtttttgtttgggcttacttttcaggtttcagaaatacaaattgaatatgtatagcactatgacttctacctgctagtgagaaatatggctagacatttcaaatggtttttattggatcatattgtattttgaagctttattctggtttacctttaaagaataggtggtgggaggcctcaaactacaattgtattatttctttaaatgtatataaaatataaaggatatattaaaatattcttaaaaattgaaaaattgtctagaacacttttaaagataattgtataatgatcgatgtcttaaaatgttacttacacatatagacataatcttgtgaaactactcaaaaagtagtataatttttttctgtaacatacaacgacatggtcatcttagagttctaacatgaacctcccacctatttatgagcattccattctacatattaactcccatttagttattcaatatatataaaagatacttgagatttcaggaaagatgagaattgagcttattcttatactgtgaatatctgtgtgtgtatacttatatatataatgtcaaaagtctaatgcacatcatttataagaaataaaatgaaattgttataaaatgtattaccttacaacatatagaattttgtttgtcttaattgaacataaaactatctggaatgcaggaagagcgaaccaggctagcaaaagagctttcttcacttcgagaccaaagggaacagctaaaggcagaagtagaaaaatacaaagactgtgatccgcaagttgtggaagaaatacgtaagtttgtgtcataccttagggatctttaactttgataatgaagaagactttatttttctagttgcctgctaactattctccatgtatatgagaaaataaaactagttaaggtagtattctgtttgtagtactctaattttgtatttgtaacatagtaggaaaatattgctttagtattgccattaaaaagtcttaatgtgccgggcacgttggcttatgcctgtaattccagcactttgggaggctgaggtgggtggattgcttgagctcaggagttcaagaccagcctggccaacatggtgaaatcccatctctacaaaaaaaaaacacaaaattagccaagcatggtgacagatgccagtagtcccagctactcaggaggctggggtgggagaatccctcaagcccaggaggttgaagctgcagtgtgctatacgtgccattgcactccagctagggtgacacagtagaactctgtctcaaaaaaaaagagagaagtcttaatgttagagcattgaacagcgacaattttgaaattataagcattttaaaattaaggaagaagtgtgggatagaaggataaagacataaaatataaggttagagaactgaggagttagtaaaagagctaatttggcctcaagaactttgattctgtaaagaaatccatcattatcttctaggaaaaatgataccataagtagaagagtttgcaagttgcagaaaatcagtctgtacattgagttgccttttaaatataccagtcatttttttttccttgttttagaccagagtccccagagccttgttttgaataatgtttatatttttttaaagatagaaatgtgaatatttaaggagataaaagagtgtattataaaggcatagcatttaattgtttgggaaaatatttataactttttaaataattttctgtcttagcctgtcttttatttaggaaactttaccaagtgaaactcatagaaaaactgatattatagtgtgtgatagaaggctttgaaagaaatggaaaatatttggtatgttaaaattaacctgaggatagtttgattgcaactaagctggcctagtccttggcagtggtctttacaattaaagaattgtaagcagttcagttagtgtaaatctaaagttaaacttcatttaagagacaggtcgctgctttgcgcaactccaggaggcaccattcacatatatggagtacatagcctaggtggtgatatgtagtgccactggttcagctgattacccagggtgattttcaaagagaggtggaggcagaagaactccctgagccagtcattgtctgtaaattaagtatttggggagaatgtcagctcttttatgctgaccacagatttatttgtcatcatcctgcagaagaaagtgctaatcaaatctacacctacaaaaataaataccttaatctgttggaaagttttaactaataccaggtgatcctcagtgagcacaagcacatcacaacaggagagtacctcacaggtagaaggttactgttaggaagctaggcctgcgtatgattcatcttcaaaaggaaacagactgcttgttcaggaggacttagaacattgtgtaccttatctagagcaccttctcattctcttgcaagagaacttcaagcacagttttcttaactaggttgaatactttcaggtgatttattttcaggatagcatgactgtgccctctagcagttcatcatgaaaaatctgagtttcacgataaccaaatcggacccttcatttactcttacttgccttttttcctgatttcagttttgtgtgattcttgtactttttccttggtgtgctacctctttgcttacctgtttcattctcttatatgtctaggacctacaactcttaggtatatccaaaaagacgtaagcttttccactccatggtccctattgtactgccacagctatttccatgggcaggtgaccctcactgacatcacctccaattgactccccagtccttttcttaattttgatatattctgcccactcaggaatgaataaaactcttatttaggcttactaaactactgtaacctacactgatagtgaccctgagccagtggatcacattaaggttcaggaaattaacagggatagggaattgtgccagaccaattcatgaagtggggaaaacttgtattttaggcatgtaatttaagatgttgccattccttgtaggtctgattcgagtagcacttttggcaaacacatcacctcttaggtaataaaacttcagaaaagaagttcagggtatacaaaggacggtgaactttctggagggtggaataacacagttgaggaggcggcaactgaaattttaaactggttgcctgcattctgctgtctatcttaacccttaaatttataactttggtaatttatttcccaacccaaggaaaacatgccattgtgaatgagtattatgagtattacagtatatgaggtctcactgagagaacaaacctgaaattttctgttttttcagtgagattttttttttttttttttttttttttttggagacagggccttgctctgtctcccagactgaagtgcagtgcatgatcagggatcacggtagcctcaacccccgcaagctcaagtcattcccccacctcagcttcccaaatagctgggactacaggcacatgtcactacacccagctagtttacttttacttttattttttatagagatggtgtctcgctatattgcccagctggtctcgaactcctggcctcaagcagttctctccccttggcctcccaaagttctgggattacaggtgtgattcaccatgtttggcctttatcatttttcatcaccatcagactaggttatcttttaatagttatttatgcaaccatgtaaagatggatcctggagaacttgtaatggagtctattagagatatattaattttttacttgggaatgagagagtaagaatccttccttcctggctttgtgcattttaaaaaatttattaaagattatcatcttttttgcaggcacagtggctcatgcctgtaatcccagcactttgggaggccaaggcaggaagatagctttaggctaggagtttgagattagcctgggcaagagagtgagaccctatctctacaaacaatttaaaattagctggtcatgctggcatgcgctttattcaagttttcttcctccagttttattacctttctacttgagaggctgagatgggaggattccttgcacccagtagttcaaggctgtagtgagctatggtcgtgccactatactccagcctgggcaaccgagtgagaccctgtttcttgaaaaaggattaacatctagcaagataaaattcattatgtctggcatacaagcaaagactaccaggcctggagagaagtgggaaaacattatctataatgagcagaatactccatcagtcaaaattgacccagaaattaggatcagaagaccagaacatttaaaaagttattataactgtattccatatgttcaaaaagttaagtggaaatagagaagatataaaaaagacccaggtcaaacttttgaacatgaaaactacaatgtctgacatgaaaaatacactatggtaaattaccagcagattaaattttgcagaagaaagaattgatgttagttgaagatatagcaatagaaatatccaaaatgaaacacagaaaataaagaatttaaaaaatatgaaaatggggccaggcgcagtggctcacgcctgtaattccagcactttgggaggccaaggtgagtggatcacttgagcccaggagttcgagaccagcctggacagcatatggagtccttgactcccatataaataaaataaaaattttaaaaatatgaaaatggcatctgagccttaagacaacttcaagggacctaatatatgtgtaattacagtcccaaatggagtatgttttggtgggaggagaggttgctgagccagaaaaatatctaaagaaataaaagctaaagtttttcaaatttgatgaaaagtataaacccacaaatccaagaaatttaaatatttaagtagtagatgccagtgatccccttatcactaactttagagaacttcttaagactttaacctctactcaccccaaatctccattcctcaatgaaattattgtttttaaagtgcactttttgataggggtttcatgggatttcagctatcatgttaacgcagaacagattatactggattaaaggcttatgagtttcacaaattgattttaataggatttggttcttagtagcatggctattgccccccatattatattgctcaggcttatctctaagtctgtcatgatttattcagagaacaatttggtgactgtagccataaccatttgttcatatggggcatggctatgtattttcttatttctcactaacacccatgagaaatacatatatttaattatgccagttgaattattgatatcattaagcaagtatttagaagactaattgctttggaggcagaggcaggcggatcactaggggtcaggagtttgagaccagcctggccaacttggtgaaatgctgtttctattaaaaatacaacaattagccaggcatggtgacacacacctgtaatcccagctactctggacgctgaggcaggagaatcgcttgaactggggaggcgaaggctgcaatgagccaacatcatgcactgcactccatcctgggtgacagagcgaaacagtctcaaaacaacaacaacaaacattaattgcaatatcaaagaagtgatatttaaaagcaacaattctttaaacaattttttaatttagctattctgaccattattcaaatgtgaccagataaaacatgttagtagaaattaaattcccacaaaaatacttgaaaatatcttagaggtacttaagtaattttcttagaaataaatgccaggatgacagtaaaaaggtggagtaaggacttctgaaactttgccctttcagaaaacttgcaaaaattgttgtagtcaactttttcagaactctggaaattaaccaaaggcttacaggagcctactgaggaaaattagcagactctgagtaagaataatgagctttgtggtattgaatttgcctatactcatttcccagtctcaccgcagcagtgaccttgaaggataacaaccctgcattcctactgtctagaggaacaaaatgcccctggaactctgtaagagccttgatcccaaagaattgtcattatttacatgtttggtggttccctggaggacaccaataggaaaaactgtctttatttgatctggcctcgggtatgcccaatgctaaaatcctctctgtggggagtgtttgtctataacaattataaacaataattttaacttctcagttaaccattgttgatgaataacagttgaggcaaacagtagactaatcaaaaagcttaaaagggccagatgcagtggtttatgcttgtaatcctaacactttgggaagattgcttgagcccaagagttcaaaaccagtctgaagaaaatggcaaaactccatctatgtaaaaaatttaaaaattaggcatggtggcatgtgcctgtagtactagctactcaggaggctgaggtgggaggatcacttgagccgaggagatcaagactgcagtgagccatgatcgtgccactctgctccagcttgggtgacagagtgagaaccttctaaaaaaaaaaggagaaactaaatgatatgttcatgagagccttgaagagcaacatattcctggaaatatagaaggcctacatgcatgcttagggttgttcacattctcagtgaagacctgggacagtccccacatctagctgaccttgatactctgtgcaagcaagaagcaaagactaagtcagagttataaactgccttgctgagaacgcatgtcgcagcacatgcaaaccctcttagcaaagacggctgagccctttggaaaagagaacctcttcatagaggtttagtccaagtgtttaaggaaatctctgttcaattaatagcttgaccactaagctaaccaagtagagacttaagtggccacacttaagaacacggactttacagattgagttcaggaaagttactaaacaaattgtaacaactctacgagcaacaatcctggggagggggaagaatctgctttctagggttgctatgagacagaatcttgctctgtaacccaagctggagtgcagtggcacaatcttggctcactacaacctctgcttcccggccgggttcaagtgattctcgtgcctcagcctcccaagtagctgggattacagtgccttatattattttttaaattaattattacttttttttttgagacactctcactctgtcacctcagctggagtgcagtggcatgatcatgactcagtgcagcctcaacctcttgggctcaagcaatcctcctgcctcagtcccctgagtagctggaactacaagcacatgctaccatgctgagctaatttttgtagagacaggatttcaccatgttactcaggctaacattattttaaatgtccagttttgcaacaaaaagattgcaagacatacaaagaaataaactatggctcacacactggagtgaaaatgtttcaatggaaactgttcccgagaaagcccatgtgttggacttactagacaaagacactttaaatatattcaaagagaaatgaaaaacgagaaaatcaaaaccaaaaattggttcttttttttttttttttttttttttttgaggtggagtcttgctctgtcaccaggctggagtgcagtggcgtgatctcagctcactgcaacctccgcctcctgggttcaagcaattcttctgcctcagcctcctaagtagctgagactacaggcacgtgccaccacgcccagctttttttttttttttttctgtatttttagtagagatgaggtttcaccatgttggccaggatggtctcgatctcttgacttcgtgatctgcccgcctcagcctcgcaaagtttgcgattacaggtgtgagccactgtgcacggcctttttttttttgaaacggggtttcagtcttgtgggagtgcagtggtgcgatctcggctcactacaacctccgcctccctggttcaagcaattctcctgcgtcagcctcctgagtagctgggattacaggtgctcaccaccacgcctggctaatttttttttgcatttttagtagaaacggggtttcgccatgttggccaggcttgtcttgaactcctgacctccggtgatctgcccgcctcggcctctgaaagtgctaggattacaggcatgagccaccacacctggcccaaaaattcgttctttaagcggatcacaaagtagacaaacctttagctagacaaaagagaaatagaaaaaaattagtagctgggactagaagtgtgcacctctacacctggctaattttttttttattatcttttttgtagagacggggtcccactatgttagctagactggtctcgaactcctgggctcaagcagtcctcctgcctcagcctcccaaagtgctaggaatccaggtgtgagctattgcacctggctgaaagacaatattattaaggaaatactccccaaattgatctacagattcaatgctaaacctatcaaaatttcagctgcttttttgcagaaattggtaagctgatcttaagtttcatatggaaatgcaagagatccagaatagtcaaaagaatcttgaaaaagaacaaagttacagactcaaatttcccaatttcaaaactcgctacaaggctgcagttatcaagacagtatggtagtggtatgagaatagacatgcacacttcgggaagctgaggcgggtggatcatgaggtcaggagatcgagaccatcctggctaacacggtgaaaccccatctctactaaaaatataaaaaattagccaggcgtggtgggtgcctgtagtcccagctacttgggaggctgaggcaggagaatagtgtgaacccaggaggcggagcttgcagtgagccgagatcatgccactgcactccagcctggacgacagagcaagactctgtctcaaaaagaaaaaaaaaaaagaatagacatatagattaatggaatggaatcaagagtccagaaataaacccaattgattttcaacaaaggtgccaagaccatggaatcaggaaagaaatcatgtttttagctcatggtattgggcacaactggatatccacatgcaaatgaattaatctgaacccccaccttacatcaaaaaaattaactcaaatggatcaaagacctacatggaagagctgaaactatgaaactcttagaagaaaacagatttatatttcttttttttgagacggagtctcactctgtcacccaggctggagtacagtggcatgatcttggctcactgcaggctctgcctcccgggttcaggccattctcctgcctcaacctccgagtacctgggactacaggcgcccaccaccacgccaggctaattttttacatttttagtagagagggagtttcaccgtgttagccaggatggtcttgatctgacctcgtgatctgcccgtctcggcctcccaaagtgctgggattacaggcgtgagccactgtgccaggccggatttatatttctttatccttgggttaagcaacaattccttgaatatgacaccaaaagcagaaacaaccacagaaaaagtagttaaatggacttcatcaaagttaaaaagttttgtacaatatcaagaaagtaaaaagaggctgggcgcggtgtctcatgcctgtgatcccagcactttgggaggccaaggcaggtggatcatgtgaagccaggagtttgagaccagcctggccaacatggtgaaaccccatctctactaaaaatacaaaaattagccgggtgtggtggcacacacctgtaatcccagctactcgggaggctgaggcaggagaatcgcttgaaccaggaaggcagaggttgcagtgagccaagattgtaccactgcactccagcctgggtgacagagactccatcacaaaaagaaaaaaagaaagtaaaaagtgaactcaggatggaagaaaatagtcacaagtcctgtatctgacaagtgtctagtatccaaaatatataaagaactcataatacaacaataaaaagacaacccagttgaaaaatgagcaaaggatatgaacggacacttcccccaagaagatacacagatggccaataagcacatgaaaagatgcacaaaatcattagcaaatgcaaatcagaaccccagtgagatactacttcacacttctattagtctgttttcacactgctaataaagacatacctgagacttggcaatttacaaaagaaagaggtttattggacttacggtgccacgtatttggggaaacctcacaatcatggtggaaggtgaaaggtacgtctcacatggtggcagacgagaagagagcttgtgcagggaaactcccatttttaaagccatcagatcttgtgagactcattcactatcatgggaacagggcaggaaagacccgccctcataattcaatcacctcccactggggtcctcccacaacacgtgggaattgtgggtgttacaattcaagatgagatttgagtggggacacagccaaaccatatcaacacccattaggatggctataatgtaaaaatagaaaataatgaggccgggcacggtggctcacgcctgtaatcccagcactttgggaggccgaggcaggcggatcacctgaggttgggacttggagaccagcctgaccaacatggtgaaaccctatctctactaaaaatacaaaattagctgggtgtggtggcacatgcctgtaatcccagcaactcaggaggctgaggcaggagaattgcttgaacctgggaggtggaagttgcagtgagccaagaccgcgctattgcactccaccctgggcaatgagcaaaactccatctcaaaaaaaaatagaaaataataagtgatgagaatgtggagagactggaactcttagattgctggtggtattataaagtggtgctaccactttggcaaacaatttatctcttcgccaaaatatatacccaagataattgaaaatatgtccacacaaaaattattcgtattagcagaaacagcccaaatgtccatcagctgatgaatggataagcaaattgtaaaatagtacttcgcataaaaaagaatgaggtattgatacatgaatgaaccttgaaaacattgtgttaagtgagagaggccagacctaaaagaccacatatcgtatgtttcgttcatatgaaatgtacacaaaagggaaatccatagagaaaagacagcaactaggttagtagttgccaggggacggagggagaaggaatgtggagtgagtgctaaggggcacaagggttttttctgggtgatgaaaaaatgttctggaattaaatagtagtaatggttgtacaattttgtgactatcataaaaaccactgaaagccaggcatggtgccccatacctgtaatcccagcactttaggaggccaagatggggtggatcacttgaggccaggagttggaggccaacctgggcaacatagcaagacccctatctctacaagaaatgagctgggcatggtggcgcatgcgtgtagtctcagctgctcagaaaactgaggcaggaggattgcttaagcccgccagtttgaggctgcagtgagctatgatcacaccatggtactccagcttgggagacagagtgagacccagtccctaaataagtaaataaataaataaaaattactgaattatatagtttactatgctgaattttgtgacatataaattatctttcaattaaaaatgccatcattgtaagtaatagttaatgccccattaatcatggcattgttacatgctgtgcagagtaactcgaagtacataatatacatacagatacatttgatagcacgatgtgtatttaaagtaaaagtaaatacttcccgctatgagattactttcttatccctaaaattttttttagagtcacacttattgtggtcttataatgcctatatagtaaaattcttatcgttaaatttaacttattttgttgtattttggtatggtgagttgtttgaaaaacatctcatttaaacttacatgttgtctttaaaggagcaagtacaatgatgatggacacttaggaaagggaaattgttcactttgactttccattaattactaatactactgcaactccctaaatttccttgggaatttgcaagagtttgtaaaatacaatattatgtcactatttcagcttttttcatagccattttatacataaattttataaaaattttgttcatatgaaaaaatacaaatgtatacatagctaaagatcattttgtgtgtatatatatatatatatatataaatacatttcattttatatatataattttttttcaggccaagcaaataaagtagccaaagaagctgctaacagatggactggtatgtactataataatgctgataaactatagctaaattcccttcacacttactgcgacgtgaaattcagataccttgtgctagctttgttcaagaaaggacgttaatgaaaaatgtatgcattactcaaatgtttacatattaaatcatttcagttatttaaggttttttttataatcttatgagtcattttgtaaagcataagatatttttgtaaaactaatgattgcttccagtttaacttttgtgcaacttttcccaagataagtcacctgggctaatcacttaactttcatatacattaatgtaagatacacttttaagataatgaaatcttaaagatttatcatcttgctaataataataataataatagctaaggtttgttgaggactatttgccagttactgtaatgtctgtggttcattctcattttatctccatgataatcttgaggtagatatgattattatccctaatttaggagacaaaactaagaccctcaggagtccaaggccacacatgtgtcagacagcagaacaggaattataatccaacttttctggctggacttaaaatgactatgtttagtcaaaggcgattagtcactgcaagaacagatgctggagccaggtttctctgactccctgtccaggcctctgtttcacacaaaaaatataataattttttttcctactctattttagaattaaatagactggtaaaatcaatataattggcctttcggattttttttttctgaaattgcagttttatttattacaaagttatttcttaagtaaggtaatgctttagtgataagaacagagggtgaaacagcaaactgacatgaagtaagtgtcccacaaagtataaataaatgtggatttttaggttaaaaataagatacgaatccaaggtgatttcccccagtattttcaacaaagaggctcagcacacagtaggcacaggcagcatgtgtgtgtagtgggaggaacgtggctttgaagagaatccaagctattctccttacttgctgtgtgacctcttgaccctctctcagcctacttcctcatctgttcaatgtggataaataatacctacctcccattttgggaggattaaataagacagtttgtaagcccttcagcaccatgttggacacgtagataaatactccccttttccttttcttctcttaaaaaagttcatgttttccaattgatcataaacttccaaaattataattggaaaaacatttggaatggctttttttttttcctatcctattagctgcagaagaacctgggacttttaaaaccatgaggaagaaagatatttttagaacagcagaaacagctgttaagaaccatatttccatttaaagttacaacttactccttccagcttaaacatgtgttatgcaaagacagagataagagagaaagcatcacacctcagaaaaccgccaccttcacaacaaacaaaaagaaaacagtaataagaattatttttttcctagtctattttagaattaggtagattggtaaaatcaatataattggcctttagtttgttttttaatgaaattgcagtcttacttatcatatagcttttaaagtttgttttaatattcatattaaaattatcatatagaaagaaagtttgctttatttttacttaaaaaagtcctggccgggcgtggtggctcatgcccgtaatcccagcactttgggaggccgaggcaggaggatcacttgaggtcaggagttcaagaccagcctggccaacatgatgaaacactgtctctactaaaaatacaaaaattagccaggcatggtggcgcacacctgtaataccagctactcaggaggctgaggtaggagaattgcttgaacccaggaggcggaggttgcagtgagctgagatggtgccactgcactccagcctgagcaagagtgagacactgtctcaagaaaataaaaaagtccttaaaaatgtagctagaattgagaatatatactgttcaacaattcagtatctcagttctataggatgagattacctcagagtctaagtatagaaatgccacatctaaatgttttatgatattaaatacactttaagtgtgacttcaattatatcatatgaaaccttgcttaataattaagatggtgaggtttttgtaaacacatatgagaggaatcttaatgagtgaagagggacaggtgttatgagggcccaacctagattcattgcaaatgatattgcccatcctattcctataggtatctttgctgtgtcaccgtataaatcaaacagaaattctgcccgtcttaaggttgtttctttaaaagaaaaaaattattctatatccattcataaaaatttctacattaaatagggaaattatttgacagagaatgaactatcaagattctcagtggcattttatcttgaaggccgacatccagtggctcaaagaaatgtttaatcagagtcttctttgaattggtccattaggcattgttgtggagaggtttttatttgttctttttcttgcttttaacctttaaatgtttataatgaaatggtttcttatcctcctatgaatcaggaaatccttcctgtagaggctgttcaatagtcttaccctggtgcctcattctcatttctgatccaggtttgaagtttgttccctacaagcttcctacattgttgtatctgttctctcatttcctagaaatctttctgtattcatgaagcctatcctgtaagctatacacataagacttggccttttctctctgagacacctatcactttgtaattgtttagtaataaattattttttttcactcttatgtcaacttgaaggcataggtttttcacattctgtaatacctgcagtgcacctgatacttgtcttatgtagcagcagacataacatttggatgtgattagcaagaatgtactggttgggcagagactggtaaaaattatcctagaatatcttatggtgttattttaacattctctcttaggttgttaggaaaagtaaagattcattttagattgttacaaagagtaaagatcattttaatatctgttgacattccataacactttgattgaaagaagttaattttgttaacattattctatttgatgcagtagtattctccataaaattcattccagaaatgtgtttatcaatatttgatacttggaaataaacttccatagaaaaaatattttaaaaagtgatgaaactccatgtattagtttgctagagatgccgcaacaaaacatcacagatagggtggcttaaacaacagaaatttttctcaccatcctggaggatcaaatttcaagatcaagatgttggcaggtttggtttctccaggtcttccttctccctgtgtcctctcacagtttttcctgtgtctctccatgtgtccaaatttccttttttttttttttttgaaatggagtcttgatgtgtcgcccaggctggagtgcagtggtgcaatctcagctcatcgcaacctccacctccctggttcaagcaatttccctgcctcagccttccgagtagctgggattataggcgcacaccaccatgcccggctaattttttttgtatttttagtagagacggggtttcaccatgttggccagactggtctctcgaactcctgacctcaggcaatctgcctgcctcggccccacaaagtgctggcattacaggcgtgagccaccgcaaccagccaatccttttcttcttttttttcttttttttttttttgagacggagtcttgctttgtcgccaggctggagtgtagtggtgcaatctttgctcacttcaccctctgcctcccgggttcaagcgattcccctgcctcagcctctggaatagctgggactacaggcgcacaccaccatgtccagctaatctttttgtattgttagtagagacaggattttactatgtcggccaggatggtctcgatctcttgacctcatgatccttttcttataaagataccaatcctactggattagggcccaccccaatgacctcattttaacttgatcacctctttaaagatctgtttcaatatagtcacattctgaggtagtaggggctaggacttcaacatacaaatttggggggaaatgattcagcccataacattccagaagaacctattctaaccctttacttcattatcactactaacagagtgtttaacattttacagaatactccgacaagctataaaatcttataccattattttttctgtgagtgtaatacattttcatcataaaggttgtgtatgtacattaaagaaatgtatgaaattaagaaaagaaaggctggacacggtggctcacacttgtaatcccagcattttgggaggccgaggtgggtggatttcttgggcttggagttcaagaccagcctgggcaacatggtgaaacctcatccctacaaaaaatacaaaagttgccgggtatggtggtgcacgcctgttgtctctgccactcgtggggctgaggttggagggttgcctgagcctagaaggtggagactgcagtgagctgagattataccactcactgccctccagcctgggagacaaagcaagatcctgtctcaaggggaaaaaaaaaaaaaggaaaaaaaatccactgttcctcccaccctccccagtgcagccactgtgagcacactgtcacggtcctgcctccctcactagcttcctgatgagtagacatttagattgcttttattttttctattatggcactgggataaagacccttgaccaaaagtccttgtacacagtttgttttatttccttgggataaatcccttgaagtagacataccactttttttcagttgttaatgcattttaaatccccccaggagatgctgaggacatttctgttcttagtcttaagagaacccctttccctgctccccaccccctctccctagtactggcctgattgtctggaagccattactgtctgtaggacaggaagaagagtctggagagaatgtgttccctttgggaataggagcaactttaattcctgaggcaacagtcctggcctctgctgtggaaatgtagaagagacaccattaacctgtccctgtttttctattattcttaagtctggtatttagcagcaagcagcttacagaatttttaaatatgagatctattaacttgttcaaaatagtatttaaatactttttttttttttgatacggagtgtcactcctgttgcccaggctggagtgcaatggtgtgatctcggctcaccacaacctccgcctcccaggttcaaacgattctcctgcctcagcctcccgagtagctgggattacaggtgcccgccaccaaccatgcctggctaatttttgtatttttagtagagatgggtttcaccatattggccaggctggtctcaaactcctgacctcatgatcaccctgcctcggcctcccaaagtgctggaattacaggcatgagccaccgcacctggccttaagtactttttaattagttgccattactcttaaaaatacagaaaactccttattttgatatatctgaaagttaatagaaggaagtaaaagaacaatgaagataattatacttgaaatgttttatgattgtgtttttctcaaaattatttctcaattttctttatagataacatattcgcaataaaatcttgggccaaaagaaaatttgggtttgaagaaaataaaattgatagaacttttggaattccagaagactttgactacatagactaaaatattccatggtggtgaaggatgtacaagcttgtgaatatgtaaattttaaactattatctaactaagtgtactgaattgtcgtttgcctgtaactgtgtttatcattttattaatgttaaataaagtgtaaaatgcagatgttcttcaccccttttggtagaacaaaagcaggatgataaccatatccccccagtgctcatcaaagtaggacaataaaaatccatccatctc

SEQ ID NO: 10 - DNA, 3361 bp, Homo sapiens
ccgagcgccttcccggtgaccccgcagtgggtgtgtgaggggaggacggacagacccagacgccgccggaccaggaggacgctgacgaggcaccatgcgtgagatcgtgcacatccaggcgggccagtgcggcaaccagatcggcgccaaggtgggcgcgccgcagcggagggggtccaatgggggcgcgaacctgggccgagagcccctcggggtccccaggcgcggtcctgggaaggcctggggatcgccaaatgcagaccttcctggccgctttgtgccgccgagtgtggcctgggctaggaggtgactttcgcggacggagggggcacctctctttctttctgctgtaactcatttggagtccccgtcaccccctcggcctccctccgcgctggctgcttggcaggcacgcgtgcctggagaagacgagggtgtgtccgcgaggctgtgcgcggcgctccgcgcgaggggctgggacaccaggaggattaattgtactcgcttgaaccggagtcgagctgccgggggaggggaggagagcgattgtcttgcggtctcaggacgtgctttgaatctaaaaccgcggtcctttagctcctttgcgttcctctttccccgcccacccgctcctggcgggctgcagtccctgtgccctcgcctcctgccgcagcctggggctgcgaccagtgcgccaagctccgccactgcccggctttggctggtccttaccccctcgacccctacctccccccgcgagcggcagctgtttgcctgggaaacgcccagtttcaactttctgaacctgcaaaatacaagccccgcggctgtgcccgggtcacgacgccctttaaagcttcaagctcctgaaatgttgggttgtcggaactgagtcggggacatttcattgtgagccttggcgtttctgggggcatcgttcatggctaaatgcagcctttctgtctcagttttgggaggtcatcagtgatgagcatgggattgaccccactggcagttaccatggagacagtgatttgcagctggagagaatcaatgtttactacaatgaagccactggtaatcacccttgccccacccccactcccttcagtttttccaccttctcccctttcccttgcgtgggaccccaggggtgtggccctgggagagggtggactattcagtttaggatccccgctctttccctgcagtatttcattgggcttccttatgccaacagagccctttgagaacctgatggtgggtctccctttgtttggggcaacatctgcatgatggcagcaggcgccaagcccttctctgcagaggtccttgcctgagggtctaagtcactgttgttccttgcaggtaacaaatatgttcctcgggccatcctcgtggatctggagccaggcacgatggattcggttaggtctggaccattcggccagatcttcagaccagacaatttcgtgtttggtgagtgcctggtgtggctgagagcatgagggattcattttacgctgggcagtggaggctgaagaggtgtgattgccagagggaaagcatgaagaacatccgcggtgtgccaacttagctttaatatagtgtaaaattgtttgcctttcagctgctaagagcttggtgtcctggccttccttatttataattatattcatgaacaaatattttaacgtttggccattttggtgataatctgaaatagtcttatctgagcattgactcactgatctatattgaggggtttgaggtaaggtatttagtacaatcaccggtgacttaagatttctctttccctctggcaggccagagtggagccgggaataactgggccaagggccactacacagagggagccgagctggtcgactcggtcctggatgtggtgaggaaggagtcagagagctgtgactgtctccagggcttccagctgacccactctctggggggcggcacggggtccgggatgggcaccctgctcatcagcaagatccgggaagagtacccagaccgcatcatgaacaccttcagcgtcatgccctcacccaaggtgtcagacacggtggtggagccctacaacgccaccctctcggtccaccagctggtggaaaacacagatgaaacctactgcattgacaacgaggccctgtatgacatctgcttccgcaccctgaagctgaccacccccacctacggggacctcaaccacctggtgtcggccaccatgagcggggtcaccacctgcctgcgcttcccgggccagctgaacgcagacctgcgcaagctggcggtgaacatggtgcccttccctcgcctgcacttcttcatgcccggcttcgcgcccctgaccagccggggcagccagcagtaccgggcgctcacggtgcccgagctcacccagcagatgttcgactccaagaacatgatggccgcctgcgacccgcgccacggccgctacctgacggtggctgccatcttccggggccgcatgtccatgaaggaggtggacgagcagatgctcaacgtgcagaacaagaacagcagctacttcgtggagtggatccccaacaacgtgaagacggccgtgtgcgacatcccgccccgcggcctgaagatgtcggccaccttcatcggcaacagcacggccatccaggagctgttcaagcgcatctccgagcagttcacggccatgttccggcgcaaggccttcctgcactggtacacgggcgagggcatggacgagatggagttcaccgaggccgagagcaacatgaacgacctggtgtccgagtaccagcagtaccaggacgccacggccgacgaacaaggggagttcgaggaggaggagggcgaggacgaggcgtagatgcccccgcgagacgggttagggaaagcggaggaggaaagcgagggggtggggggcttcccgggacgataacctggcagtggaaggaaagaagcatggtctactttaggtgtgcgctgggtctctggtgctcttcactgttgcctgtcactttttttttccttttttgtaatattgatgacatcaatgtaacatttgagatatttctgaattactgttgtaatggctaaaatcacataaacgtttgtgtcggaatggtgtcctctctttctcttcctttttctctttattaacgatttaaatgtaactttctgaacacattgcattgaattcttcctttaacaaaaagcaaaggcgtaggtaaaagctcaaatgaatttattctttcggtatggtaaaattgaaccaatcacagttaagatgagagatcaacctgagttttaaaatacctttaataaatattagttgaaaaaa

SEQ ID NO: 11 - DNA, 39791 bp, Homo sapiens
gccggcgacgtcacgcggccgttacggcgctcaggcgtctcgacgcgcgcgatttaaaaccagctcaggagacgccaaggaaagatgggacctcccggcccaggtgagccgggcggtcgggaggcgcggcgggaagggcccctagcgaagcagtacttcgggcgggcagggctggcgggctggcctgggcggggagagaggatatgctcagctcgggtcttggccctgcggctgacagcagaggccggtgcggggggaggggagggccggcgcggggcgggcggaccttgtgcgctcagccaatcagaaagcggcttcggccggagtcggagagcgcgcgggccctgcctcacactcctcagttcccgggcgggcggtggggcggcctcctccttgggctcctaaagcgtgctcggtgtctctccattaaaatggtggttttcctggaatagacgttattttcagggctttggaagcgatgtggttaccgttgtatgcttagcatgcatgcatttatttttgcatctattcaaaagtactgagctctcccgttgggcgaacaaaattgataatatctctatactgttggagttggggagacagacagtaaacaaaagaaataattacacatgaggctgagtgctgtgattgagtatagcagagtaggggtggctccgccaggggttcagggaagatctttaggcagatactagggaacgtgtttcaggcagaaggagcaagtacaaaaatgaggcagggaagagcctggcctggcctaggacctgaccagaacattgtgaccaagcttagtgaggcctgacacgtaggcagggtctggaggccttgggtaagagatttggaaattgagttacattttggacatggtatgtgtgacttacgggagagactcaggtgaagggatctataatcacttaggtgagaatttggctctcaggggagttatatggaccactcagggaagtgacccatggattgagaaataaatttggataccattatcatatagaccattagaccataaaaccatgggaacaggtgagaacactaggaaggccctgcacatctaggaccaacgtttagaagctggatagagaaggatgagctggaaaaactcaaaagacagtggtataggaagaagccaagagtgtttcaacaaggaagggactgtcagctgtttcaaatgctgctggattccaagagaaaggccagaaaatgaccatagggtttaggcaacatggaagttatagatgatcacgaaaagatagttctcatgaagttggaataggaaccagaccagagtgggttgaaaaatgagtgggaaatgaggaagtagacataggaagtgtctttgagctcagtaaccatcggttgaatgaatggatgcataatatcaaaggcaaggagagaaaccacggaaagaagatttggagaattaaagcatgcctctaattccaagtttagtttctctcttagacaaggttctccttaagtgcttcctatttctgttaaggtatcctctccaaaggtccaggttccttccttagcctgtagcctactgtgctcacatccaaatactgtcctcataagtcctcttgattcagtttctaaaaatgtctcttgcctcctcccttcctatttttactttgttgttttttgttttttgttttttttgagacggagtctcgctctatcgcccaggctggagtgcagtggtgcaatctcggcccactgcaagctccgcctcctgggttcacgctattctcctgcctcagcctcccgagtagctgggactacaggctcctgccaccacgcccagctaattttttgtattttagtaggaacggggtttcaccgtgttagtcagggtggtctcgatctcctgaccttgtgatctgcccgcctcagcctcccaaagtgctgggattacaggcatgagccaccgcgcccggcctattattttttagagacagggtcttgctgtgttgcccaggctggagtgcgtggctattgacaggtgctgtcctagctcacggcagccttgctgagcgcaagcaggctcagcttcctgagtagctggaaccacagatgcctggcaaagtaccccacttctcaataccacctatatctttctaattcactctctggttccctgactccaacaaccctttttttttttctgagacagagtcttgctctgtcccccaggctggagtgcagtggcttgatcttggctcactgcaacctctgcctcccaggctcaagcaattctcctgcctcagcctaccgagtagctgggattacagacatgcgccactacaccttgctaatttttgtatttttagtagagacgggattttgccttgttggccaggctggtctcgaactcctgacctcaagtgatcctcccaccttggcctccaaagtgctaggattacaggcatgagcccagccttgtttttacttcctattttattgaaaaaaaaaaaaaaaaaaaaaagcaaacaaaaaggaacatccccaagtctgccattgcacctgctccctgcctgcatctgtgccagtgcctctgtcttttctcctgttactgaggatgggctttctgtgctctctacaaaggcaacctctttgcctgcttgagtacattgttcagcaaattttaccttttattttggatggtcactgtgataggctgaataacacttgccctaaaggtgtccagaacctgtgaatatgttatcttacgtggtgaaagagactttgctcatgtgattaagttaaggctgttgagaagactatcatggatcatctgggtgggcccagtttaatcacagtggtccttgtaagaggaaggtcgtcggggtagagtgagagcagatgtgatgacagaacaagaggttagagtgatggggggacagtgagccaaggaatgtaggcagctctgaagctgcaaaaggcgaggaacagatcctcctctcaaagcctccagaatgaatgtaaccctccacagctgcaagagaacacataaacgtgtgggggtttttttgtttttgtttttgttttttgagacggagtctcactttgtcacccaggctgtagtgcagtggcgcgatctcgactcacagcaagctccacctcttgggttcatgccattcttctgtctcagcctcccaagtagctgggactacaggcacccgccactgcgcccggctcatttttttgtatttttagtagaggtggggtttcaccgtgttggccaggatggtctggatctcctgacctcatgatctgctcgcctcggcctcccaaagtgctgggattacaggtgtgaaccaccgcgcccagccacatgtgtgtttaaaccgctaggtttgtggtcatttgtgacagcagccatagaaaactaatacagtctctttgcttcattctttctaccatgctgaggtttttgtttgtttgttttgtttttttgtcttaaaaattcctcacttccctttcaactctcaccctctcatttctctccacccttttacagtagaagtctttgggcagggcgtggtggctcacgcctgtaattccagcactctgggaatccaagacaggcagatcacgaggtcaggagttcgagaccagcctggctaacactgtgaaaccccgtctctactaaaaatacaaaaaagtagctgggcgtggtggcgggcgcctgtagtcccagctactcaggaggctgaggcaggagaattgcttgaacctgggaggcggagttgcaatgagctgagatcccgtcactgcactccagcctgggggacaaagcaagactctgtctcaaaaaaaaaaaaaaaaaaagagaagtccttgaacaccttgtcatcgtttgctgtctccagtttctcttctcccatcttcacttgaaccactccagttcagctttctcccttactactctaggaaaactgtttttgtcaagatcactagtaaccctaggttctaaatccaatgatcagttctcagtcctcatctacatagtttatcacatcctcctcccctaaaaatactttcttcacctggcttttagaatgccacattctcctgattttctcccacctcactagttgcacatttcccagctcttttgctggtttctccttctttatttttacttatttatttattttttgtgacagagtctcactctgttgccccggctagagtgtagtggcgccatctcggctcactacagcctccgtctcccgggttcaagcgattttcctgcctcagcctcccaagtagctgagattacaggcgcccaccaccacgttcagctaatttttgtatttttagtagagacagggtttcaccatgttgaccgggctggtctcgaactcctgacctcatgtgatctgcctgcctcagcctcccaaagtgctttcctgctctttaaacctttaaagtgttcctctactcagttatttggtgatctcatccagtattatggctctgaataccctctacatgctgatgacttcccagtgtgtgtatctcatctggaactttccctaaattctgggattagatacccacctatctaacccagtaggatgactaatactaataagcatcttttttttttttttttttttttttgagacggagtttcactcttgttgcctgggttggagtgcaatggcacagtcttggctcagtgcaacctctgtctcccgggttcaagcgattatcttgcctcagcctcctgagtagctgggattacaggcgcccgcccccacgtccagctaacttttgtatttttagtggagacggggtttcaccatattggccagctggtctctaactcctgacctcaggtgatccacccacctcggcctcccaaagtgttgggattacaggcatgagccaccgtgcccggtagcccaggctgtttcttaactcctggcctcaagggatcctcccacctcagccacccaaagggtaggattacagggatgagctaccatgtccggccttttttttttttttttttggttgttatcttttaagttaagagactaagctagttttcttgaaaactgtcctgcattctagagtgtttccttgtgatatcatttaacttgttccttgaccccttgtatttcttataaaccagaagttaaagatctaaagttctttggttaaatttaggttaaacatgtttggtggaaatatttcctgggtgatgctatgaatttcacattgtgtcacatgaagagatgagtaactttcagattgatttttagtgaggctacatttgactggttaatgtggtgactggtagagtttttattgtaaaagacatttttccttttgtagttagcaaataatctggatgattctttggaacattctatttgttttacatgtttatgttgtttttcctctgtctgtttgccaagatatggaggagctggaattagagcccagcctgtctaactctatagcccatacctcacccttgtctcagcatctgtctcttccttgtcttacctggcatgatgggttatatatgtctgttgtccagtttgtgagcttatcagaggcagcaatattatatcatccatttttatatccatgcagtacttaaattcacatagctgcagagtggatatttgtcccagattaacaaagaagcatcagaaacctatggcctcccccctgcacctccaagaaacccaaactctagaggttctagccattaagtattagagttggagaagatctcagtggacagtgtgtggtgaacctccacccctgtgacaggctcaagacttctttggatataggaaatgttctcttgaaggtttcttgagcaagaattttgttccagcactgccagccacaatgaataactcttcttcagagacgcgaggacacccccacagtgcctcctctccttcagagcgtgtgttcccgatgcccctgcccaggaaggcgcctctcaatattcctggcaccccagtcctcgaagactttcctcagaatgacgatgagaaggagcggctgcagcggaggcgctcgagggtctttgatctgcagttcagcactgactcacctcgcttattggcctccccctccagcaggtgaggtgctcctgggctgtttctccttgaggcagccgccttgatatgggctgcgtaggtccaggcatctccacaaaacttcatgggtctaggttttgaaaatttaaactatcatggattcttgccagagttgtttgtttttgttttccatttaggagtattgacatttcagctactatccccaagtttacaaacacgcagattacggaacattactccacctgtatcaaactgtccactgaaaatgtgagtatttgctggtttattattgaagacgtaatcccttgatcacaggggaaatccagctatcttgtttctgtagataatgcacaatcaatgatgataattctctggtgagtcatcttagtgctggtggttttactgtttactctggacccgtggtgcacctcctgagaggctgccagctatctgctgtgtatctagaaaggcagcatggcgcatgagttaatagtagagttctggagctagcctgagttggaggctacatgcttctaagctgtgtgtgagccacccaaccattttgcttccgtgtcctctggagaatgggggtagtgcctgcctcatgaagttgtttggagggtgagtccctttgtgtgcagtgcttagagcagggcctgcacacactgagcattcaggaattttgtgccgtcattccctagccttgaacatgaggacatgcctgtgaggatttggctcttgacaagtgtttttgggaagagagatcagtgacaatatgtgggtattcctatgtaaagacttagcttcctctgttaaaagcagcattatttacatgagcctaggctataaataacaatcctttctgcaattttctgttttcagaaaatcactaccaagaatgcttttggtttgcacttgattgattttatgtcagagattcttaaacagaaagacaccgaaccaaccaactttaaagtaagaaggatgtccactttctcttgcatctgaattaaatgatgatgatttctactacttggcataacacagttgaatgctgcaaatacatgagagacttctcatttagatgttatgttagttaatttactttcttttcctaaactgatgaaatacagagagaatatatattctgtttattccctatcagtcatagagggatctttgtcattgcttccttggggcaagtaaatattttgtgaagcttgctgtgttttacctgttcagaagttgttttttgtgtatctttgtgagtgcagctctgattgtttgactaggtggctgcgggtactctggatgccagcaccaagatctatgctgtgcgcgtggatgccgtccatgccgatgtatacagagtccttggggggctgggcaaagatgcaccgtctttggaagaagtagaaggccatgttgctggtaggtgggtagggatctggatttaagtggctctttttagggcataccaggtagttacttgagtaatatactagaagaaggtcacaagaaataagtgatctcattttattgaagacagggcatttttagaaccatatatggtcttacgtgagaagatactcaaacactaaaattatatttccttgaaaaagagaagggccttataaaagcgtttatattttatttaggccaggttgtgtaaacatcaccaactaaggaacttctgatctgggagtctttggaaatggacttgcgtgagaagccaaatctaatagtttggtttctccataagttgcagattaaatatgcctgatgttttgagagaactgcgtgttttttgtttggttggggttggagttttgttttttttttttttgaaacgaggctcactttgtcacccaggctggtatgcagtggtgtgatctgggctcacggcagcctctggctcccaagttcaagtgatcctcctgcctcaccaccccaagtagctgggactacaggtgtgcatctccatgtctggctaatttttgtactgttttgtagagacggggttttgtcatgttggccaggctggtcttgaactcctgagctcaagtgatccgtctgcctcagcctcccaaagcgctaggattacaggcatgagccaccacacctggcctcacatgtttaaattacgacaggttttgaagaacttgagttagtaagttcatcacatgcttcaaagcagcccttgcagtacgcaattgtatttctccttttagatggaagtgctactgaaatgggaacaaccaaaaaggctgtaaagccaaagaagaagcacttacacagaactattgagcagaacataaacaacctcaatgtctccgaagcagatcggaagtgtgaggtgaggaactgtatgcgcagtgtggtttctgactaattcagaaccttaggggctgagacttggcagggctaaggctgccttgctggtatgtgcctgtttaagcctcaagggagtaaaatattcaactgatatctctgcattatcatcttttagcttgacagtaaagactaaaagtaagtccctcagtgtttcagaatgattcaaaaggaagagactgcaaattgctgagaaatctaattgataaaaaattaattttatttcctagtaaatgtagcagtggttatgttagctaacatttaatgtacacatagtgagcaccatgtgcttccttaagcctgtaacctgtattaactcatttaatcctcacaacattcttgtatcattttaggaagaggtaactgaggcacaatgacttgcctgaaacgacacatctagtaagtgagctagaagttgaagctaagtggtctaactccagaatcctagctttaaatcatctatctagcaaatcctaaggaatcggcttaaacaaatggtactggaggcctcatctataattagcacagttaatttaaagcaaacaggtgttactacaattttattttttaattctgccattaaaaacattgtttcagtgaacattctaatacatattatctttgcactcgtatgggagaatatctgtaagaaaattctgagacatggattttaagttgccctcaaaaaaaggtactaatttactctcccactagcagtagactagattacttttctctcttacctccacaacattcataaatggtaattaaggtcacaaaactagaattggtcaccaaggaaatgaatgtatatgggaaaaagactgggagttccttttccccaatcttaggagttcagagagctgaaaaaacatccagtaggtaggaggaaaaccagaagagcgtggtatccaaatgagaaaatatttcagggagtggggaatgatcaaccatgccaaatgtggcaacctgaggccactaatgagcttggagtgggggcccctctgaaactcaagctcagacctccagggaagggcttggctggtgctagtgtccctgagtttgagggaggggattgtgtgcccaggacccagaccctggaacgggggcatgctggctggtgctggtgtctcaataaggctggttctgtgagtgtgaaaatctgccagtggggttcagctgctgctacaggtgggctctgctgcagccggggtggaacactgctgggtgacgctctcctaacatgcaacctgcagaaaggagcagtgccttctctcccttggagcctgtagtctccctctagtgcccctacttggtaaaccctaacagggagctgccggcaaagctgaatgtcccagaccctgcatcacagccaaggagagagggtaggcttagagctgagaggcagtagcttagtaactgggacatggtgaagtgtcatgaggattactgacaaaagactctggggtggggagagagatatatatagagagagtaaatgaaaacaaatatgcaaaatgctacccattgggtaatctgagtagaagctttacagagattcgtattactgtttcaacattcttgtggatctgaaattttttttatgataaatgggaggaaaggactgaaaacacttgaatataggtagttgttttgaagagttttgctataatttggagcagagtactgggatagcaaatggagggaaaagtaaggccaagagttttgattttgtttttgaatgggagaaatgacagcatattttgttgatgacagcagtctagtttggagaagggattattgatgatgcagcagaaaggagaattgccaggctgatgtccttgcgcaggtgagaggtagggaatggacagcacaggttgggctcggctgacgggtgttgtttgggtgcactcatgggggagccttctggatactgtcttaaaacaggaagccaggtcatcagcttacagtgaggatagggaaggaaggcactgggggcgtgaggaggggaaagggtaggaaagagtcctctaggaggtgggcgagtacatgaactagggagatatggtgtgactgttagacaacttagggtctacttgagggtggtggcagatggatataaagtgaggtcagtcagcattattttgtgtctctgtccagccgtgaatagctgtgtgggtacaatcatggagtaggcagaaagttgggtttaatatgggatcctgttgagctgagtgaatggacacagctggaaagggacactggaggaggtgagtgcatgtgtaaaggtgtggttgcattcactgcttagggaattttacctcggaagacaggggaatgagggcagtggaaagtaatataatcagtagattgtaggcctggtggggtcaaagacttcgtggtgttggggacaagaaggggtgagctggaaatgtaggaggtggttgccagagaggggccctagaattgaggatatagagaggttgcagtcatggttaatgagtcaactcagagcaggcaagggagcaaatggcggaggcggggtaggggtcttactaggctgtcttggtgtcttacttggctgtcttggagtcctgggtttcttaggatggagaccattgaaggagaggatatcaaccaagagacagtgtactggatggatcaacatatggatattgaaatcaataagagctacaccaggaataaatttggagactagtaatgagccataaactaatactaagatcttctgagaagaaggacaggttgtgacctggggattggaagatgactgcaacacagatgggcagacagtggcaaaagctgatgttgtactcagagctggggcattagaaattgggaggggggatagttggatgctgcaatcacctggcccacctgtaggccactggtttgacggctgtgaagagaaagcagccactgcagaggcccgcaggggaagcctatcctcaggctggcaccatgtctcaattggagcagtgcccctcagcctgttttttttttttttttatcacttttgccccttcagacccatttagacattttgtgcctactccttccccttaaaatgaaatactaaggaataagattttgtcagatagggtagagatttggataggcaaacattattgtaatatctaagatttttcccacctagcctctaggaaacagttttcaccccttgagagtgaaatgagaacaccattgagaatacataaattagaacaagtaggtggagataatcctcaggaactaagtgggcgatagagagaattttgctgatgactgagtctagagggccctgaggaaataccagtttttgaggaggagtgggagatgggggctgtggtggggtgggaggtggcatcagagttctatagatcttagagtccaagaaatgtagaattgtgggtgtcttgggtctttttgtgtaattaataaataagccagataaagggcaacagtgagatgaatgccagtgttcttacagcagatggtagtggtaagactgagtgtgcaaggggctagggaggtggggccttgccatgcccactctgagtggtgaggtgagcagggcattgctgtgcacgggcagggaggggccagaggaaggagagtcactgagaatgaggcctaagagggaggggagaggcgagagcagctggctcttgtggggagagggagttgtattttttccttatgtgtgtgtcagcattaaccgtgggtgatgtgtgtagcatatcaccatgtttaaagaccttgacgtaggccgggtgcggtgcttagctgttgacctgggaagagttgtgaatctcactgtcatatactataaaaaatggggaacgctggccccaaccacatctcggttttatattagtgaatccatttatgccaaggtctctctctttttttttttttttttgagatggagtcttgctccgtcgcccaggctggagtgcagtggcgctatctcagctcactgcaagctccacctcccgggttcacgccattctcctgcctcagcctccagagtagctgggactacaggcacccgccaccatgcccggctaattttttgtatttttaggagagacggggtttcaccgtgttagccaggatggtcttgatcttctgaccttgtgatccgccgcccgcctcggcctcccaaagtgctgggattacaggtgtgagtcaccgcacctggcctatgtcaaggtctttaaacatggtgatatgctacacacatctgaagtggtattatttattagtcatagggatccagaaagccctttctacgttcccttccctcccccaattctccttgttttttccccttcccagataatctggaatttatcttactgtcattattattattatttttttttgagacagggtctcgctctgtggcccaggctggagtgcagtggcacgatgttggctcaccgcaacctctgtctccccggttcaaacgattctcgtgcctcagcctcccatgtagctgggacgcaccaccacgcccagctaaatttttttgtatttttagtagagatggggtttcaccatggtgaccaggctagtctcgaactcctgatctcaagtgatctacccactggggctcccaaagtgctgggattacagacgcgagccaccgctcctggcccttactgtcattcttgcttttgattctatagtgaaatgttcaaatcaatcggattattaagtacaggatgtttggaaattctgttttgtagtcatcttctttcttaccaggtaatctcaattctgggagcctgaggaaaacggactatttcccaggcctgcattagcttttcccatgattataaagagaaaaggagagagcagcaagtagggctgatttcgctaagcctgatattgacaggctgtggtatgtttatgctaagtgaaatgaatactgtcatgaagaaatgccaaatactccaatcctggaaagctttttttgctctgtaagttgctgtaaacttgtaatcatcaagagtatggaagataaaaaagagggatggattgtcacaaacagaatttaaagcttcaactgtttattaaactctcattttcttttcttttttttttttaagatggagtctcactctgttgcccaggctggattgcaatggttcagtcttggctcactgcaacctccacctcctgggttcaagcaattctcctgcttcagccacccaagtagctgggattacagacgtgcaccaccatgcctggctaatttttttatttttagtagagatgggattttgccatgttggccatgctggtctcaaactcctgacctcaagtgatctgcctgcctcggcctcccagtacacttgggattacaggtgtaaactctcattttcttggagatcagaaagcaaatgtgtgggtgtgtctagaccagttgagagcacttctttatatatgagccgatctcttttggacacagctctttggtatttgcagaacatttgctgtcatagaggattcaaacatgattatgcttcagttctttataccaggagaatacaggtagatgaatgcaaggaaggtcaaggcacatgctataggaaaccagagttggtagggctcagagtttatggaagaagcaagacttgaactgggccatgaaggaaggctaggtgtcttgtcaggtaggcattgccagggaggtgattctaagcagaggtgtaaaagcaaaagccatagcacaggaaggttctgattaggaagctggagagtatacgagtttggctagcgccaaggatttgcttttagaaatcacctaaagagatcttgaactttatcattcagtctattgtaaggccttttattgtggtccttccttactgtggacccttgtttcagaaggtttcatctactcaaactacacagtcagccataattcattgtcccattgaattgcttggggatataaatccctctgttgtcacacatgatataattctagacacaagtgaggaacattatcatagtgctttcagctttaatgtgggtcagtgtacaatttccatgttggctctgaagtgctgagtatagttccgttaactacctacacaagacttttaggggtgcagggctccaggtgggaaaccattactctggatagcatttgagaatggaataggagtaacctatttttaggtatttttaggatggggaaaaaaaataggtatttttaggatgggaattgggagaggccagagataagggtcatattgctggctctggggatggaaagatgcactgggaggaaaccgacttggacgtgtggctgcctgagggctaaagggatgggagaatgtggagatgacgaatgtgctgctctgggacaaagaatggtgagatgggtttatggtacggcaggagctgaacctcagttctgatgagcttggactccgagctaaggggaccagggaagagccagggaggcacatctgtgttgtcctatccaagcccctctctctccatagtagccacgttctgaggcatcaggaagacctgtgaaccccatacccaaccgtatctcctgtctcaaggtcacctgcagagtcccagggggcttctagcctcttgctgcacatgtgtgtgattcaccctgtccctgttcttatgcccagtgcctgtttttgcctttgggcttggtgtcatatggccatgccattcctgctcctgacccagccttagggaccttcttaaaacctctctcaggtttcacccagccagctagccctactgactctgtcctttgcctggatatcttgggtatgttcttccaaactttagaagatatttctgttcagaggaacaatagagccctgtgactagccctatcatacaggctttttaagccaatggcatttgttagtgacttatagaaggagaccagcagcaaggatacacgtccagatgtattataaaaaagccatttgacacagtgtacacttgccaccacatactgtcttctggagcagtatatgtttatctcctgactataaccagcctttcttttgaaccgggattttatctgctcaattagaaagccacttttgttgggtgcggtggttcacaactgtagtcccagtactttgggaggccaaggtgggtggatcacttaaggtcaggagttcaagaccagcctggctaatatgatgaaaccccgtctctactaaaaatacaaaaattagccagatgtagtggtgcgtacctgtagtcccactactctggaggctgaggcccaagaatcgcttgagcctgggaggcagaggttgcagtgagccaatatcatgccactgcactccagcctgggcggcagagcaagactccatctcaaaaaaaaaaaaaaaaaacaaaaacaaaccacttttgaccatgagtggagatatttcagtccagtgtatatacctgctaatgagtggggccaaatgcatgagaatttatctttcccttggctacatgccgtaaatcttcagtttcttctctctctgtgttcagattgatcccatgtttcagaagacagcagcctcatttgatgagtgcagcacagcaggggtgtttctgtccactctccactgccaggactacagaagtgaactgctgtttccctctgatgtccagactctctccacgggagaacctctcgagttgccagagttaggttgtgtagaaatgacagatttaaaaggtaagtacaagtgatgcctttcaccagagcatttcagtcattggggaatttttttacataaccatggggtacaataagcccatcatgctcttatgttgcttaaattacccagaagtttcctctggaatgccaaattgtgtatccttttgggagtgccttgcaacccactaacttttgtcttctctgcggcgtggagtctaaaacggtaaaccatcgcctcttggtcttgatgtgcccggtaccttaggtgcccactgtttgcagtcagctctccaagtcacatttgggagacctgggttcctcctggagtgtcagtttgttcttgggaaggggacttagagagacctttgcctagccagagaggctttgtttttatttgctccccatccagggggccctgaggagaagagagcgttgtgaattgttttgagactcctctgcagcagtctaagaactgatctctcctattatcagtcccctatactggcttgacagagattttagcatccctcccatatacgcctccacgcctgagttgggggttctccttgggatgttgtaatgaggtgccagcaggtagggaggccaggtgcgtgcagtgcagtagctacacttggggtcccagaagagctgccccctcctgcacatttccaatgcagtgttcgtactctcgctgatcttcatctcaagtgcggtcatttttatgtgttgaatgaaattaatacttcccctccaggctgggcagttgttagctcccattcttgtcatttctattcttgcctcaattttgtttagtatagtttttgtgctaacgatctattttccaagtttgtgctctcatttggggctctaatcccctgaagtaagtcttctctagtttgggactaaaaataagttaaagtaccattacatgattgcctatgtacttggtgtatttttaagacgaagcgtttgatttcccagctatagcataggtcacagaattcatttcagaatcgaatgtctgtgctttaggtttctcctctagtattttactaatttgtgcgatgacagtgcatagcctcactccagcgtgggtgtggccgacgcatctgctcgctcccagaagaggcagggacacagactggcagctagccagccactgatgatacttgagcctttgctggaggacagtgaggtaactgtgcctctcatctctcgtcccactcagtatcattctgaagggagtaaggaatgcacttgacccccttctaatctctctttgtgatcttgctatcctctccagcgcccttgcagcagtgtgcagaagatcgccagatctgcccttccctggccgggttccagtttacacagtgggacagtgaaacacataatgaggtgtggtcaagttttagtggctcatggtttcagttagttggctcaagagtggtcctgcccaatgggaaccaaaactgtggcatcatctttatttagccaggagtacagaaaatatttcctttggcacttctgtagggacaaaaaccctgagggaggagggtagggttgtgaaccccagcaggactattctagaggtaagtgagttccaggatcagctttatgtcctctcttctgctatcctagggtaaggcggccctggcattaatcagtgaacatttataattagatttactcttgaatgtggttatcccagtggcctcgaatctcttaggctgccgtcaagcttgaggaatttcctgctctttggggttgaatcccttggcacagagtttcctgagaaattgtcatgtgtagagctttcctctgtgtatttttagcatggccccctttagcctacttactacaatttccaaaataaatgatctccatggaaaactgttttctgcaaacatgtagttaatgggtacagaatcctgtttcatgttttacaaaatgtgcctgacaacaatgcagcttcctcctgtgctgcacaatataaacttccccctcactgtactatcgtgagagtcttggcccaggcaggcaggggatgggaaagggaagggtggctcaggggaaggaggaggctggaaactgaaatttaagggtgagaaggctgtccctccagtggtgatttggggtggttataggaatgagaattacagaaccctcttttgtccctccagtctgtgtcggccctggtagacaagtttaagaagaatgaccaggtatttgacatcaatgctgaagttgacgagagtgactgtggagacttccccgatgggtccctgggggatgactttgatgccaacgatgaacctgaccacaccgcagttggggatcatgaagagttcaggagctggaaggagccctgccaggttcagagctgccagtaaggctctcagagtccgaaagtgtttctataggagttttccattggttcttttttctttttcttttttttctaattaaaaaatttttctttctttttttttccccccccaaaaatagagacgggcatctcactgcattgcccaggctggtcttgaactcttggggctcaagcaatcctcctgctttggcctcccaaggtgccaggatttcaggtgtgagccaccatgcctgggcactatcagttcttaacagatttcctgctggggtgattgaatttgatgtctgattggctgggctggtgtgctgtgtcatacacatcagctgagcttttcagctgagcctttctgactcagaggaatcacacctggctttgaatgtcggcttagccactttggttataaaactgacattgcaagagtttgtaaggattagaacaatgtaaagcgtttggaacaaagcacctgggatctagtaattacgtcaatgtggctgttgttaccacgtgcattttggtagcagagagcatgctccctttgtacacattgcttatagtgtggctgttggtgactctaagccaccaatttaccacctgaaaggtaagcaagtgggggttaggcagtgttgggttaccagatgggcagactggggacgagcaaggcagggaaaacaaaaccaaccaataaattgagaatatttggaggagaagaagaagaattggtttagtaattaaatttttgattaccctagtaaacatcataaaaataatcagaacttggttggcctttatgtacttaataggttagtattgttttaattctaaatatgatttggaagcagggtctcacaacactttaatgtcatggtcctgtaaaggtcttcaatgggcctgggggtaggagatttcatgagattagagtgaacagtccctctgttaactcctatgtctgtaacagagctttgcagaactgggattggggacagccaagctggttttgagtaaaaccttagaagttgcttagtataatttcccgctatgacaaaaatctcttcaagaccctgctcggatgtctttcctaagctcattttgtctgcccttgtgggaaacgattaggctgataatgtcttttaaagacattatcaaggcgccactgcccatccaggctcagtagcaccctgctctccggaattgtactgttcacatggctgcaattttgccccattctcatcgtgtcttttttgtttttatgtttttttgttttttttttttttgagacagagtctcggtctgtcgcccaggctggagtgcagcagcgcgatctctgctcactgcaagctctgcctcccgggttcacaccattctcctgccttagcctcccgagtagctgggactacaggcgcccgccaccatgcctgactaatttttttattagagacggggtttcaccatgttagccaggatggtctcgatctcctgacctcatgatcctcccacctcggcctcccaaagtgctgggattacaggcgtgagccactgcgcctggccatcctgtcttctaagaagggagaaatgataggttgatgggatgaactcttaaaaacatcattttcaaatgtcagagaaaagctatcactttccttaaacagtgaggtgacatctgagggactgacaataacaaagggcttccatgacttttatttggtttctggaagatgttttctgctggttattttgaacaaatgtctccacttctctcccctattccaaacagcacaaaatcttagactctatcctacctagtacattaggcgtgggaggctgcagttctagtctcagattttacccatccttaaatcccctccccttgccacatcgctggcctttcctgggaattcagtgagtgtttgatctggagtagatctgatcttgccgttactagccctgagatgtggggcaatgttatcaccttttgcggtctttgttttctcatccataaaatgcaaggttgggaccagttgataataacaatatctgatatttattgagctccttattctttgtgcaagatgctgcgccaggtgccttatgtgtgttatttcacataatttacataatatctaaaattaattattttattgcagcaaccctataattaggtcctattatcctcattttacagatgaggaaacaggctcagagagtttaatggggtggagctggttgccacccagcacctttgaccagtcctggccacatatagtgagctttggatggcaggctccagtccacaccacctgagcatctcagtgggtagagggggccagacatcacgttaccatccccgggtgattgtgttctgcacccagggctgaaaaccactgtactctactgagaggtcttcggaggcctctggatgaaggtggggtggggcaatgctgagtgataaataccagtgttgtgtagatgcctcacgttattggtctctgcatggcagcacattgacaactgcaagcgtaaaaggtggagctctttgtgcacatgcattggtaaggactggtctgcaaaagtgcttgatgtctaagagtgagctccctctctgtgcagcagcaacagcagcccaagaacacttggagccaagtgttctctggccgacccttctgtagtaccagcatgcttacataaggcagttactgtggttaatgacctagtcggaggtcaaagcccagaacacagcctacttcacgcatgcgagaatgaaacattcggctgcatgctgcctgatgtgctgagccagctgggaggagaccttatcttgccagtgttaggacagtggattgaaccatggctaaattgaaggagggaccctgtgatattatggggaggggatagaagaaatacagagttttcctggagggactggagatgtttgaagtgggcagccttgaaaaatggatagactattttggactataggtggattcatttagttgttgagtggtgaaattgggactggtaggatgcctgcgacatagcattgtatgttgaaagaattattgaattactacagttcaaaaatcctgcagagcctctgtccagctccatcaccagaattgggaatgggagccactcttcctaatggaagaatatccatcagaatggagtggggatgctgttgaaacttcttccttctacctctggagttcacagcacagtgcatttgttacttaataacatgctaggtatcagattctgttacagcactaggccatacagactagaaatgtgatttttttattgtgtattttatttttttaaattaggttttaattacacaataaatgcacaaatgtagtctcctgtttttgttttttaaaattctgtatgtaaagacaaaatccccttttaaaagcctttttagcttattccatatggcttatataaacgggaactatatgtaggctcaatacaaatacaaggccactcttctgaaacttcttggttaccttaccttcagagggcagtacagcagcaccagcgtcctttctgacatgttggagccctttaggagaaagcttgtaccttgtggaaagagtgaaaaatggctgggcacggtataatcctgacacgcctgtaatcctagcactttgggaggctgaggcaggaggattgcttgaggctaggagttcaagaccaacctgaccaacatagtgagaccccatctctattttttaaaaatgtagaaagagtgaaaaaccaaactgaaactgccatgctgcactgaccacttagacactttacacacggcaaagaataaagctggatgacctaacagattataaggggagcccccaaagcgttagaggaactaaataattagacaaacatgttttttcacttttagtaggaactatagcggtatcttttggagccctcatttacagaaggatggtgacgaatgagggatttgtcatcttgtgtggcaagaagcatgtgtgtggaaagaccccgaggctgggattaagggacttgtgtccagctcccagctccggcattttactagctgtagattcttacccaaaggaattctcttttttttttgagacggagtctcactctgtcacccaggctggagtgcagtggcgcgatctcggctcactgcaagctccacctcctgggttcacgccattctcctgcctcagcctccggagtagctgggactacaggcgcccgccaccacgcccggctaattttttgtatttttagtagagacggcgtttcactgtgttagccagggtggtctcgatctcctgaccttgtgatccgcccgccttggcctcccaaagtgctgggattacaagcgtgagccaccgcgcccagccaaaagaattctctttacttttgtcatcttgtctctcaaattaggtagactagcattttatggtgcactttgaaacttccagagtacttgtatagatatgattatattgttataaaattaagggaaggaaaagtacttgagaagtaaaaggaattattaataatgaagttatttgtattggactcacagaaatgcagctcatttgcggacatatgcttcatatgtaaatacagcattataatatatgtattgtacatgtacaaatatgtgtgttacagggaagaaatgatttcccttggggatggagacatcaggaccatgtgcccccttctgtctatgaaacctggagaatattcttatttcagtcctcggaccatgtcgatgtgggctggcccggatcactggcgctttaggcctcgacgcaaacgtatgtaattctaggtggaattttaagaaaagaagtagtgtagatgaccagccagtcagcagttagccaaggaaaagaaatgccagtcacagccctgttgtgtctcttaataagccgaggaagcatacagatgagccagcctcctggttggtcagtttgcctggcctgggatgaagggacagtgaaaatggaagcctctgagtgaggagagtgagtactggagtcaggagaactggactcccagcctcacactgctccctagtatccacatgacttcactcagtggtcacgggtgggcatgacccccgggcactagagggcacacaggagctactgcacatgttggcattctgtagaactccaaagggctgtgctgaccttatgtgttttgcattgtctctttgaaagaaagggataagcatctgttgttttatgttttgttttgcttttgagacagggtctcacactgtcacccaggctgaagtgcagtggtgaatcatggcttactgcagccttgacctcctgggcttaagcgtcctcccacctcagccttctgaatagctgggactgcaagggcatgccagcatgctcagttaatttttaaattttccatagtgatgggatcccgctttgttgcctaggctggtctcgactcctggcctcaagtgatcctcctgccttagcctcccaaagtgttgggattacaggcatgagccactgcacctggccaagcatatgtttctgatgtgttttcttagccaaaacacaaattataagtttaggatgaaaagagggtgtgtgattgagcactcctactgttgtgatgctcagacacaatgctgccttgtggttttgataagccttgataaggctgtcagcagatcttgtgaaatgagtaaatagtttaggccacagaagtgaagtgctgacgtctgtgttcactctgcagaagatgctccttcccaatcagaaaacaaaaagaagagtacaaaaaaagattttgaaattgactttgaagatgatattgactttgatgtatattttagaaaaacaaaggtttgtactgaatttattaggattgtgcttactcgtttttccctttcagatgtgattttttaaaattccgtataaatttaactgttagagcaaacagatggtttcattcttccttgttccttaaacgcactattaagaaatagtcctaaactcagtggcagaaagaatcaaatttagaataaaaagaataatgctagcaaaatcacttttttacatagaactgtgagactgatggtagactcatgctgcccaaacccttcccagactgctttaaaaaaagtaagatgttttgcccactgttaaaatgcctaaaacactttttttaaaaaaattaataggctgctactattctgaccaagtccactttggagaaccagaattggagagctaccacccttcctacagatttcaactacaatgttgacactctggtccagcttcacctcaaaccaggcaccagggtaagcctatttcttggttcctttaagcacacaaggtatcaagtggctgatagtatgacagttaggcagtgcctttgaggaaaagggagaatgtgaggagtggtatgtgttagccaaagcgtgttgccaggaaatcaaatagataaggcaaagaaagctaaaaggaaaggcttatatgatggacacacagtaaacacttggaaataccttacctggcaagaatgctggatactgaagcctccatgctgaaattcaggggggcagtgagtgtagttttttggtgaagtttcaacagtttttaagttatttcttgattcctttgctttctccttttttttttttttttttttttttttgacagagtttcgctcttgttgccctaggctggagtgcaatggtgcagtcttggctcactgcaacctctccctcctgggttcaagcaattctcctgcctcagcctcccaagtaactgggattacaggtgcctgccaccatacccagtgaattttttgtagttttaacagggacagggtttcactatgttggccaggctagtctcgaactcctgacctcaggcgatccacccacctcagcctcccaaagtgccaggattataggtgtgagccactgtgcccacctgattccttggctttctcattgaagttgtggatttactcaccaattgctttatacagtgaggttgccttactcatgatccaagtcgaagcgagcccaaggtgacacacgggctcacatcctcaggaagtctcctagggctctacaggctgctggggctccttctgagattgtcacatggagccttctgaattacctggtgttgcaccctgattactgcctccttcatttgcctggggctcttctcacatgtccctgctgacagggtaagcagtggttcgtgtaaaccattccattcacatcctctgcttacttgcattactggttctcctactctcatggagtgtattaagactttatactttcctctttattttgcctgtttttccacaagattttaatgatatatatatatatatatacatatatatatatacacatatatatgtatatatatgtgtatatatatatatatatatatatttttttttttttttccctgaattgactgatattacacattctatttgtttttttgtatttttttttagagacagggtcttgctctgttgcccaggccatagtccagtggtgtaattggagctcattgtaactttgaactcctggattcaagcagtcatcctgcctcagcctcccaaagtacagggattacaggcgtgagccgttacacctggcctcacattctgtttttataaactaaccaagatatgtttttctttctgatcaatattgtttacttcaatagaaatactctttttttttcagtcctagctacttgggggcctgaggctatagtaagctatgatcatgccagtgcactccagcctgggggacaaagtgaggcctcatctcagaaaagcaaaacaaaaaaaaaattgtgattcatgagagggggtcaaaatatcaacattaacaggagtttggaagaagttgattctgactcttatggatgattttgaggggttcaagacttcagtggaggccagtcacgatggctcacgcctgtaatcctagcactttgggaggccgaggtgggtggatcgcttgaggctaggagtttgagaccagcctgagcaacatggcgaaaccccgtctctactaaaaatacaaaaattagccagacatggtagtgcaggcctatagtcctggctactcaggagggtgaggcacgagaatcactggaacccaagaggtggaggttgcagtgaactgagattacagtacactgcactccagcctgggtgacagagcaagactctgtctcaaaaagacttcagtggaggaagtcattgcagatgtggtatgcagatgtggtagaaatagcaagagaaccagaatgagaaatggagcctgatgatgtgactacattggtacaatatcctgataaaacttgaatggatgagaagttgtttcctatggatgagcaaagaacattttcttgagatggaatttactcctggtgaagatgctgtgaacattgttgaaatgataaaaaaaaaagatttagaatgttacatagtcttagttgatatagcagtggcagtgtttgaaaagattgactttgaatttgaaagaagctccgctatggataaaatgctatcaaacagcattgtatgcttcagagaaatctttagtgacaggaagagttgattgatgtagcaaacttcattgttgtcttattttaagaaattgtcgcagccaccccatccttcagcaaccaccacccaccctgacagtcagtagccatcaacattgaggcaagaccctttaacagcaaaaatattacaactcactgaaggctgatatgatcattataattttttagcaatgaaatatttttaattaaggtatgtaaattgttttttagacatatactgttgcacacttaatagactccagcatagtataagcataacttttaaatttgtgtgactggaagtgcctgtattaaacactggacatttggctagggacacctgagagtgtgcccagaggagagtattctaaatgaagatgcagttagaagttgtgtcatatgaagaacagtggaagaaaatggggcgtttcttaattcaagtatttattgtttagtagtagttttggatttgttacaagcacattgtgggtttatttgagttgtttttgaggcacagaattatattaaaatattcagtgtgctcttgtaaactgtgcacatctccagtcacatttctcctacttcagagatttatatatcaagtagaaatcactggtctaaggaaggacctgcaaatatttgaaagactgtgatccataggcactcgtaaaagaggagcctcattccacgaggctctggaatacagaatgaggatgatggatgtaattagagggaagagctggatgtctctccttgttgccatgtagggaacagtggtttccattcaggaatgagacaggctgttaattaaggtaatgggttttcctttttttttttaaagacagggtctcaggctggagtgcagtggtatgagtatggctcagtgcagcctcaacccctgggctcaaatgatcctcctgcctcagcctcctgagtagctgagaccacaggcacacagcaccatgccatctttttttgtagagatggggtctcactgtgttgcccaacgctagtctcaaaattcctaggctcaagcagttctcccacctcagcctctcaaaatgctgggattacaggtgtgagtcaccgtgcctggctggtaatgggttttctgtcaaaattgttcaagtgcaacaaggtgactttcagaaagctggagggtagattttccaacttttgtttttagtgaaggaaccctttttcaggtaaaactgtgcagaaggcctaattgccagtcacacagaaatagagctgctctggtttatttgggattggtagagatgctgagccctgctactccaggtttgcactgtatagtggaaaagtctgttagacttagatgacttgtgagggcccttctgactctaaaattgtataattctaggaggagattgggcataggaattaagatttacttctctaacctagttcagtagcttttaacaaaatagctttctgcatttattctttcctttagttacttaagatggcccagggccatagggtagagactgagcattatgaagaaattgaagactatgattacaacaaccctaacgacacctccaacttttgccctggattacaggtaaaggggggaaaggggctctgtcctctcttctaagccagggagtcgtttttctctgcttctcatgtccccattttatatggtgggagactgttggcaattttgaatccagtggaggttttctgggtaaagggtctgccttccacccagtgcagggagctgagcagagtcaaggaaacagcctcaccttggcctgccttacctcacatcctacatgcaggaagcaaatggccacactcaagtgaatgcgtcgacatgtggatgggtgtttagcctctgctacaaagtactaatcttggctgttgtgggatttcaaaggaatataaacactttgtcctcttatgagctaatattttggccaggtagacaaccagatcacaccatatgtgatctggtgtggcaaaaaataagtcttcggggtgtatctcagatgaccagatttctagctgtgaatgcagttctcatattgcaagcttgctgtgaacttgtacaagccaccccccatctttagatcacggtttagactaaataatttccatatcccttctctgagtctactgatgagatggctaatacaggtaacagaaactggaaaaataggcttcatctgtgtccctgtatgtggaaaggggggaacgaactggaaaaaaatgtattcaccttattttcttacttaggaagagagttaggctgttatattttagtgaaaatccagactgacctcttgactagtgcttctcaaactttaacttacatacaaatcacccagggagcctatttaaggactgattcctgacctgtgtccccccaccccaccccctgcccgaagatactgatacattcactctggatgtgatcgcaaaaatgactttctcacctgcttctgggtggtatgcctgctactgaccagatggccccaggaatctcctgtgctttccttgggtgatatgttcaggtcatatctccggtatttgaggaatgtttctgtaaaatgaaatcctaaatttgttagaagctgaaggggggacatagtggcaattatggttatcgaattccttttaactcccgctcaaaaggtcttaggttgataacagacacctctctaatagggtttacgtgaaacaggatgataactagaggcacctagaagttcatcgtagtgtaactcactgagtgaaccatcagatggtctcttcttgctttgtaaacatggagtctatttcaagggtgtttctgagctcctctgcagcgtccaccaaactcgaagagctgtttcttgcccaggctgctgacagtgatgatgaagatttggatgacttatttgtgggacctgttgggaactctgacctctcaccttatccttgccatccacctaagacagcacaacagaatggtgacactccagaagcccaaggattagacatcacaacatatggggagtcaaacttggtagctgagcctcagaaggtacggatgaaacagctgagaattacattgtttgcctgaaatctatttaattgtctcttatatgagagtcacgcaatctgagcttgatttcttttcttctcagttttaacctgttgctctccaagttttaaatagggttgtgggagtgagctgatgctaattaggtttgtgtggaactgaccatctctccaaagaccttgataagacatgtaactagggaggaactggtcacccaaataaggcatatgaatgaaggctgcaggcagagaatataaatttatatgctaattcagcaaggctagctagctagctgtgtggctctgaaaaatcttggccaaattcagtttgtattaaattatcatgtattaaacatttatctcttccataccaggtggcaggctttatgcttgcctttatatttgattcatttatctcttttacactggaattccagttagccttaatgtagattgcactggattgaaaagaaattagatttgatatgagggactctatatagtgtccaaagagagctctgggctgggcgtggtggctcacgcctgtaatcccagcactttgggaggccaaggcgggcagatcacgatgtcaggagttcgagaccagcccggccaacatggtgaaaccccgtctttaataaaaatacaaaaattagctgggcatggtggcaggtgcctgtaatcccagctattctagaggctgaggcaggagagtcatttgaacccaggaggcagaggttgcagtaagctgagatcatgctattgcacttcagcctgggcaacaggtcgagactccgtctcaaaaaaaaaaaaaaaaaaaaaaaagagtttgagaccgcgtggccaaaatggtgaaataccatctctactaaaaatacaaaaattagccaggtgcctgtaatcccagctccatgggaggctgaggctggagaatcgcttgaacccaggaggcggaggttgcagtgagctgagattgcaccattgccatccagcctgggtgacaagagtgaaactctgtctcaaaacaaacaaacaaacaaacaaaacaagagagctctgtagctccttggttgaaactggattccttctttagttgaactccagacctttgtttttacagtgaattatggtaaaagtttctttattctgcttagttttactttgtcatatacctatttcaggtaaataaaattgaaattcactatgccaagactgccaaaaagatggacatgaagaaactgaagcagagcatgtggagtctgctgacagcgctctccggaaaggaggcagatgcagaggtcagatgctcttgcctgttctctaggtgcccagcatgcgggaggggagtggttgatgtctacagctgaagacacctcgatttgggcaatgcctccaatacagaaatgttcgttcaaaaatacaaggagctgggcatggtggctcacacgtgtaatcccagcattttgggaggctgaagtggaaggatcacttgagcccaggagtttgaggttacagtgagctatgatatgatcgtaccactacactccagtctgggcaacagagagagatcctgtatcttgaaaaagaaaacaaaaataaaaggaagacttcatgcttctaagagagaagtgaaccaagtatacaagtaggcaggtcacacagactgtgatacaaatagcaaactagtgtgtaagacgtgattcagccttgctggtaatcaaaaaagacaaatgaaacaatcttgatgctactttaaaacagcagcagttttagtaattaaactgttttccattactgaggaggaaaatttggagtacttattcactgctggtagcaatttaagttgctctatgctatgaaatgtttaaaccttttgatctaataattctgatttcaggaatgtattctcagtaggaagatagtggaaaagtaattattatactgtcagattctacttcttcagaacaagctgaaaccttgattaacttggtccacctcaatgaaaggaagtctcagttaattagaatccttctctctttctgacttctgctcagataatattctgagtttagaccttctgtagctgagaaatgaaaactcataagttgattgagggccctgagctgggtatcagagaaagctcttcagtcatatttataaagttttatcaactagaacagaatgggatgcaagtgtgtgtctttgtcttaagtggaaagtttgagtttacttttaaatatgaattttgtgctgcccttagcagtgtagtccagttggagctataaataatcatggctttggctgggcacagtggctcatgtctgtaatcccagcactttgggaggccgaggtgggtggatcatgaggtcaggtgttcaagacaagcctggccaacatggtgaaaccccatctctactaaaaaatacaaaaaattagctgggcgtggtggcgggcacctgtaatcccagctactcgggaggctgaggcaggagaattgcctgaacccgggaggtggagcttgcagtgagccaagattgtgccactgcactccagcctggcgacagagcgagactccgtctcaaaaaaaaaacaaacaaacatggctttttattactgcttttttttcttgtttgttttcagggcaccctaggacactctttgcagtgtgtcctttaccagggtgatgctggctgttgacatccatgtttaccacaatgtcattagagcagagctgaggcactggttctctttgtagatcctttttcttcaaaataactaagaaatttgttttcattttgtttaggtatagactttttggtgacacaactttatttttgttgccctttcaaaagtgcactagccctaactgtccgatgtataaatgtgcttctgttaggcaaaccacagggaagctggaaaagaagcggccctggcagaagtggctgacgagaagatgcttagcgggctcacgaaggacctgcagaggaggtgcgggctggcaggcatgggggctttgttggggctcacctctctgagctgtccgcgtggcaggccttccacacacaacctgtttcctatgacatttatagtggctgttctgttttctctctgtgttgacagataatacagaccaacttttaaaaaggcgtttttctgtgtcagtgatcagagtgtaacaggagatattttatctcaaataagaaactagaaaaatctgcttataaaatgcatctgaaagatttgtttctcattagtttagtcattgcatgtgtgtattattcatacttgatgaacgagcttttgttctaacagttggcagtgacctaaatacttgcccctttctttccagcctgccccctgtcatggctcagaacctctccatacctctggcttttgcctgtctcctacatttagccaatgaaaaggtaggtaattaaggtaagcatgggagtattagagtattccctgtttatgtcaactcatttagctttgtatttgatctttcatgggctaacataggatttcttaaatacagtgacttatgtagcaccttcaacccaaatgattagccaggcatctagaagtaacttaggaaaaagccatcaggtttgattagcaatgaaaatagcacagaggacccaaatagtaagattttagatgatggaattgtgatcggtaagttccccagcctaagaacacgaggtgcttttacttcacggggtgtcaaagactttaaaggccaaagcctagtagtaccaaagtcaagacatatgggagacatggcagagagaagaggagagaaatgaggatgaaaagaaaacagttgcagaaagagaagagtactaaaatatggaggtaacagtcagaaaagtcaagctgtgtgtcacaaggaaggagaatcctgaagtgccagctgggtcagcgtggcagactcctgtgctaggccagccaacagctgcatagccatgggacagctgtggaaagagcagaggagggcactcattttctcaggagccgagtggtactacccagggataccacagagagggcagccagcagcaagcccacacatttgagcatcactgaacacttggtatccattagggtccccagccagctgatgcacagcccagcctttggcacgtgcagtagagggctatgggctgggccatggcgtgtgcggcaagcaccaccctggggctggggcaccatggccatggtgtgcaccaacactgtcaactccccaggaggagggggtgggcactggagtgcagttactatgtgaacgccgaaatgtggttttggagggtgattatgggaatggaatggtagcaaaaatggggtgctggtggaagcatccaggatttcctacatgccaacatttgacctctggcctcctaatgaaatcaggagcagtgaggattggctccattttccaggtctgactctgctttggagagaagttgccctggcctgtgtggcacagccatcagccaatcccagtgacctaccactggaagtcagagaccaatttttctcttgtcaataccttgcttagctgacaacctcatgaagaagaagaaactgtccagttagcagaagctagttttgattctgggtggggagcaggtgtagaagagccactgggccaggaccaagtgctgtatgtctccaactactgtgctgaccattgggcttgtaaccaccagtctgggtgttcaaacctgaggcctaagttgaagagcccagtgtagttcccaagaaggaatgattgtgcatcagagcccttgggaatggttttaacccaggaatgctgaacttgcatggctgctgttggggggcagtaaggcggtgaccggtgactgcggagagaggacatgccctgttcacaagcctgtgaaggcagacatgcccgtggttatgggaggtggtagttcctatacctgacacatcctaaagcatctgatatcacatgcaaactatatgaagaatgactaagaaaataaaaaataaattattatcattgttctgacaagaaatctacaagtggctctgctgaggatataccatctgaggtgggtggtgtgcaggccatccatctctctgacttgagaagtgtcgggggaggcctggaatctcattcgcacaccatcctggtggaaataggtgctggtgactctccaacatgggtgctggtctcctagcacatcaggctcctaggctggcctccaaagctcagaaacccttctgagtccaatttaagagtgttactgctttcgctcatcagccccagcctgaaggtcagagtgcttctctgggtggtgtgtctccacagaaacctgacttgagagagcggcttcatggccctcacttgtttcttaaggagtcaggccaggccaacactgctaagaaatattagtgactctgcggcttcactgaggtcgtgctgctccgactccagctctgcacccctgctctcagtggcagtgcaggcatgttcattttgctgtgatcaagtctctttttaagggtcccagagctcttggtgtttgaagaatggtgggtggctacagcccatgacttgttgggctgagcaccgaggccattactggggcctggctttgggctgtttgagaaaactgggcttgtaacattagccacaacagttactgttataatctacagggatctgtgataactcaacacttagagccaccaagagaaatattctcaacgcttcacagcagaacttgacctcctcttggacttctttctctccatctttcactcccgtctggagtctgttcctccaccactgtgataacagtctcccctcacatagccaggcagtgtgtggggcttaggagccagtgatggacgtgaggccctctgccttcatgtctctgcatgttagcagtgtgcaactaccagaacctgagctgcagaaaacccgcgaggtgtgacttgagcgttctgtctttagtggcaaggaaaggtgcgagtgactgttgagccctggcacatcccatctgcctccagtgcagagccagggcaggctggttgtggtgaagttcgtcaggaaaggtctcatagctgcttagtcctgagggaaacactgcctggggttggggaagagctgggaggtaggtagggaaaggcctgtgcagagactggcaggaggtcactgctgtcaggaactaatggagagatggggcagtggggtagttgaggggtgcctggaggaggtgcgcgtggatggggttaatacagtagtcccctagtttccatggatggggcattggggcagttgggggtgcctggaggaggcatgcatggttggggttaatatagtagccccctgtttccacaatttcactttccatggtttcagttacccacagtcacccatggtctgaaaatactaagtggaaatccagaaataaacagttcataagttttaagttgcaactcttctgagtagtgtgatgaaatgtcaccatgtcccgctccatcctgccccggatctgaaccgtccctgtgtccaacagatccacactgcagacgtggctctcccattagtcacttggtagccatctcagttcccaggtcaactgttggtggtactgcagtgcttgtgttccattccctcttatttgacttaatttttctattttattattagttattgttaatctcttactgtgcctaatttgtaaattaaacttgatcataagtatgtatgtataggaaaaaacaaggtatatttgtgtatacatatatataaaaatcatatatgtgtatttgatttggtactatatgagttcaggcatccaccgggggccttggaacacccctcgaggataaggggggacgactgactatatgtatgtgttgtggctcctcatgacctcccatctgcctccattagcatcttcagggcagacggctcagctcttaggccctttatagggggtgggttgcaggaatcagagccagagaaggcttgctttttgctttttcacctaagtcattttgttataacaaggattgggaatcaggtttttcatgcaaattatacttgctatgaaacagtttttcttataatcatgggacaaactttcttctttgtagtcactaccttgtgactgtgattggaatttatgattcttttattctccgtataccaaagtccatgcatgttttggtcttccctcagaatctaaaactggaaggaacagaggacctctctgatgttcttgtgaggcaaggagattgagttcactatggagaagtcagcagcaggaggcccatcccttactcagttgccgggacatccccagtctcgggggaagaagatgccatgggcttatacccaggctgtagccaactaccaacgtgcctgtttgtttgttgctctttccttctctccatcatagtctgggtgccagcgccctgaagctccgtgctcaactgattaaactttactgccctatggtgaccatctaggagaggggagggcagagggggtgagggtactattctggattgagaaaacctatatccattctttatatcaatgtatagttttagtctcctaaattgatctgttattttccaaactattctcttgtagaaaattttccagtgggcacttaatggtgcccttgaagaacttcctaatccatgtacataaaatacatcatatgtacacttataaatgtatatagaatgctcaaaaataaaattcttaataatagaactggcaaaatatttgagtgtccactagatgagtatcagacctagtccttacccttagggggatgcagtcctggttgttatccaggatacacacctgtcagtataaggcagaagatgcctaagggccaagatggtttgcctcggaggagaatggaagagagagattgctgactggacattcagatgcaagactgggtcctgcttaaatcccaggattctgctggagggagctgatagtgatacttgtcccttctgtacattgcttcatgtagccttctcagcatccctaggagaaacttactattgtgactctcatgttggaggaggaaacggacacccaaggtagaggaacttgcaaaagggcagccggcaaactgtcaggggtggcctgagcctggcaatctgcctccagagtctgctctcggccattgtgctatgtgctacctggataggtcatacaggctcagcagtgggtggagagcagtgctcagatttgtccatctccacagaatgcagcacacacacaaatgtacaagttcttcccctaacctcagaggaataggggaattaactttgcttgcaatttggaacaatattatagatgttgatccaagtagttctgttactggctggtcctggatctctgccagaacacccgtcatcattgactggctaaatagagatcttggatataggccagaagcagtgaagtatataattggaaattgctcctgataataacttccttcttagccaaaaaccacacaaaacaaaaataatcccctccccacaggaatatgctttccaaattgtgtccaaaacattacctgctctgttatattgagaaggttagagacttcagagcatgcttagaaaaagcagtggtgccacaggtgagactccacactctgtcttgctggggctgaagcctccatcactttcccaggccaggttagtgctgggcttcttgctttccttctattcctgagagtagaactggctaagcccattccttccctcagtcagccccacttctctatagtgggttctgggggtggggggctgaattaccagtaaaactagaaagattgggaccaagtgcagtggcccacacctgtaaatcctagcgctttgaaaggaagaggcaggaggattgcttgaagtcaggagttcaagaccagcctgggcaaaatagaaccccatctttaaaaaaaaagtttaaaaattagccaggtacggaggtgtgtgcctgtaatcccagctactcagaaggctgaggtgggataatcacttgagcccaggagtttgaggctgcagtgagctgtgatcacactactgcattccagccaggacaacagagtgagatcctatctcttaaacaaaaaaaaaaactggcgagttcaataccaacttctacaatgaaatccccttccccccacaaccctgcttctcctaagtttccctcattacatggttgctgtgggctatgtgtgctgtggtctgaatgtttgtgtctaaaattcacatgttggtattaagagatagggcctttgggaggtgattaggttatgagggcagatccctcgtgaatgggattagtgctcttataaaagaggcctgaggaagcttgttcgttcctcttgcccttctgccatgtaaggatgcaatgagaaggcaccatctgtgagcaaggagcccctcac

SEQ ID NO: 12 - DNA, 18241 bp, Homo sapiens
ggggtggggggacaacaaacattcagaccatagaaatacgtaaatataagaaacaaaaccaaaaagacttatgtgcaataccaactgatcttttcttttccttccaaaatggagtttaccaaaatacaaatatgaagtttttcagagcacataccttcccctgctctcctctgcagtttttttttttttaataccacctctagggtagttttcctaaaatatggttccaaggctgtgtgtacctctcctgctcagatcctttggaacagtgttcagcgctcatcaggattctgactgtaaactcccttctctgactttaacatcacaggatgcagtactccctacattctaccatggggggcaccctgaattacctgggttgactttctggcctctgtgctctacttatacaatttcctctgtatggaaggcccactccagaatcctttccccagcctttgttcaaatgtcacttctgctagcattagcagtttcctcctctgggttctcacattgccctgtaacataagttacaaggtaagtaccagaagagaattcccaattatcatcctgctcccctaccctcaacacctccagcggtaactgtatcttattcatttttgtgtctatgaagcacagtgttgcactttggagatactacatagaagttggcccaaagggtaataaactgtatttgccaagatgatagcatggatttacaataacctctgaaactttataaagaaagatgattgagttaaattgatacacctagcatcacagctgtggaagcttgtggtcttctttatgttaaaggtaaaatggatataatgaattagttgccatttttagatgatatagaagttgaattcctcttaagcctctcaaagagaaagacatattaaaattcattaaaaccagtaccataaactgcacagaacagcctggttccctagagcacttctctggggcagtgagttttcatttaaaaaatgaagtttggattttaaacataagttttaaaagtgattaggctccagcaggagttcttaaattcctacctacaccatgactcccaaatgctctgcctctgttgcctaggaacaaaaattgtcaaggttgagccagatgcaatgtataacaccagatgatagatgcagctcattgtgttaaaaggtgttaaacacttaagtgcatgtgatatactctatatcacaagggtaaggaagttccattccatatcctgatttgggtcttctaatacatacttgtagtggatgtggtaatcagtctttgttctatgtcccattaggatcaatgcaaccagaaatccttaaaatggatttttattatgtctagctctgttttactgttctatttgtttattttaaaaagattttagaatggtgtttaggttgggctggtggctcacgcctgtaatctcagcactttgggaggccaaggcaggaggattgctggagcctaggagttggagaccagctagggcaacataaggagacattgtctccgcaaacaaacagaaaaaaaaaaagtaagaaagaaagagagaaagaaggaaagaacaagaaaaaggaaaaaaaaattaactgcagtaagtgcagaaatctctctcaaggatatgatggatggcaatgaagacagagtttttgacactggattatttaaagcataatttaagcctctttctctcccctcatagaattgtgaatttttgtgttttaattatatttaagccaggcgtggtggcgagtgcctgtagtcgcagctgcgctggaggctgaggccgattgcttgagcccaggatttggaggccagcatgcgcaacataatgagacccagtctctaaatgcatgcctctctctatatatttaaaattctgatgtgaaaatattttaaaatttaatacatttcaaatgtttttaattgtataataaacaaaatgtaaataataaaataatttaatattaaattcaaaaatgaggtagaaacaaagcacagcgatataaataataaattttcctttacatttttgaggcggtcttttgagttttccatttccttcttaaggtcactgaaatgtgctccttggagccagcccgcaaatcacgcatttagaaaaacataactatacactcctaaccctaagtattagaagtgaaagtaatggaatctcgatgtaaacacaatatcacttttttgatgagctattttgagtataataaatttgaactgtgccaatgctgggagaaaaaatttaaaagaagaacggagcgaacagtagcttcctgctccgctgactagaaacagtaggacgacactctcccgactggaggagagcgcttgcgctcgcactcagttggcgcccgccctcctgctttttctctagccgccctttcctctttctttcgcgctctagccacccgggaaggcctgcccagcgtagctgggctctgattggctgctttgaaagtctacgggctacccgattggtgaatccggggccctttagcgcggtgagtttgaaactgctcgcacttggcttcaaagctggctcttggaaattgagcggagagcgacgcggttgttgtagctgccgctgcggccgccgcggaataataagccgggtacagtggctggggtcagggtcgtgtctaggggacggccgagggcctcggagggcgagtattgaggaacggggtcctctaagaaggccggactggaggtcagggatctgcgcggggcccggctgggcctcggggggcggtgggcagggccttcgcctgggtctggccgtgtgagccacactgggctggctttagagggaggctatgggagcccagcctggcggggttaggcggcgtgggggtgggggttcggggctgcagtcatgagtcgaggtcggctgttctcaggaactgcctgaagaggctttcgggtcttgattgaagcaaaatccgctcccccacgctgagcgcctgcggagtagcaggctctttcctgggcccggcccctgcgcgccctgccatcccgcctcgggggtgggaaagtgggaccgcacctgggccaggtacaggcgcgggtccctagagccaggccgccctgagaaaccgatcctggaactcgtgggccttcttgggcttgctctgcccacggccccggcccacctggagctgttaagaacagtcagcccaggcacttaactctcatgagcagtgtagtgcagtttttttcatttaaaaagatacatctctgcttctttctggattgatttttctttgaagatgaatgtgagaaatagaacttaaaggtctattctgagtgtgctttataaatgattttatcatcagtgatgggtgttagaaaaatctaggtaattatgcctggagttctgacgtttcattggcaaacttcagaggaagtcttgaacttctggttgtcagcttttttttttaacccattcattgtgattcaagtataccgtttttctgcttagtccttgacattgtttaggttataattagaattttatctgtggaattgcacttttcattcttttgttttacggtgcttaagtgatatttcctactcttggaaaaagtaccttgaaagtcttgagcatgtttgtctgtgacctcagcaagcagaggaaaaagattaaaattgtcacgtgggcaactgtaaacacttaaaatgtttttgtcgttttaaacaaaattttcctaatgaacagtctgaacacattttagttctgtcctcataactttaaaaaataatgttttgaataaaattaggagtatcataaagcggtataaatttgttgaaatatttgggtataactttggcacacgcaggtactactttaaagtgtcacaaaaagggaacataattctggtttttgtttggaaagaatagacaagttgatacctgaatttgagggttattttgattggaagaagctaaatactacactagtatagaatatacacgtttccaatgtctcaggagtcaagaaggatggaaagttattgtaggagtccttacccttgtaaatattgtttgaatgtaattaatatttatggaatacttatgctgcagtaggcactgtggaaaatgctttacatatagtgtttcattaatgcttaaaactactcgagttagtggcatgtaattaagtcagtttttccttcactttaggatctaccatacccattgactaactatggaagattataccaaaatagagaaaattggagaaggtgagtggttttagtaaaataaattttatggaatgatttaacaatgctacaacttctgtaatatgaacacatttaaatatttattaaaattcaaccattaagttgtcttgtagtaccagtgtgcattaacatatgttctttacttaataaacgcaaatttgctcacatttcaagagaattgaaattaccgaatccctaatgaccgttcgcctcacccccatagtcttacagtcttctgatactaaacacttatagtagtacttgtattttgaagacactattgataacttgcatgtgtgttgaggggcagaggttagggctgcagaattatgctaacttcataatatatttttagttttagtctctttcaattgtttttaggatgataaatatttttatccagactttatagactggttacaataattgacttaatctaatttaaataaaatttctatttagttaccctaagtataaatgacctgtcatatagacatgtttaagctattctaaaattataacttatgtatataatccttccctttctgtggtacttgaaggaatgtttagatctatatatggcacaaatgaggggtatatcccttcgcctgttcctcgactccagcagaacattctcgattctccaggtacaaaataatttgctaatagaatccagtttatataggttctgccagaagaaaattcccaactatatttttaatgtgatcaaagaccccacttgacaagaaatagtgaaaaacaagggggaatactggagggaatttagtggaataggagtgacaagttagtgtggtgttcgattggaggtgtgtgtgtgtatacatatatatatatattttttttttaaatcacttaaatacctcatacccattctactaaacaaattttgctgctgaattaaaaatatgtgattagtatgtctaatgctgtgtagtgtgtttcttaaattcccagagaatttgtgttggttttagtttggcataaaaagagaccttcttaaagtataaatatatttttctttaagatgatagaactccaaacatacaggagactgcagatttgacttctgagaaaagtactttaattgctactagaaataggagcagttaaaagaatgtaattttaaatttaatccattacatacatgtaagtcataagacttccattctttatttctagcagtgtgacagtggtaaaccctcttaacttttctggatctcagtttctgcctctgcaaatggtgataattggacttaacacgaaagatatgattcaattgaacaatattatggaaagcatttgttatgagcgctttaactcagaaaaccttcaaatgtttatcatttgaacattgtattattactatgaacactgtctccaaaaccatctcttcaccagctccatctaatgccacttaactcttaatttggatttctttgatgtcctcaaatgtatcctgtgatttggcctatgagttttggcaatggctgttctttctacctggaggccagtttctactggcttcattttttatctcctcctctagtccaagagcattttgtagttccctttgcatcataccataggatccttgagggctggggtttttgtcttgttcacaactgtttgcccactgcctatcagtagtgcccaacccacaggagatagccaaatagataataataacatctgttttccttgtttgctcttctgaacactgttgtttctttttctggcttgtattgtcatttctactccaatgcctgattgttttggattatgtgctggatattgttttggaaaaaggaacttgtggaaataaatggaggcctaaatgattcacacagaattttcttttggttctgccaggtatctggttaaagtctagtattaaaatactactttaaaagttatattttttcccctcaacttttcattttgaacatctccaaatctatattgaaagatttatgcaatgaacttgtaatatttttaccaagatgttggtgttttgtcatgtttactttattatctgtatgtatgttagcattattttttatttttttcattgacattaattctgatttagaacagtctctgccttttctctcacttgacagtgagtcttgacaacctaattcatttcttaaatacctccagactttactattttaaatattacaaaaattgttctctggtttcttctgaattacagaaatctgagtgttgtgatactaatctttgaaatccttcctgtcttaagaaaatgtctttttggatcatagagtagcagtatccatgatggtggaaccttgcctggcatttagtaggcatttgataaatacttgcttaatgaaggttttctgcttaagggcctccataacttgatcatatcctacatatttttcttttgtttctttttgtttcctgggataaatcttccattagacttagactgatctccttctaggcttacctgtgttaatgatttttgcctccttagttatttatacttagttaaataccctagagtatttctgtctttagaattcttagttcattttggaggatatgccatgtatttcaaaaataattttggatgattaaccaatagaaagttctgctttgtttaacccctcttccagtagttcagtgagaagtgatattatctctaaaattcaacacattgagtgttggccactggttaattgttaattctgaaaattatttaggattagatgagattgtacacttgagggagaagaaaggatgctagaaaaaaaattagttctgaacttaccattaactgtttatgtgactgtattatgcaagtgactaattttcctgagatcacttaaacagtatgccagatgattgtgctactggtttacctactttttgtgtttaatgagagctgaatttacatccaaaaaaatgtagattttaagtatatgaaggttgcctacttttaaggatggctgtgaggattaaatatagtcaattctcctttaatgtagagtaattttggttatcaaaaagttatacattaatccacaatttaatcaaaatagtataaaatgactcatgtcagtttatagttttaaaatgacaccagtatttaagaaaacatagacttttgtatagaggttctgtcaaaaaaattaagcttaagtagcatcaatttgctactgctcaaactgcttaattttttaaccaagcagttggtaatttgttggttgttagccttttttaaaatattgctactttcagagaaactcataaaagctatagaagaggccttcttcctagaacagtgcactctaatcacttttgaagttaaaccaatgccatggaaagcaagctattcaacaaaattttgtgtgtacttaaggggttcaggacctccctaaactccaactcgagtttaaaaagacttatctagggaattcagccacgtatatgacagattttagctagtcttctcccttattgccatttcattccctgtatccacctcctccctccctgctatcccttataattgatattgttgctcattacctgaagcccatatatcaaaatcagtattttcatcaacttgcaaatgggtgtgaggctttcctaatatgtagtacatacaatgtgctttattaggtttaatacacaaacacctggtcttttttctccattcttttgagaatgaggactgttgactgtattttgagatacagataaaagtgttttgaaaagcataaagcactctacagtattttctgaaagtgtcataatgacttttatcagtaatatttcctgagcccaaatttttacactatattttatgcccacttcgttgcagggtaggatattgacagaaggttaattttaatttgcaaatgatctattttgttctgtaaaatatgctggaacattaatggtaatttagatgtatagaaaacttgtgatgactacatgaattttatttttaagccatacagattgtagttactctcaatttctttttggaagcaatgagggtatgagtaagatacttcccatatggccacaccagacatttctatcatgtgacccttatgggattcaatgatcttgaaatcctttagtttgaccaggtgcggtggctcacgcctgtaatctcagcattttggggcggcgaggcaggtagattgcttgagctcacgagttccagactggcctgggcaacatggtgaaaccccatctctaccaaaaagacaaaaattagccgagtgtggtggcatgtgcctgtagtcccagctacttgggaggctgccgtgggaggatcccctgagcccaggaggaggaggttgtagtgagccttgattgacccactgcactccaacctggacaagaaaacaagaccctgccataaggaaaaaaaaaaagaaaaaaagatctttagtttgtggggtgtgtcacacagcatattatttactttgtttcaggtacctatggagttgtgtataagggtagacacaaaactacaggtcaagtggtagccatgaaaaaaatcagactagaaagtgaagaggaaggggttcctagtactgcaattcgggaaatttctctattaaaggaacttcgtcatccaaatatagtcaggtatgttgtaatatctgaatgtaagccattttctgcatgctatttcaaatataaatttcaacttggaaatctttacatttgctcaatttcttggtctagccttactgagtggactagaaccctatttttggtagttgagaatgccgcacatatgtaaaagagaacaggctgttaaagcaggaacagagttggaggagctgggtgatgtagattaatatttgggcctagaatagcaaggtaaattggccatgggagtaaagccgttttcatagagctttgtcaactctctcctacttggggagctctagttcctgaagaccctttagttagagtcttaagaaaagtagctaggtcaaatgaaaaagattttttttccttaaagtatttgcattgggtgtttttggagacctgtcttcctaacagtccaagttaaaatctaattgtacttggctggggctagagattggaagtagcttttaaggtcagataccactttaaaatttatttgtataattcacttcagtgaaaaaataagctctcagcaattagtagccaacctagatatgttcttttgaatacaggctccttataaataagcacctcctgtacaaggcttaattttaaatagttgccctgagattcctttcttaaatttgagttttgagtctcttccattagggaagctactacgtcttccccagtttttattatagcaactgaaattatggaaggagttttattttgtgaaacagaggtcaaaaatgtttgctggattcttctctcatatattttttttccccagtcttcaggatgtgcttatgcaggattccaggttatatctcatctttgagtttctttccatggatctgaagaaatacttggattctatccctcctggtcagtacatggattcttcacttgttaaggtaaaagcttaactaattttattaatatttatgcactgtggatataaagggactatatatagaagtccctgcattttgtgggaatatgcttggaaaaagtgttagaataagaaaaagtatttcatttttctccctcatggttagtttatacaggttagagatacccatgttattaccagatagtgtttctagtaagtaaaaattagtgcctgagataacatagaactggtaggtattgttggaagctagggtagtctggtctttctttggctgtcagatacatgtaaaacaaagtaatgaaagcctagggcagagtggtggttgtaggtgttttattccagttttgaacatgttttggtcaatttattgtagacatttattatatttcaggtaaattataaaattgtatagttttaagtactgaagtatataaaagtgtcttattcttgcaccagttctaccaaaccactctgcagaggtagcgctgttagttttatttgtaatcttacacttgtatgtatgttcactttgtatgtatataaagatttttttttttacacaaggtggacttatttgcatatgtatatatacatattttcccttttttgtgtaaaacattatcaagacgtagatctacctatgtctatttacatttttgatataattaaaccacttccatattgatgaacatttaaattattttccaacttggttattgttgctcttattaacagtactgcactgaatgtccttatagatatttatcttcgtatgcaactttataggataaatttttagaatgggaatgatggattgaagatgtttatttacattttgatagatattgccggttgccccctaaaaaacttgtagcaatttactcttaaatactcatggtgtgtaatacttattgttttagtacatcattgccaaaacttggttttatcaatctgttaactatgtgaaaaaggcatattaagattgttttaattttatatttcatgacaatttaacacttcatatttagctattataaaccgcctatattttcgttaggatacgttctttaacaatcttgcatgacttttggactttctgcttttatgtcttgcttaagtcttcctcactcaaagatcgaatgtattagaataatacatgtcagtatttttctggtagttttagtaagtcctgtcttccacacatactttttttgtcttaaattctgtattaagatttattttgacttaaaaactgggatacagattctgctttatctttttccaaatggctagccagttgttctaactggttttatgtacaggcaacaatggttttacttacaatttttcagttttacaatgaagcagaaatgatgcacattcactagaaaccatacttcatttacccatacaaccattctgttttttcactttcagtacagtattcaataaataatgaggtattcaacacttccaactatatgctaatgtaagtgttttgagcacaattaaggtgggctacgcttagctacgtttggtaggttaggtgtgttcaatgcatttcgacaaggtattttcagcttagaatgagtttaaccagatggatcatccgttttgttttgttttttgaacaccacttgtccctctaagatggagcatctgtattactttccaatttcaaactgtaagtcatttttctgtgtactttgtttttgtaatatccatgctacttcagatgtcaatgacattgtctttggcaacaaatgtcttgtaaagcacttttctctgaactaagcagcattttatgataattttatccattgaaatatataatcataatatctttgccatcacttttagaatctaattttttcaagaaggaaatgaatatgtaaaaatgaaagatagaaaaggccaactgtattgaagatacaaaatagagttggtagcggtatatagaagaaaaatcaagaggcttctgtgtagaaaaccaatttgtaatttaaggatcggggaccaaaaatgtttaaagactaaatgtgttcacattactatagatatgtctataaggtgaagattcttttcttaggtatacaaatgtgatgttgtatataaatgggcttcccacccacaaatgcttattagcctaaaatggcctgaaagctctagtaattaaattatttctctgcgtcctaattttttgtctttgaaacagattatttagaaaatcatgtacttcgcttaagtttctaacttttacttgctttttccagagttatttataccaaatcctacaggggattgtgttttgtcactctagaagagttcttcacagagacttaaaacctcaaaatctcttgattgatgacaaaggaacaattaaactggctgattttggccttgccagagcttttggaatacctatcagagtatatacacatgaggcaagtggaatagtggtttttgatggcttttgaatgtgtgtgattgctagattattttctgtatttgtgaaagtcaagaaataactcaataaaagatatctactctgtggcagtatcaatttattgcctctcagctccaaattcattgcatgctatgtgaaaatggaactgaagcctttaagtattttttctttaccagctgctatgttgttaaggtagagggtactagagggacatggcaggaggaaggagttttcctagctacagtttttacattttcattattttttactttatttatttacatcattcccatcctttgttgtactttaattctttatattaaactctccccattcaaatcaccaccttggtttctgtctcctgactgaaccctccctgattatagtcagattgattcaaagacaggttttgttccttaaggtatattatttctgatacatttaggaattgctaactataatttatgtttgatctgtgttatattgctgacttggcatttagtgtttctgaaggaaagggaacattgtataataaaggattattgaaaggctgtcttctgtggagttgtctacccttgacccaaagactgtctccagatcaaaactagtaacagtgctcatctgattagatgtcttggctgcttgttagtctttatcatttttttacatggctatataaataaactaagattattttgttttctttgtcttaaacaaatgctattgacctcattagctttgttctaacaggcaatatttttaccatatgataaatatactaaaatggttggttagttctagatcactaatctgttatttgacttattcacgttttttaaataatttaaaaatcattttttatcgacgcattattatacatatttatggggtacagtgtggtatttggatacatgtatgcaatgtgtattgattaaattggggtagttagcatatccattgccccaagcatttattatttctttttgttgggaacattcaaaattctttgtttgggctatttgaaaatttacagtaaattattggtaactgtagtcagcttacagtgctgtagaacactagagcttatttttccttttgagctgtaattgtatccataaaccaacttatctctgtcttcctctactaagccctgaataaccactattccactctatggccattagatcaactttttacgttttcaaatatgagtgaaaacatgtggtatttatccttctgtgcctggcttatttcatggctcatccttgttgtcataaatgacagaatttcattctttttttatggctgagtagtattctagtattccattgcgtgcacgtatgtgtgtgtacactacattttctgtatgtgtgtatgtatacaccacattatctgttgatggaaacaggtcgattctgtatcttgactattgtgaatagtgcttcaataaacatgggagtgcagatatctctttgacataattgattttatttattttggacatatacccccagcagtgggattgcaaaattatatggtagttctagtttgtagttttttgagcatcctctaaacagtttttcataatggctctactaatttaagagcccaccaacagtgcgtaaaaagttgccctttctctgcatccttatcagcacttattttttgtcttttgatgataattactctaactgggtgtgatagctcattgtggttttgatttgcatttccctgatgaatagtgatgttgagcactttttcatatacttgctggtctttgtatgtcttttgagaaagttttattcagattgtttgaccatttttaaaattggattcttactattttttttattctggatgttaattctttgttgtatgaatgatttgcaaataatttctcccattctgcagattgttgcattattctgttattctgttcattctgtttcttttgctgtgcagaagctttttagttcgatataatcctgtttgtctatttgttattgctgagacagggtctttctctgtcacccatgctggaatgcagtggcgtgaacagggctcactgcaacctcaacctcctgggctccagtgatccttccacgtcagcctcctgagtaattgggcccatacacaggcatgcaccaccatgctaggctgatttttaaattttttagagacggggctgtcagcatatttcccagactgttctcgaactcctgggctcatgcaatcctcccgctttggcctcccaaagtgttgggattataggcatgagctgctgcacctggcctcatttgtctatttttgattttgtttcttgagcttttgaggtcttatccatatgatttttgtccagatcaatatcaataacagtgtttcctctgttttcttccaatagtttcatagtttaaggtcttatttaatccattttgagttgatttttgtgtatggttagatataggggtttagtttcattgttctgcatgtggattatccagtttttccagcaccatttattgaagagattggcttttccctagtgaatgttcttgtcatctttctcaaaaatgagttgactgtaaatacatggatttatttctggattctctattttgttctgttggtctctgcgtccttttttatactaatatcatgatgtttcggttactatagctttgtaatacatttttgaagtcaggtgatacgatgccttcagctttgttgtttttgctcaagattggtttagctattgtgggtcttttttggttctatatgaattttaggatttctttttatttctgtgaagaatgtccttggtattttgatggagattgcactgaatttgtagattgcattgggtggtaatatggtcatttttatattaattcttccagttcatgaacatgggatgtcttttttgtatcttcctaaatttttttcttcaatgttttatagtttttagtgtagagattatacatctcatttgttaaatttattcctaggttttttgtacctattgtacattagattgctttcttgatgttatttttcagctagttattggtgtatagaaactattaatttttgtatgctgattttgattttgtatactgcaactttgttaatcagttctaagagtttttggtggagtcttttaagtttttctatatataagatcatctctgcacacagggacaatttgacttcttccttggcaatttggatgccctttatttctttctcatgtttcttattcatgttataatggtactgttagtaccatcttagcaagtaagcagtacctgcactttgttcagtgtcaccccaaatctattatcaatgggtttggtttttcagtggggggaagataaggctgtataactgtcttgatctttagtgatttgaaaagcaaaaaaatatttattatgcttttatctgttttgtcttctaatgaatagaacttagaaatgaaatatttatcttcaattttgtgtacctttaattgacttaaacaatattattggtggcagtcatacaacctttaaaggacagccctaataaaaatataaatgtttaagtgtaggtaattttatgcaccacatttattcattgtaaaaatttgctttttaataggtagtaacactctggtacagatctccagaagtattgctggggtcagctcgttactcaactccagttgacatttggagtataggcaccatatttgctgaactagcaactaagaaaccacttttccatggggattcagaaattgatcaactcttcaggattttcaggtagctattaaaaactgagataataaaggtaacatatatgtaacaatgagattacatttatgctttaagaaatttttaatttcctgttttttagagctttgggcactcccaataatgaagtgtggccagaagtggaatctttacaggactataagaatacatttcccaaatggaaaccaggaagcctagcatcccatgtcaaaaacttggatgaaaatggcttggatttgctctcggtaaggagtgcccttgatactgactttcaaattattgatgattctgaatatattcagttctttgttttgcctagaaaataggaagaacactaacatttttgagctaggtgtctgttatgtacattgtattatactagcttcattttagatatcaggaggcactagtggctttgagaggaggatttagcattagtttttgttttttatctgacaggtagctatggatattctgagggagaagccaggattaatacacatttttttttttaagttgctgaattgtagtggctctcctttctagcatttttgtcactattgagccctcttagtttatgctagacgtgtttttcttattggttgatattttaaattattaaagccatcttctgaataagctttattcgcactttgtacctagtttctccatcagaaggatctattgctataccattgtatacattttctcattggtcttcgggttactttcagagtgtaaagactccttatgccacaaaattaagcttagatttcccccaaatcaaatactataaatcagattccttagtctagccacaattgacatatcttggagtggataaatctttgttgctggcattgttctgtgcatcataacttgtttagtggcatgtcatcactgtcttctactctctagatgccattagtatactcttcacagttaggacaaccaaaagtgtctccagatattgccaaatgtctcctgatgggcaaagtctatcccagttgcgaaccattattgtaaattaaacttggtttcaaatttgagctttattccttagctctgggaacttgggcaagttacttcccttcgagcctcaatgtcctcatttgtaaaatgacattaatacctacttttagctgtgggaattgagtaccatgatttatacaaagcagtttgtatggtgctggttacatgagagttcagatggtaactagttagtaaaaaatctctagtgtgcttgttgattttattttattttagtatttcttaaagatcaaatttaacatcaatcctaaactttatttagctttttctggcgcgtaaactaacatactaagttgtgtgactataattcatttagtgactcatttttagctatttttataacacattgtgctatggggggttttggaacttgctggaagctacatcagaaactgccatagttaattgccatttcaagaatgttgtaaataactcaggtggccgtttaattctcaatgtaaatataattaactagacgtctttcctatatttgtgtctcagttttaaagctatttctggatgcttgagtcttaccgtaattgataacaaaaagaggttattgagaatatctatgatttacagagtaagttattctagacctcaagagtgaaatgtaggggaggagacatttgtgtgttaaactaatggaaatgctcatttaatagatattcactgaaagtattagttttggtttattgctagaaaagttgaggttttatggagatttttgtaaaaaatggtttatttcctaaataaatatctctttttcttttttctcccagaaaatgttaatctatgatccagccaaacgaatttctggcaaaatggcactgaatcatccatattttaatgatttggacaatcagattaagaagatgtagctttctgacaaaaagtttccatatgttatatcaacagatagttgtgtttttattgttaactcttgtctatttttgtcttatatatatttctttgttatcaaacttcagctgtacttcgtcttctaatttcaaaaatataacttaaaaatgtaaatattctatatgaatttaaatataattctgtaaatgtg

SEQ ID NO: 13 - DNA, 16677 bp, Homo sapiens
gagcgaaaaccaacgtgttcggtgacagaccccagcgccgactgagcctctaaagcgacttcagctctgccccaccaacaccaccgcgcgcccgggaacagccgctccgggaagaaacctgaggggactgcggggggcacgagggacagctgagggaagggaggacgcgagagaaacagcgcaagcacgctgagggccgggggttgccaggagaggggcccgcggacccgcagagcggaggaaggtccgggagaaaaggggcgggacggaggagaatccgggatcgcctggcagaaaaagagaagggagtttctgaatcctgggaagaggaggcgtgggtagggatgcttagcccgagatccgacagcagggaaccggagcgctccgggggaggggcttaatgctggggaagggatgtcttaaaagaggagaagctttaaattagacgatcggagaaggctgagggaattgctatgaaggggcgggagctgaagtgtagaggactcctttagacagcagaaagggaaagccgttgagaagttcccttcaaactccacctgcctcctctccaattcaaactccactcccttctccaaaagttaaaaggaaagccaagtttgccacgctcccctgttcctactcaataaatacttcttctactccgccaccgggaaaacagaaaaaaaaaactaatttccttcccaatattaggacttagaaaagctctaggtcccgcaacttgaattttagcctaggggaatcaaaatagtaggagcattactcttgtttcctttttcaaaatcccacacctcatccttcctgcgacgccatgtctaccaacatttgtagtttcaaggacaggtgcgtgtccatcctgtgttgcaaattctgtaaacaagtgctcagctctaggggaatgaaggctgttttgctggctgatactgaaatagaccttttctctacagacatccctcctaccaagtaagtcatgctagtggcgggcaacggtagcttttaactaaatgggaacacttatggcttggatctgtgggagtcaacaaggaggttatcatttcggtgtttcagccactcccaccagtttgatgatccccttggaatatatctaagtgggcagactgtctggacaaagtctgtggtttagccaaggtggtcagtcctgatgtaatgcttctagttcaattgcagtcatgcgaccacacatctcttaagtttgatccctggttcagtgccctgcccaaccatcctatttcactgaatcaagtccgtggcgtagactttaggtaaattcaggcaaaattttctgtactgttggagaggagaggtcatttaagtttttcatttttatccatgaaattttgcaccaaaaaaaaaaaaatccgttttctatcattatttgcaattggcatcctaaatcagatccgttgttcatcaaattcagttttctttcctcaaaactctctctctctgaaagagatgtaaatagatttttatgggatgaaaaatagagacttagccttaatccttatctccaataaagactattttggacattacacatttgttcccataattgaacccttttaaaatctgtttgttttcagccactaactgcttttgggtgtagagtccttaagaatttgcttcctatttggtaaaatagccattttattttactcaaataaacctctttctagctctaaatggtactttccctttccataatcaacatatatatgccctacatgaatcttcaaaatttagttatttattgaaattttattattaaaaggaaagtaattatccaaaatatgagtggacagttattctctaagtctttggatatagagccagaggaagcaggttaataaccacaattcattttaaatgaatttcatgataatgatagaaactttacaagttttttgatttacccaggtaaagctgtgtactcttcctttcttgaaatcttttctgaattggtctaagtgtaatcatgtctaacagcaaagccaaaggctctcatttattgcagagataaatgtgttattttaaaatctttttaatttttttaaattctaagttaatattttacatttgtgtgtgtgtacatcgtatatgtatttcaaaaaagggaaaacactagaaaataaatcatagaacctactgttacaaagttctgtgattcattgtccactgctttttctttttagtagctcatacacaaatctaaaatattaacccattcatctttgcaatagctatggtaagtaatagggcagtcataaggaaggctaggtgaattgttacaggttagacccaagtctagaatagaatcatgtttttcctattttctacccttctttgtaggggttaaaataataatgaattagcgtgctaagatgtatgtgaatcaatgaacacataaaaatttttttaatggaaaatttgtcagatgtttatgttgagctcacaaatatgaactgactctttaaaaatatactatagttctatgttagctttcagctctttggattgacaaaatttgtgctaaatcaagcgtagaattactatctgatccagcagttctgggtacatatccaaaagaattcaaaactggatcttggaagagatatttgcacacccatgttcattaacagcattattcacaatagccaagaggtggaagcaatccaaatgtccattgattctacagatgaacagataaacaaaatgtggtatagggcgcctatagttccacctactcaggaaactctggtaggagggtcacttaaacccaggagattcattacacagcaatgtgattatatttaacacatctgctctgcacacataaaacttgttaagttggtaaattttgttaattttttgccacaattaaattttttgtaaagtacatctgactgtctttttatacctttctctctccagcgcagtggacttcactggaagatgctatttcaccaaaatctgcaaatgtaaactgaaggacatcgcatgtttaaaatggtaatttgtggcactattctggatagctctgggtttggaagatggatattgacaccaaagcatagagaaaggttcagtgggctgcaacaaggactggtataaagcatgcaatgagccattgaaaaattacttattacttagagctattttttaaaagggttttctgatgcttcacattagtatataattttacagttttcaaagtgtattcacagtatccgcttcaattttcagaacaaggcaatgtaggttaggggggagaaacacctggatttacaataataaaaaccatgtttgaggtctgaccctacccttactctctatgtgatcttgagtgaactcctttagcctctaaactgctgaacctctgttttcttatttaatttctaggttattactcctttctttgtttttagaggggtctcatactgttgctcaggctggagtgcagtggcatgatcatagctcactgtagccttgaactcctgggctcaagtgattctcctacctcagcctcctgagtagctgggactacaggcaggcaccaccaggcctggctaagttttttatttttgtagcaatagggtcttgctctgttgcccaggctgatctcaaactcctggcctcaagtgatcctctctcctcagcttcccaaaaggctgggattacaggtatgagccactgcatcctaccttaatttctttctttctttctttttttgagaaggagtttttgctcttgttgccaaggctggagtgcaatggcgcgatctaagctcaccacaacctccacctcccaggttcaagtgattctcctgcctcagcctcctgagtagctgggattacatgcacgcaccaccatgcccagctaattttttttttttttttttttagtagagacaggatttctccatgttggtcaggctgctcttgaactcccaacctcaggtgatccgcctgcctcggcctgccaaagtgctgggattacaggcatgagccaccccacccagccattctgtcttattaagatagaaatttaataatcttctgtgtttaccttatcaagttattataaagagcaaatatgaatgttaaagtgctcaataaactataaattacaacagctgagagctattactataatcttttgagaagtagacgtgttattattttcattttaggaggataaaagttgaaattttctcatttagatggggtttgtatttagaaggggtttgtattataaatgacaatcctaataatttaaattggcaagctcttcttatgtgctatttgatttcattcctttatttaagctatacttgtattgaggaactagtatgtggtagtcattgttacaagggctggaaatacaacaaaaactagatgaagtcactggcctttggacattattttcttctttcttctttttttttttttttttaagacggagttttgctctgtcgcccaggctagagtgcagtggcacgatctcagcttactgcaacctccgcctcccaggttcaagcgaatctcctgcctcagcctcctgagtagctgagactacaggcacgcaccaccatgcccagctaatttttcatattttagtagagacagggtttcaccgtgttgcccaggctgctctcaaactcctgagctcaggcagaccacctgccttggcctccctaagtgctaggattacaggcgtgagccaccgcacccagcccacacggctaatttttgtatttttagtagagacgggatttcgccatgttagccaggctggtctcaaactcctgacctcaagtaatccacctgcctcggcctcccaaagtgtgagattacaggtgtgagccaccgcacctgggcaacgacattttttttgttttgttttgagacggagtcttgctctgttgcccaggctggagtgcaatggcatgatcttggctcactgcaacctccgtcttctgggttcaagtgattctctcacctctgcctcccgagtagctgggactacaggcacgtgccaccatgcccagttaattttcgtatttttagtagaggtggggtttcgccatgttggccaggctggtctcgaactcctgacctcaagtgatccacccgcctcagcctcccaaagtgctgggattacaggcatgagccaccgcacccgaagaacaacattttcaaaagaaaaccaaaacaggaaagttaattttaatcatatattttgtctaacccaatgtatccaaaatattatttcaacatgtaaccaacataaactactaatgtaatattttatattccattttttggtcttactctttgaaatctggtgtacattttacacttaacagcacatctcaattcaggccagccccactgcaagtgtacaacagccacatgtggctagtggctattattcttgacagcatagatctggaccttggtatggaaaggtttttattttcatttttggctattgaagaggttttaaccagggagcagaatgatctgatgtagcctcgctagactgttagctctgtgagaacaagggctttgttttgtttaccagtgtattcctagcacctagagcagtgcctgaaagatagcagatactcaataaatgttagtttaagtgatgaatcaatggatgaatgaatgaatataggcggtaattaaagtcatggaatttacttttgcaatatagtcttacaaataactggcactcctagtccaaacacaacttttgttttcatttgtttgcctttcaagcaagttataattagaagacatattttaggtggaatggtaccttttacagtaatctttattgggtctcataaaaatgactgactcacaaatctcacagagtaagactaagcttgaataagaatttttacaactcaaggtataaacagttcatgttgctattttttttaaagtactagctaaaacattccctgtaggttcactctatttaatatgtgactagctagttaaaaaaaaaaaaaaaattgtgaaagactgaggtacttataatcagctggataattctgaaaactgtaaaaacttttgcaactttctctggaggctgtagattgctttatttctgagttccttcaaaaacactgagactaaaattagagcagccagattgtatttggtttacagggactcatgctgtcttcctacctctccatctgttgaaacagtttttaggtgctggcatgaaactagaacatgtaagaacccaacttgccacagtcctgggatagcaaaaacctttacccacagaactgagttaatttaatttattttgtctgtacagcacatcaatttgggtggtttataaaacaaatcacaacattatggcatctagaagctaacttctgaagggagaatgcataaaataatactagcaggacaagcatggtggctcatgcctgtaatcccagcactttgggaggccaaggcaggtggatcacctgaggtcaggagttcgagaccagcctggccaacatggtaaaaccgcatctctactaataacacaaaagttagctgggcatggtggcacacgcctgtaatcccagctattctggaggctgaggcaggagaatcacttgaacctgggaggcggaggttgcaggcactccagcctgggtgacaagagcaaaactcagtctcaataataataataataataataataataataataataatagcaaagaaatgtgagaatattttactattattcacttaaagactgctttcccacttgatggtagaactgcacccccatcccatcccaaagatctcagcaatgaaagttgttaggaaatgagatctaaattatatggtctatttatataagcaatatgaaaagacttatctggctagttattacatggtatctagtaacatttactttcttttctagtgggaacattgtaggttatcatgtgattgttccatgtagttcctgtcttccttcctgcaacaacggacacttctggatgtttcacagccaggcagtttatgatattaacagactagactccacaggtaagaaacaattgacttggacattcctgtaacatttctctatcaatacctgagtaaaattcccaatagatcatttcaggattccttttagatcttcttagctggattagctagagtgaaacttcaattcttttttcccagacattcacttatgaaaactattaggcaaaattcattgtcatttctatgttcatccttgtacttaaggcctcaaacttggctgaatttcttggtcttttaaaatgaatattataattgctcttaactgctgccttgatacgtattctgactccagagaatttttgaagattttagatttgatagtctaatgcatgtgtgtgtctgtgtgtgtgtgtaagaaagggagaggccaagcctagggcaatgggagttgagaggaggaggactaagtaacctctgtatttagtgatgcttcagaataaaaacagacatttcgacatctatgttaatacgttatgacagaattttagtcaagggaaatatttgacaccaaagtataaagtatgttgtacaggcacaagtggagatattgtaggttcaattccagaccaccataataaagcaagcaaatatcacaattaaagcaagtcacacaattttttggtttcccagtgtgtataaaagttatgtttacaatatattgtagtctattaagtgtgcaatagcaggacatttaaaaaacaatgtgcataccttaatcaaaaaatacttattcggccgagagcagtggctcatgcctgtaatcccagcactttggtagtccaaggcgggaggatcacttgagcccaggagtttgagaccagcctgggcagcatgctgagacctcatctctacaaaaaaaaatacaaaaattatccaggcatcgtggggcatactatcgtcccagctacccaggaggctgaggtgggaggatcacttgaatttgggaggtagaggctgaagtgagctgtgatcatgccagtgcatttcagcctgggcaacaatatgagaccctgtctcaaaaaagaaaaaaaaatgctttattgctaaaaactgctaatgatcatctgaaccttcagcaagtcataatctttttgctggtggagggtcttgccttgatgttgatgactgcaaactgatcagggtggtggttgctggaggttaggatggctgtggcagtttcttaaaataagacaacaatgaggtttgccgcatggattgactcttcctttcacaaaagatttctctgtagcatgtgatgccatttgatagaattttacacatagtagaacctctttcaaaattggagtcaatcctctcaaattctgctactactttaccaactatgtttatgtaatattctaaatcctttgttttcatttcaacaatatttacagcatcttcatcaagagtagatttcacctcaagaaaccattttctttgctcatccataaaaagcaactcttcatccattaaagtttcatcatgagattgcagcaatgcagtcacgtcttcaggctccatttctaagtgtagttttcttgctatttctaccacatctgcagttacttcctccactgaagtctaaaacctctcaaagttacccatgagggttggaatcaacttctttcaaactcctgttaagactgatattttgacctcctcccatgaatcaggaatgtgcttttccaggttttcaatgtactttgcccagatccatcagaagaattactatctatggcagctatagccttatgaaatctatctcttaaataataagacttgaaagattaaattacttcttgatccatgggctgccaaatagatgttatgttaaggcattaaagcaatatttatctccttgtacaatgccatcagagctcttgagtgactaggtgcattgtcaatgaacagtaatgttttcaaagggatttttctgagcagtaggtcttaacaatgggcttaaaatagttagtaaaacatgctgtaaacagatttgctgtcgtccaggctttgttgtttcattgacagcgcacaggcaaagtatatttggcataattcctaagaaccctagaaatttcagaacagtaaatgagcattggattcaacttaaagtcaccagctgcattatcctctaacaagagattcagcctgtcctttgaagctttgaagccaagtattacttctcctctctagctatgaaagtcctagatggcatctccttccaatagaaggctgttttgtgtatattaaaaatctctgccagatgcagtggttcacgcctataatcccaggactttgggaggccgaggtggatggatcacctgaggtcaagagtttaagaccagcctgaccaatatagtagaactctgcctctactaaaaataaaaaattagctgggcatggtggtacatgcccagctacttgggggactgaggcagaagaatcacttgaacccaggaggtggagtttgaagtgagccgagatcgcaccattgcaccaagagtgaaactccatctgaaaaaaaaaaaaggaataagaggccgggcgcggtggctcacacctgtaatcccagcagtttgggaggccaaggcgggcagatcacctgaggttgggagttcgagaccagcctgaccaacatggagaaaccccgtctctactaaaaatacaaaattagctgggcatggtggcgcatgcctataatcccagctacttgggaggctaaggcaggagaatggcttgaacccgggaggcggaggttgcggtgagccaagatcacgccattgcactccagcctgggcaacaaaagtgaaactccatctcaaaaaaaaaaaaaaagaaaagaaaagaaaaatctgttgtttagtgtagccaccttcatccataatcttagctagattttctggataacttgctgcagcttctacatctgcactttttgcttcacctgaacttgtatgttatagaaatggcttctttccttaaactttataaaccaacctctgctagcttcaaactttcttctacagtttcctcaactttcttgcccttcatagaattgcagagagttaagacctagctctggattaggttttcgcttaagagaatatcatggctggtttaatcctctatctaggtcactaaaactttctccatatcagcaataaggctatttcacttttttattcttgttttcactggagtagcacttcttatgtcctttaagaacttttctttgcagtcacaagttggctaacaattgggcataaaaggcccaactttcagcctgtctcagctttcaatatgtcttcctcactatgcttaatcatttctagcttttgatttacagtgagagacatgccactctctttcacttgaacacttagaggtcattgtagggatattaactggcccaatttcaatattgttgtatcttaggaaatagggaggccccaggaaagagagagagaacagctggtcagtggagcagtcagaacacacaaaatatttatcgattaagtttgcagtcttaagtgggtgtggtcttaagtgggtgtggttcatagcaccctgaaacaattataacagtaacatcaaagatcacagatcaccataatatatataataataatgaaaaaggttgaaatattgagagaattatcaaaatgtaacagacacaaggtaagcatatgctgttagacttactcaatgcaggattgccaaaaccttccatttatataaagcccagtatctatggtgtacaataaactaaagcacaattgaggtatgcctatactaattattttagcaaggccaggcatggtggctcacacctgtaatcccacactttgggaggccaagacagatgatcacttgaggtcaggggttcgagaccagcctggccaatatgatgaaaccccccttgaacctaggaggtggaggttgcagtaagccgaggtggcaccgctgcactccagcctgggcaacagagtgagaccctgtctcaaaaaaaaaaaaaaaaaattattttagtaagaaagtacactaccaattcttttaaaaaaaaaatttctttttccttgtgttaaggtgctgaggcactgaaatactaattctttttttttttttttgagacagagtttcactcttgtttcccaggctgatgtgcaatggtgtcatcttggctcatggcagcctctgcctcccgggttcaagcgattctcgtgcctcagcctcccgagtagcgagattacaggcatacgcccagctaatttttttgtatttttagtagagacagggtttcaccatgttggtcaggctggtcttgaacacctgacctcaggggatccgcctgcctcagcctcccaaagtgctgggattacatgggattacagacgtgagtcaccatgcctggcctgaagtaccttttttttttttttttttttttgagatggagtcattctgtcacccaggctggagagcagtggcgtgatctcggctcaccgcaacctccacctcccgggttcaagtgattctcctgcctcagccttctgagtggctgggattataggtgtgcaccactacacctggctaatttttgtatttttagtagggacggggttttgccatgttgcccaggctggtctcgacctcctgacctcaggtgatctgcccacctcagcctcccaaagtgctgggattacaggtgtgagccactgcaccggccaaagtaccaatttttaaaggggatttatataatactttttatattgcctggagccattgagttttgttataagacacatgttctccatgtctaacatctatttacacaacagaccaagttgattttaaggaactttttttttttttttggagacagggtcttgctctgtcacccaggctggagtgtagtggcacaatcttggctcactgcagcctcgacctcccaggctcaagccattcttccacctcagccttctcaataggtgggaccacaggtgtgtgccaccatccctgtctaattttttgtatttttcgtagagaccagtttttgccattttgcccaggctggtctcgaactcctgtcctcaagtgatctgcccaccttggcctccaaagggctgggattacaggcctgagacacctcgccagccgactttaagtaacttgacaatctaagttgacactagcattcttaggttcctaaatgcatgttttagtctcctttagaacttaaatgtattttttaaatatatgatttgccttcacagaccaaaagatcacgaattgcaagataggttgtcaagggtctttaaatcctccaattatgtttagatttttgtagatttgatttttttatctgggactcaactgtggctctcaatctatcatttatggggtcttaatttaaaactttggtatgttaagaaggccattttcatgtaaggacttatctgaactcccctaagtgggatacagtctcctaatttaagcctccagttttatatttgtgttgcccatgggacacattaaaggaagtttctgctttgatagtatttttcctgctttacagaattcaaaacacagggtggagatttttcaagtttgatttactttttaatattggtcaatttttcaaagataaaagccccacattcttccatttgcactgaatctaatccataagaaacagatgtatcacaggatttccttcctcccttcttaacagagaaaggaaggtgctgcttctgtcagatccaatctcttagtttatttttcctcctttgaaccaattgtgctgagctgcttcatgtctctgagtactgactccaagaatatcaagcttctgctttgtaaccctaatattgtgatttcaagcaagattttctagatgcttggtatcaaagcaagtttctaatggcgccacaactgtccttgaatcacctgaaccagcagtgtcaaaggaatgcatagacaagctttataaattctataatgtttaaactgaaaaggactcctggaggtctgttttctaggctagtcttcatttagagacctgatttcccagaactttctggaggagccttgggaaacctcagctcaaatttcctgaaattggcaaatgccctcagagtcaaaatggcttcagccctccatttacatttatgggttctaattttcactttgatttttgcctcgcaattccttacagctcttcctgtcagctcttccatgacatttacctggagcagaacaccattcattcttagggtgggggtggggatggggtagcgttttctattataaacaattcaaacacaaaaagattatagaaaataataagatacacatctgtatccctaccagcatcagatacatgctaaattcttgccagattagattccagtatctccctcagtcaaggtaaacagttaattatttctactgtttcaacaatgtcacactacacatccctgtgtatgtcgccttgaaccacctatgcaagatgggcagctgaggaagggatgagcaatgggctgtatttgcaacatttttaaaaattcacaaaatggaatactctccagaagtaaaaataaatgagcgaaatctacacaagttaacatggattaacctcaaaaacatgacgagtgaaaaagcaaattagaaaacaatatgtagtgtaataacattctatacaaaatttaaatccactaaacagtaatatatattgtctatgttgcatgcatttgtagtaaaaccatgcatggtgtactagcagtggtgaacactggattcaaaccaaatctccaaatcctggctcattccattccgccatgtggctgctatctcagtgtatatggggtgggtatcctgaattgctggatcctctttgtgtccacactgataactggacagcttaagatttgtttttctggccaagtgtggtggctcacatctgtaatcccagcactttgggaggccgaggcgagggggatcacctgaggtcaggagttcaagaccaccctgaccaacgtggtgaaaccccatctctactaaaaatacaaaaattacccaggcatggtggcatttgcctgtagtcccagctactcgggaggctgaggcatgagaatcacttgaacctgggaggcagaggttgcagtgagccaagattacaccactcgtctccagcctgggcaatagagcgagactccgactcaaaaagaaaaaaaaaaagatttgcttttcttgtgaagttaattggctatcctagaggtcagttattttccatttagtgtttttaactaataatgtaatatatgcccagagtaataaacttgtcattatcctctactgtatgtttagtcatttactgtatacctgtgcttcattcttcaatatgaaatctgactattctttctcagtgaagtttttgattattcttttgtttattatagtgactgctgcaacctggccctaaagttcagtttaaagctctgcctgtggactgaaacccactggtaccaaggattgcagttcatattataactgtctccgaacccttgctttttttctgaatcagaaaaatggcaccagctacttctctgcttattgaagggatgaggaggcttattcaggacttctccctgaaccctccaaagaggcatttaatctaaaaggatcttgtgagatctccattcttaaacatcattaaaatagatcagaaaattatcagtgtatagtgattatgttataatgcagctggaggcagagtttgagtaaatggactcctgagagccttttgagctgtaaaattctagaattcaagcccttgcttaaaaggatttaaagaatgtttatgtcctagccctttaaaaaaaagtgtttgccaggcatggtggctcatgcctgtaatcccaacagtttgggaggtcaaggagagaggattgcttgagcccaggagtttgagactagcctgggcaacatagtgggaacctgtatctacaaaataaaattagccatgtgtggtagtacacgcctgtagtccaagtgacttgggaggctgaggtaggaggatcacttgagccctggaggttcaggctgcagtgatctgtgattgtgaaccgtgatcctgccaggcactccagcctgggcaacacagagagaatttctctcaaaataaataaataaaatttatgtcctagatggataatattaggtaattttatttgcagtacattcttcaatagctactctttttactgctaacactatggtttacataagaatattaacatataaagtttcgtaatttgtgttctgagttataacagtagtaagcattaaagaattttatgattttttattttcaggtgtaaacatcctactttggggcaacttgccagagatagaagagagtacagatgaagatgtgttaaatatctcagcagaggagtgtattagataaatggaattatgatatatatgatatacaaacttttttctatttaaaaatatattaatggatcaactttaaaattgttagttgccagtgatcttttttggaaaacaaaaatggggcatttgttgatttatttattttccgtctctaattagttacctcagtttgattgaagccagtggagttgtgcttttcctctacttctacttcctctcccccacctttttctgcccagtgtaggtgtattcttaaattcagacgggaagattctttcacatatcactcagttacctcccaatctgggggagtttttcttacaacttgataccagataccattaattttacattcctgaataaaggcctagtacccacgcatatttcaaccatgcatatatcaagttcaactgagttttaataggggattaaaaaaacaagctgttaggtttccatgggcactggttctcataggttctattggtgataactgctttaacatggagcaagagtttgtgaatcaggaaatagaataaattaaaatttaaaatatatagaggaatcctcttgattgctcagcatgatgttagataaatgagtttgtcagaaaatatcagtatacgctgtttaccaatgttatttatttacattcttctaaagccattatggatattgtattatgagagctaaacctaaataagttatcctgttccctaggaccttctctgtaaatagtgaattttagacgagtagtctgtcctaaatcttaaatagaaaaaaaactaaagcgatttgcttaagccattgtacattataaagagctgttttgttttgctttgctttgctttgttttgtttttttaaagctgcattcagagccacaaaggaataggaaagtagggtagtgttggattctggttttatgtaactctaaaataaatgtatctctttaatatctcagttgtagggattttgtcaataccaaagcagactgagttgtggttttgtaaataaagttttttctaaaaatgaccattcttcctttaattttttgttatgcccacatattgtatgtaaaaatataaataaatagtacttaaagtata

SEQ ID NO: 14 - DNA, 34740 bp, Homo sapiens
aagccttattagagctttctcaacctgcagccctcatctccgccggcgagtagggccaggtgttgggaggtgagtagctctccggcagctctgcaacttcatttctttatttctccattccacagttggtaaaatttctccttttatttcatatattttttttctgagacggagtctcgctctgtcgcccaggctggagtgcggtggcgcgatctcggctcactgcaagctccgcctcccgggttcaggccattctcctgcctcagcctcccgagtagctgagactacaggcacctgccactatgcccagctaatttttttgtatttttagtagagacggggtttcaccatgttggccaggctggtctcagtccgcctcggcctcccaaggtgccgggattacaggcgtgagccaccgcgcccagccttttttttttttttttttttttttttcttctcttttttgagggtcttactctgtttcccaggctggagcgctgtggcaggatctcggctcactgaacccttgacctctcaggttcaagcagtcctcacgcctcagcctttgaagtagctgggaccgtgggagggtgccaccacatctgttctggctaataatattattattaccactgtttgcagagactcactagatgtagggtcttaatatgttgccgaagctggtctctaactcctgggctcaagcgatcttcctgcctcagactcccaaaattctgggattataggcaggtgccaccgcgcccggcctaaatcttttcttctgttagaaattaagtggttctgcctgtctcagtggctcacgcctgtaatcgcagcgctttgggaggccgaggcgggaggatcacctgaggtcgggagttcgagaccagcctgaccaacatgtagaaaccccatctctactaaaaatataaaattaggtgggcgtggtagcgcatacttgtaatcctagctactcaggaggctgaggcaggagaatcacttgaacccgggaagcggaggttgcggggagcctagatcataccattgctctccagcctgcgcagcaagagagaaactgtctcaaaaaataaaataaaataaaattcagtggttctgactggggaaagagtagcagatgcttagatctagagagactctagttaaggttggctcataagaggatagttgtgtgtgcttttatttctgttctcttgggggatttaggatagagctatagagagctccaaaaaaaaaaatatattggaacaggtcagatgctgtggttgctgtgtgtggagtcctgggcagtgctaaggttttgtgtctaatgagtcctcttaacaagaaggtattgttttttattcactgaggtgagggagcctcttagcatcattctagtccagcttccggacctgagtcttatgcaaatacctatgccagttgccattctcacgctattcacagctatcatataaagaggtgttataccctttctgtaaagtttttgttgctactgctatttttttttttttttttttgagacaaagtctagctctgtttcccaggctggagtacagtggcgctatctcagctcactgcaacttccacctcccaggttcaagcaattctcgtgcctcagccttctaagtagctgggactacagccgcctgtcaccaacctggctaattttcgtatttttagtcgatatagggtttcactatgttggccaggctggtctcaagctccagacctcaggtgatcctcccaccttggactcccaaagtgctgtgattacaggcgtgagccaccgcacccggccctgttgtttttaaaatagagacagggtcttaagttgccaggctggtctggaacttctggactggagtgatcacccacctgagcttcccaaagtgcggggattgcaagcgtcagccaccacccccagtgttgtgtttttgtttgttttaccaggctggagtgcagtggtgcgatcacagctcactgcagccttaacttccctggctcaggtgatcctcccacctcagcctcctcagtagctgggactacaggtgcatgccactatgcccagcacaattttttttttttttgtatttttttgtagagacagggttttgccatgttgcccaggctggtctcaaactccaagcaatcctcccaccttggcttcccaaagtgtttggggttccaggtgtgagccatggccccccggccagcttcagtaaagtaaaagccacacacctgtgtcctgagaccaggctccaccactaagttatctttaagccttttttttttttgagacagtttcactcttgtcgccccaggctggagtgcagtggcgccatgtcagctcaccacaacctctgcctcccactcccaggttcaagcgattctcctgcctcagcctcccaagtagctggaactacaggcacctgccaccacgcccggctaattttttgtatttttagtagagacggggtttcactgtgttagccaggatggtctcgatctcctgacctcacgatccgcccgcctcggcctcccaaagtgctgggattgcaggcgtgagccaccgcgcccggctgtgtgtttgcattatcatattcagcccagttttcacgaagtttcttgtctcctgggtgatccacgtagctccccacttccttatctgatctatgcttgtcctttcattgttgtgttactactttgctataatgagagagtgttttcgctttataggttaacttttagaacctgagcagcccctcagggaaaaccctgacagtagctggttattttgcaattagaaaaactagctgggcactgaggcaggtgaatcacgaggtcaggagttcgagaccagcctggccaacttggtgaaaccccccatctctactaaaaatacaaaaaaattagctgggcacagtggtgaatgcctgtaatcccagctacttgggaggctgaggcaggagaattgcttgaatccgggaggcagaggttgtagtgagccgagattgcagcactgcactccagccagggtgacaaagtgagactccgtctcaaaaaaaaaaaaaaaaaaaatacaaaaagtagctgagcgtggtggtgggtgcccataatcccagctagtcgggaggctgaggcaggagaactgtttgaacctgggaggcagaggttgcagtgagctgagatcgtactactgtactccagcctgggctgcagagtgaaactatctcaaaaataagtaaataaaagtaaaatgagttgaggtcttgctctgttgcccagatgggagtgcagtggcacaatcaaggctcactgcagtttcagtctcccaggctcaagcaatcctcccactgcagcctcctgagtagctgggactacaggcatgtaccaccacccactgctaacttatttttcatggagatgggggtctcactatgttgcccaggctgggagtttgttcttgaagaagcagggtagatggtgagtgtccttgttcgtggcacagcaggaactggcatttgagacaggagtgctaatcaccatccctctccactcctcccttgattgtcatcacagctcccacgtgggacaagatggtgtcttcggcgcagatgggcttcaacctgcaggctctcctggagcagctcagccaggatgagttgagcaagttcaagtatctgatcacgaccttctccctggcacacgagctccagaagatcccccacaaggaggtagacaaggctgatgggaagcaactggtagaaatcctcaccacccattgtgacagctactgggtggagatggcgagcctccaggtctttgaaaagatgcaccgaatggatctgtctgagagagcaaaggatgaagtcagaggtgagtggaaatcggtccacactgtgtcctaggaggaagcaggcgtcctctccaggactttagaaattcagaaggccaggcgcgctggctcacgcctgtcgtcccagccctttgggaggctgaggcggttggaccacctgagggtcaggagtttgagaccagcctgaccaacatggtgatgaaacagcatctctactaaaaatacaaaaatttgctggacgtggtggcagacacctgtaatcccagctactccgggaggctgaggcaggagaatcacttaaatctaggaggcgggggttgctatgagccgagatcacgccattgcaccccagcctgggcaacaagagcaaaattctgtctcaaaaaaaaaaagaaatggcattgaggcttggagagggactgcttgttctgaatgcaggtgctggatcttcataaaccctggtgtctgtcctggtccttattttctacctacttctttttttttttttttttgtccttttatttttttattttttattttattattattattttttttattatactttaagttttagggtacatgtgcacattgtgcaggttagttacatatgtatacatgtgccatgctggtgcgctgcacccactaactcgtcatctagcattaggtatatctcccaatgctatccctcccccctccccccaccccaccacagtccccagagtgtgatgttccccttcctgtgtccatgtgatctcattgttcaattcccacctatgagtgagaatatgcggtgtttggttttttgttcttgtgatagtttactgagaatgatggtttccaatttcatccatgtccctacaaaggacatgaactcatcattttttatggctgcattgtattccatggtatatatgtgccacattttcttaatccagtctatcattgttggacatttgggttggttccaagtctttgctattgtgaataatgctgcaataaacatacgtgtgcatgtgtctttatagcagcatgatttatagtcatttgggtatatacccagtaatgggatggctgggtcaaatggtatttctagttctagatccctgaggaatccccacaccgacttccacaatggttgaactagtttacagtcccaccaacagtgtgaaagtgttcctatttctccacatcctctccagcacctgttgtttcctgactttttaatgatcgccattctaactggtgtgagatgatatctcatagtggttttgatttgcatttctctgatggccagtgatgatgagcattttttcatgtgttttttggctgcataaatgtcttcttttgagaagtgtctgttcatgtcgttcgcccactttttgatggggttgtttgtttttttcttgtaaattattttctacctatttctatcgctttcaggtatcgtacagttggcctaacatatctgtggatttaaccaatcctagatcaaaaataatgggggcaaagacaattaaaaataacaatacaataaaatgcacatgaactatggttatttaactcttcttgagagaggatctcactctgtcacccaggctggaatttagcagcacgatctcggctcactgcaacctccgcctcccgggttcaagcgattctcctgcctcagcctcccgagtagccgggattacaagcatgtcccaccatgcctggctgattttttttttttttttttttgtattctaaatagagatggggtttcaccatgttagccaggatagtctcgatgtcgtgacctcatgatctgcccgcctcggcctcccaaagtgttgggattacaggcgtgagccaccgcacccagccagcaagtgcatttagaactactctactttctaccccataacttttttttttgtttgtttgagacaagtctcactctgtcacccaggatggagtgcagcagcacaatctcagcttattgcaactcccgccccctgggttcaagtgtttctcctgcatcagcctcttgaatagctaggattatacaggcacctgccactgtgcctggctaaattttgtattttaatagagatggggtttcactatgttggccaggctggtcttgaactcctgaccacgtgatcaacccgcctcagcctcccaatgtgctggaattacaggtgtgagccgccatgcccagctacacttttttttgaaacggggtctcgttttcttgctcaggctggagtacaatggggcaatcacagctcactgcagccttgacctcccagacttgagcaatcctaccactatggcctcccaccacacctcgctcattcttgtatatatatatatttttgtagagatagggtttcaccatgttgcccaggctggtctcgaacttctgtgggctcaaccgatcctcctgccttggcttcccacagtcctgggatcagaaacatgagccacagtgcctggccagtgcagctttatttacagtaaccaagatatagagtcagtctaagtgaccatcagtggatgaataaaaaatgtgcccgttgggtaccctgcctactgcctgggttatgagattgttgggaccccaagccttaaaaaggaaacatggtaggccgggcacagtggctcacgcctgtaatcacagcactttgggaggccaaggcgggtggatcacttgaggccaggagtttgagaccagtcaggccaatgtggtgaaaccctgtctctactaaaaatataaaaaaatcagccgggcgtggtggcacactcctgtagtcccagctacttgggaggctgaggcaggaggattgcttgaaccagagagtcagaggttgcagtgagccaagatcgtgccactgcgctccagcctgggtgacagcaagactccatctcaaaaaaaaaaaacaaacaaacatggtattaattacacaatggaatactcctcaaccttaaggaactcctatctttttatttaaaaattgccagttttatttcagctagagatcactttttagcataatgtttcctgtctttaacaatgggtgagggtttttttttttttttttttggtttggtttggattttggttttgcttttgagtcgaagtttcactcttgtctcccaggctagagtgcaatggcgcgatctcggctcactgtgacctcctcctcccaggtttaagtgattctcctgcctcagcctccagagtagctgggattacaggcgcctaccaccatgcccgctaatttttgtattttagtagagacagggttttaccatgttgaccagactggtctcgaactcccgacctcaggtgatctgcccacctcagcctcccagagtgctgggattacaggtgtgagcaaccatgcccggccaagggtttttaactttagctgacctccggaggttacaagtttgaaaacggcaggaggaaacccagagagttgtaaacttacgaaggtctgggctctgaaaaagatacaaattttctttccatgccaatagcgctcacacagacatggtgaatgttcctgaaacccgccggactttctgtaagaagtgtggcaagcaccacccccacaaagtgacacaaggcaaggattcttggtatgcccaggggaagtagtgttatgacaggaagcagagtggctatggtgggcagactaagccgattttccggaaaaaggctaaaactacaaagaagattgtgctaaggcttgagtgccttgagcccaactgcagatctaagaatgctggctattaaaagatacaagcagccaagcgcggtggctcacgcctgtaatcccaacactttgggaggccgaggtgggcggatcacaaggtcaggagtctgagaccagcctggccaaaatggtgaaaccccatctctactaaaaatacaaaacttagctgggcatggtggtgtatgcctatagtcccagctactcaggaagctgaggcaggagaatcgcttgaacctgggaggcagaggttgcagtgagccaagattgtgccactccagcctgggcaacagagtgacactctgtctcaaaaaaaaaagatgcaagcattttgaactggaaggagataagagaaaggaacaagtgatccagttctaagtgtcatcttttcttttatgaaggcaataaaatcttgagcttatggtaaaatgcaaaattttccccccttctcctttttcagaagcagctttgaaatcctttaataaaaggaagcctctatcattaggtaagttacctcatttataacttttattcttcatgtgagatctggggactcgggcctttgttttaaggagaatgtgctgagcactaagaatgcaaagaaatgccggacttagcatccctgctcccagggcggagctggtctcgcaggtgcgtagcagtaagacctgggaagctgaaacacgatcgcgtttgttggaaatctataaatacatacaaagcggggaagggtaagcttggcctttgaatctggataaggtagagacttttcttttttgagatggaggcttgctctgtcacctaggctgaagtgcagtggtacgacctcggctgactgcaacctctacctcctgggttcaagcagttctcctgcctcagcctctagaatagctgggattacaggtacctgccaccaggcccggctaattttttgtggtgtttgtagagatggggtttcaccatgatggccaggctggtcttgaactcctgacctcaagtgatctgcccacctcagcgtcccaaaatgctgggattatgggcatgagccaccaccacacccggttttgtttttttttttttttttttttttttttttttttttttgaaacagggcttcactctgtcacttaggctggagtggtgcaatcatggttcactgcagccttgacctcccaagctctggtgatcctcctgcctcagcctcctgagtagctgggaccacaggcacttgccaccatgcctggctaatttttttcactttttgtagagacagggtcttgctatgttgcccaggctggcctcgaattactaaactcaatcagtcctcctgcctcaccctcccaaactgctggggtacaggtgtgagccatgacacctggcccttaccagctacttatatcctgaagattattattattttttttttttttgagatagagtctctctctgttgcccaggctggagtgcagtggcgtgatctcggctcactgcaagctccgcctcccgggttcatgccattctcctgcctcagcctcccgagtagctgggactacaggcgcccaccaccacgcctggctaatttttttgtgtttttagtagagacggggtttcaccgtgttagccaggatggtctcgatctcctgaccttgtgatccgcccgcctcggcctcccaaagtgctgggattacaggcgtgagccaccgcgcccggcccctgaagattgtgttttgagatggggtcttgctgtgttgctccggcttgattgcagtggcacagtcatagctcattgcagcctcaaccttccaggctccagagatcctcttacctcagcctcctgagtagctgggactacaggtgtgcactgccacacctgactaatatttgtatttttggtagggacagtttcactatgttgccagatatggtgtcaaactcctggtctcaagtgatcctcccaccttggcctcccaaagtgctgggattacagacatgattcaccacacctggccatgaagactttttttttttggacaaagtctcactctgttgcccaggatggaatgcagtggcatgatctcagctcactgcaacctctgacctccgcctcccggttcaagtgattctcttgcctcagcctcccgagtagctgggattataggtgtctgccaccaagcccagctaatttttgtaattttagtagagatggggtttcaccatgttggccaggctggtcttgaactcctgacctcgtgatccacgtgcctcagcctcccaaagtgttgggattacaggtgtgagtcactgcgcctggtctcatgaagaccttttttgagacagagtcttgctctgtcacccaggctggagtgcagtggtacaatctcactgcagcctccgcctcccaggttcaagtgattctcctgccttagcctcccaagtagctgggattacaggcgcctaccaccacgtctggctaatttttgtatttttagtagagacagggtttcaccatgttggccaggctggtctcaaactgctgacctcaaatgaactgtctgcctcagcctcacaaagtactgggattacaggcatgagccacctcacctggtggtgaagactctaaaggctcttctcagatcagcctttgtcctgaatttcacatgcccgtgtccagttccctccccagcatcttttcaggagttccatggactcacctcttcattatccagggttaagctgcagatattgttattaggattccaccttgttctctctctttttttttttttttttgatacggagtctcgcttgctcttttgccaggctgaagtgcagtggagcgatcttggctcactgcaatctccgcctcctgggttcaagcaattcccttgcctcagcctcgcaagtagctgggacttacaggtaacacaccaccatgcccggctaattttttgttttagtagagacggggcttcaccatgttggccgggatggtctcgatctcctgacctcatgatccgcctgccttggcctcccaaagtgttgggttacaggcatgagccaccatgcccggctgattccaccttgttcttacattctttcccagttcattttaaatttatctacctcatcagaaactagggggttaggcctggcaggcagatcacctgaggttgggagttcgagaccagcctgaccaacgtagagaaaccctgtctgtactaaaaatacaaaattagccaggtatggtggcacattcctgtaatcccagctactccggaggccgaggcaggagaatcacttgaacccaggaggcggaggttgcagtgagccgacatcacaccattgcattccagcctgggcaacaagagcaaaactacatctcaaaaaaaaagaaaaactaggcagttaatcctcaaagcctttccagtggccttatgcgtgagtagtttgtgtgtgtgtgtgtgtgtgtgtgtgtgtgtgtgtgtctttcacaccatgtgttctgaactacttaggaattctcaccagaaaggcacataaacctgggatcatggcctaatgtactttcacttttacatccagtaccttatcaacgtcctttttagtacctaatctaggcttcactactgagactcaggggtccaacttgagccatcttggagtcccactgccagcacagcaacaggcctgtaatgccgccctttttctccagggataacacggaaagaacgaccacctctagacgtggacgaaatgctggagcgcttcaaaacagaagcacaaggtgggtgtcaggacctccaatgttggagtcagctgaggaagccccccgttcttgctgctatctcctgttcctttgaagaaccccatctctctccaatcttttcctccactattcttaatgtgcccactgtctcctggagaatgccaacctcccttccgtaagaatagagggaagaacgaacgttgcagagaattagaactcagtttgtagaaagttaggagcacagcgcagagagtttttgtttttgtttttgttttgagacagtttctctgttggccaggttggaatgcaatggcgcgatctcggctcactgtaacctccacctcccaggttcaagcgattctcctgattctcctgactcagcctcctgagtagctgggattataggcacctgccaccacacccagctaatttttttttttttttttgagacgaagtcttgttcttgtcacccaggctggagtatagtggcaccatccctgttcactgcaacctccgcctcccagattcaagtgattgtcctgtctcagcctcctgagtagctgggactacaggtgcatgccaccacgcccagctaatttttttttgtacttttagtagagacaggtttcaccatctcattcagggtggtctcaaactcctgacctcaagagatctgctccacccacccccaagtctcccgaagtgctgggattacaggcgagagccaccgtacccggccttctttaaattatttaaaagttgacaggtggccaggtgtggtggctctcacctataatctcccagcactttgggaggctgaggcgggtggatcaagagatcgagaccatcctggccaacatggtgaaacccaactctactaaaaacacaaaaattagccgggtgtggtggcacccgcctgtagtcccagctactcaggaggctgaggcaggagaatcgcttgaacccgggaggtggaggttgcagtgagccaagattgtgccactgcactccagcctggcaacagtgcgagactccatcttaaaaaaaaaaaaaaaaaattgacaggcataaatgtatttatggtacattgctcagacaactttaatataaacaacttacagagaaaattgagtcttttgggtaggtgacttgcctgagctgactttgtgataggttttttctgttttttttgtttttgaaatagagtctcactctgtcatgcaggctggagtgcagtggccccatcttggctcactgcaatctctgcctcctgggttcaaggggtcttcctgccacagcctccccaggtgctgggactataggtgcccaccactatgcctggctaacttttgtgtttttagtacagatggggtttcaacagggtagccaggttggtctagaactcctgacctcaagtgatccacctacctcggtctcctaaagtgctgggattacagctgtgaaccaccgcacctagcctgtgatcagtttcagatcagccttgcttactccacattccctcttatcttcctggtagcatttttgttttttcttgagaaagagttttgcccttgtcgcccaggctagagtgcaatggtgtgatctcggctcgccacaacctccacctcccaggttcaagtgattctgcctcagcctcccgagtagctgggatcataggcgcccaccaccacatctggctaatttttgcatttgttagttttatttttagtagacagggtttcaccatgttgggcaggctggtcttgaactcctgacctcaggtgatccacccacttcggcctcccaaagtgctgggattacaggcatgagccaccgtacctagcccacattgacttttgatacagcaagtatttcttgctatggctctgtataatagaggtgagtaacttggttgaaggaattgtttgccctgttcatctctctagacacggccaatgtcattcctggcacacaatctttttttttcttgagatggagtctcactctgttgcccagactggagtgcagtggtgcaatcttggcccactgcaacctctgctacccaggttcaagcgattctcctgcctcagcctcccaaatagctgggagtacaggtgtgtgccaccacgcccagctaattttttgtattttagtagagacagggtttcaccgtgttagtcaggatggtctggatctcctaacctcgtgatccgtccgcctcagcctcccaaagtgctgggatgacaggcgtgagccactgtgcccagcctagcacacaatcttgacaaagaatttcggtgcgacttggggtactgtggtgcctgctctatcatcatgcttcagcaggaaatgtgggtgaatagtgcctggtggcatggcaggtaaagaaatgttttgttttgtttttttttttgagacagtcttgctctgtcacccaagctggagtgcagtggcgcaatctcggctcactgcaagctccatctcccgggttcacgccattctgcctcagcctccccagtagctgggactacaggcgcccgccacacgcccggctaattttttgtatttgtagtagagacagggtttcaccgtgttagccaggatggtctcgatctcctgaccttatgatccacccgccttggcctcccaaagtgctgggattacaggcgtgagccaccgcgcccagccgcgggtaaagaaatttatgaagacaatcgtaggtaaaggaaggcagatttattggagaaagtaggaaaagacattggcagagagaccccagcgggcaggttgtcatgagtagctcactgccaggagaccaaagcttcctgcagattttatagaatagggcttgggctgattgataatgtcaacagggggtttaacttgcggtcttctttcagcagaagtgtttgataaactgaggcgtttcatggcaaacagggagtttgtgagctctgtgtgtgatctggccaggaaggccaaacatcttgggccgtatctcctggaccataaaagcagacctggcccagtgcagtggttcatgcctgcaatcccagcactttgggaggctgaggtgggtggatcatctgaggtcagcagttttagactggcctggccaacatggcgaaaccccatctctactaaaaatacaaaaattagcctagacgcagtggcacatgcctgtaattccagttacttgggaagctgaggcaggagaatcgcttgaacccgggaggcggaggttgcagtgagctgagattgcgccactgcactccagcctgggcaacagagtgagactgtctcaaacagacctatagctgacctgtttcctcttgtttgtatgccctgaaccatggaggaaagcttatttatttattttattgagatggagtcttgctctgttgcccagggtggagtgcagtagtgcgatctcttactacaacctccatctcccaggttcaagcaattctcgagcctcttggcctcccaagtagctgagattacaggcatgcgccaccacgcctggctaatttttgcatttttagtagagatggggtttctgtgttggccaggctggtctcgaactcctgagctcaagtgatccaccccacctcagcctcccaaagttctgggattataggcatgagccaccacacctggccggaaaacacatttgtagcttatttgctttatctgatcccgtgccccccctcccccccgccccatcagcctgcctccttttctctaattgggactccacaggaaatacacctgattttgtgtcaatctcacatgagtttgtattttgtagcgtttacagaaacgaaaggaaatgtcatctgcctgggtaaagaagtctttaaaggaaaaaagccaggtctgtaccatatcttcctgcagggagcttgggatcagatttctctttataaacttgaagtcctcttaactttcctatgtaacacaaagcatttatttatgtatgtatgtatcgagacggagttttgctcttgttgcccaggctggagtgccgtggcgtgatctcgactcactgcaacctccgcctcccaggttcaagcaattctcctgcctcagcctcccgagtagctgggattacaggcatgcgccaccatgactggctaattttttatttttagtagagacaaggtttcttcatgttggtcaggctggtgttgaactcccaatgtcaggtgatctgcctgcctcgacctcccaaagggctgggattacaggcatgagccactgtgcccggccaacacaaggcattttgttattttggttttccctatgggtaactgattgcatcctctctcccttccctcctcaccaatgataaagacaaagacaataggtgcaggtatatattgaagacgaagttccgggagatgtggaagagctggcctggagatagcaaagaggtccaggttatggctgagagatacaagatgctgatcccattcagcaaccccagggtgcttcccgggcccttctcatacacggtggtgctgtatggtcctgcaggccttgggaaaaccacgctggcccagaaactaatgctagactgggcagaggacaacctcatccacaaattcaaatatgcgttctacctcagctgcagggagctcagccgcctgggcccgtgcagttttgcagagctggtcttcagggactggcctgaattgcaggatgacattccacacatcctagcccaagcacggaaaatcttgttcgtgattgacggctttgatgagctgggagccgcacctggggcgctgatcgaggacatctgcggggactgggagaagaagaagccggtgcccgtcctcctggggagtttgctgaacagggtgatgttacccaaggccgccctgctggtcaccacgcggcccagggccctgagggacctccggatcctggcggaggagccgatctacataagggtggagggcttcctggaggaggacaggagggcctatttcctgagacactttggagacgaggaccaagccatgcgtgcctttgagctaatgaggagcaacgcggccctgttccagctgggctcggcccccgcggtgtgctggatcgtgtgcacgactctgaagctgcagatggagaagggggaggacccggtccccacctgcctcacccgcacggggctgttcctgcgtttcctctgcagccggttcccgcagggcgcacagctgcggggcgcgctgcggacgctgagcctcctggccgcgcagggcctgtgggcgcagacgtccgtgcttcaccgagaggatctggaaaggctcggggtgcaggagtccgacctccgtctgttcctggacggagacatcctccgccaggacagagtctccaaaggctgctactccttcatccacctcagcttccagcagtttctcactgccctgttctacaccctggagaaggaggaggaagaggatagggacggccacacctgggacattggggacgtacagaagctgctttccggagtagaaagactcaggaaccccgacctgatccaagcaggctactactcctttggcctcgctaacgagaagagagccaaggagttggaggccacttttggctgccggatgtcaccggacatcaaacaggaattgctgcgatgcgacataagttgtaagggtggacattcaacggtgacagacctgcaggagctcctcggctgtctgtacgagtctcaggaggaggagctggtgaaggaggtgatggctcagttcaaagaaatatccctgcacttaaatgcagtagacgttgtgccatcttcattctgcgtcaagcactgtcgaaacctgcagaaaatgtcactgcaggtaataaaggagaatctcccggagaatgtcactgcgtctgaatcagacgccgaggttgagaggtgagaaccgtttcactctaccagtcgttccatctttagcctcatcccatgcccccttaggaagaggccagagcctcctatgcactgtggcttagggtcaggaattccctcttgttggactctttgtttgtttttgttttgagatggagtcttgctctgtcgctcaggctggagcgcagtggcgcgatcttggctccctgcaacctccgcctcccgggttcaagtgattcttctgcctcagcctcctgagtagctgggactacaggcgcctgccaccttgcccggctaatttttatattttcattagagacgggatctcagcatgttggccagtctggtcttgaactccgcctgacctcaggtgatccacctgcctcagcctccaaagtgggattacaggcatgattcaccatgcccggcccaaatatatttttttaagacagggtcttgctgtgttgctcaggctggagtacagtggtgaaatcagctcactgcatcctcaaacttctgggttcaagtgatgttcctgagtacctgggatgacaggtattaagtgtgcaccatcatgtccagctaacttaagtgggggtttttttttgtgtttttttttttttttttttttttggaaagacaaaatctcactatgttgtccaggctggtcttgaactcccaaagcactgagattacaggcatgagttaccacacgccctgcctgaatatttcttattgatatgtatagatatgtatattcccaatctttttttttttttttgagacggagtttcactctttttcccaggtcggagtgaagtggctcgatctcggctcactgcaacctccgccccaccaggttcaatgattctcctgcctcagcctcatgagtagctgggattacagccacccacgaccatgcccagctaatttttgtacttttagtagagacggggtttcaccatgttggccaggcaggtctcgaactcccgacctcaggtgatccacccgcctcagcctcacaaagtgctaggattataggcgtgagtcaccgtgcccggtctatattctctatcttttatcaatgatgtgcttagcattttaacttatttttaccctctattggatttttgtctaagaagaataggttctttctcctgtgatgcttcttgggtgttgagttgtctgatggtggtgctaataagtgattacatggtccagctttcaattgtactcatttgtcaggggtatatgcccagagaaaccctaaatacttcagccgtgatggacacacatttggtgtaaccctttcttctcttccctatagatcccaggatgatcagcacatgcttcctttctggacggacctttgttccatatttggatcaaataaggatctgatgggtctagcaatcaatgatagctttctcagtgcctccctagtaaggatcctgtgtgaacaaatagcctctgacacctgtcatctccagagagtggtgtaagtagaaactaattcatgaactcaaatccttagggtatgaaaatggtacaatgttaacatcggagcaatattcagattcctgtactagactcttaagtgctcgagacacagggaattgagagagtcctgtccttaaatttattttgtgggataatcgtataaagtaatttctaggggctgggcatggtggttcacacttgtaattccaacacttcgggaggccgaggcagacagatcacttgaggtcaggagttcgagaccagcctggccaacgtgacaaaaccctgcctctactaaaaatacaaaaattatccaggcgtggtggcaggcacctgtaatatcagctacttgggaggctgaggcaggagaattacttgaacccaggaggcggaggttgcagtgaaccaagatcctgccactggactccagtctgagtgacagagcgagactgcgtctcaaaaaaaaaaaaaaaaaaaaagaaaaagaaaaaaagggccgggcacaatggctcacgcctgtagtcccagcactttgggggcccaaggtggggggatcacttgaggtcaggagttcaagaccagcctggccaagatggtgcaagaccctgtctctacgaaaaatacaaaaatttgccaggtgtcgtggcaggtgcctataatcccagctactccggatgctgagggtaggagtcgcttgaatccgggaggcagagtttgctttgcagtgagccgagatcgcgccactgcactccagcctgggcaacagagtgagactccatctcaaagaaaaaaaaaatctgtaaagatggacaaaaatttaaacatggaaaaaatagttcctaaagtttaaatatatcgagcccctggtttccatttaagtacgatacaggtgtacacactaaagatttcactttcgttctcttttccctaggttcaaaaacatttccccagctgatgctcatcggaacctctgcctagctcttcgaggtcacaagactgtaacgtatctgacccttcaaggcaatgaccaggatgatatgtttcccgcattgtgtgaggtcttgagacatccagaatgtaacctgcgatatctcgggtatatctcttaatcattaaaatccttcatcatacaaacataagctaccacaagcttatgtggcaattttgtgtaaataagaaaaagttcgttattctgactagaaacagtactaagggcagatgacccaggatgcagcatgggctgaacttgagtttctacttgccttgaacagtaaacaccctggacaaccatacgtgaggaccctgaatccaaagaaactcccagaatctttatcatctttttttttttttttatgaagtcttgctctgttgcccaggccaaagtgcaatggcacgatcttggctcactgcaacctctgtctcctgggttcaagtaattctgctgcctcagcctcccaagttgctgggattacaggcacccgccaccacgcccggctaatttttgtgcatttagtggagctggtttcgccacattgccaggctggtctcgaactcatgacctcaggtgacctgccctcctcaggctcccaaagtgctgggattataggcatgagccaccatgcccagccagagtccttatgttttggttttggttttggttttttctttttcttttttctttttgagatggagtctcgctctgtcacccaggctggagtgcgttggtatgatctcaggtcactgcagcctccacctcccaggttcaagtgattctcctgcctcagcctcctgagtagctgggattacaggtgcacaccaccacacctggttaatttttgtattattagtagagatggagttttaccacattggccaggctggtctcgaactcatgacctcaggtgatctacccccccacccccaccccaccccgccgtcggcctcccaaagtgaggcatgagccaccgtgcccagcccagaatctttatcttctatcagagatcattcactcatggttcatgcttctcctgtatgatgattcagaataccagctattgacatttttcaagcaagaacccttcaggaacatcaagttgccccttttctgttagtcctctggtttgagagctctccccttgggaagctgtccagtggctgcccaggcgatgagaacctacatgcatcatggggttccatgaagcctcacttggccacactggtgtagtaggtggtcattggcctcaaattattgccctgggccaggcgcagtggctcacgcctgggaggccgaggtgggtggatcacttgaggtcaggagttcaagaccggcctggtcaacatggtgaaactctgtctctactaataatacaaaaattagctgggcatgttggcgcacgcctgtagtcccagctactcaggaggctgaggcaggagcatcatttgaacctgagaggcggaggttgcagtgagctgagatcacaccaccgcactccagtctgggcaacagtgtgagactgtctcaaaaaaaaaaaaaaaaatcttggctgggtgcggtagctcatgcctgtaatcccagcactttgggaggccaaggcaggtggatcacaaggtcaggagttcaagaccagcctggccaacatggtgaaaccccacgtctactaaaaatacaaaaacattagctgggcatggtggcgcgtgcctgtaatcccagctactcatggaggctgatgcaagagaattgcttgaacctaggaggcagaggtagcagtgagccaagatcacgccattgcactccagcctgggcaacagagcaaaactccatctcgaggacagaaaaaaaattgattgctctggctctactgatacaatcttaggctgcttaatgggatcttagttgaataggatgctgtacatcttacaggtattggaaggttgaatgaaaccaagcccatgcattcaatagtggctgctatcattactaaccgttgcaattaccctcttttctttttgcctgagaataatgggatgcagggtgagggggaatattgggtgaattaaagatttgggtcactaatttctttctttttttctcaagatatagtcttgctctgtctcctaggctggagtgcagtgccacaatcttggttcactgcaacctctgcctcccgggttcaagtgattcttctccgtcaacctcccaagtagctgggattacaggcacccacctgtatttttgtatttctagtattttgtatttctagtagagacagggttacgccatgctggtggccagggtggtctcaaactcctgacctcgggcaatccaccacacccagctaatttttggtatatttagtagagccggggtttcaccgtgttggctgggctggtctcgaactcctgacctcaagtgacatccatcttccaaaatgctgggattacagccatgtgccaccacgcccagctaattcttgtatttttaggagaaatggggtttcatcatgttgttccggctggtcttaaactcctggcctcatgatccacctgccttggcctgccaaagtcctgggattacaggcatgagccactgtgcccagccactcatttcttatgaatttattctaacacattttccggatgaacagggcaccttgaaacataggttagtgggctgggtatggtggctcctgcctgtaatcccagtactttgggaggcctaggctggtgtatcgcttgaagtcaggagttttttgttttgagacggagtcttgctctgtcgcccaggctagagtgcagtggagtgatctcggcttactgcaacctccgcctcctgggttcaagtgattctcttgcctcagcctcctgagtagctgggactacaggcacgtgtcgccacgcccatctaacttttgtatgtttagtagagccggggtttcaccatgttggccaggatggtctcaaactcctgacctcctgatctgcccacctcggcctcccaaagtgctgggattacaggcatgagccattgccccggccaaagttaggagtttgagaccagcctggccaacatggtaaaaccccatctctactaaaaaatacaaaaattagccaggcaagatggcatttgcctgtaatcccagctactcaggaggctgaggcgggagaatctcttgaatctgggaggcagaggttgctgtgagctgagatcgcgccactacactccagccagggcgacagagcataaataactccctttcaaaaaaccaaacaatgaaacataggttagcggagtctgcatccaacattagagtcagattgactaagttctgtatttccagctgattcctgggcgatgttggtgccactggtctgaccaccctttgacaactgctgctccagataattcaagtcggggtataacacaaccagtgagatgtaaaccaaagacgattccacggttagattctcaagaatgacttgttctgccgggcgcggtggctcacgcctgtcatcccagcactctgggaggccgaggtgggcagatcacctgagattgggagtttgagaccagcctgaccaacatggagagacccccacctctactgaaaatacaaaattagctgggcatgttggtgcatggtgcatgcctgcagtcccagctactcgggaggctgaggcaggagaatcacttgaacccaggaggcggaggttgctgtgagccgagattgcgccacctgggcaacaagagtgagactcagtctcaaaaaaaaaaaaaaaatgacgtggtcctatttctcccacaggttggtgtcttgttccgctaccactcagcagtgggctgatctctccttggcccttgaagtcaaccagtccctgacgtgcgtaaacctctccgacaatgagcttctggatgagggtgctaagttgctgtacacaactttgagacaccccaagtgctttctgcagaggttgtcgtaagtctctcctctcttacagagcagctgtgctttcgatctggggccacagacgagcaatggtcatgcctgacttggctgtatggaacctctcgctgatgtgaacacctgttcccatgtttagatccaggccgatggcctgtgaattttgttcttctctcattcctattccttcataggatcaccagtgcatgatagaaggtggggagttcacaagaaggggcttttggatgctggcacttgtggagctagccgggaaggttgaagttggacctgtcaaccgtgttgccatttgtgattcttttgtaggttggaaaactgtcaccttacagaagccaattgcaaggaccttgctgctgtgttggttgtcagccgggagctgacacacctgtgcttggccaagaaccccattgggaatacaggggtgaagtttctgtgtgagggcttgaggtaccccgagtgtaaactgcagaccttggtgtaagtccgtgctggctgcctgtgtgcgtgggtgtatatgcacacgccccccacctccgggtttgagtagggtggttatgagaacacttaattcctctaaaagttccaagcatgatgctaatgacaactggtaagacctgggtagatgatggtaggaaaaaagtataagtagtagtagagtagtagtaatattctatagggatttggggaatgtagctggttttcgggttttttttttcctctttatgtatgtatgtattttagagatgggatctcgccgtgttgcctaggctggtctcaaactcctgagctcaagagatctgcctgccttggcctcccaaagtgctagaattacaggcatgagccatgtcaccccatgctgtgttttctcttaatctgtgttcttagaactataactgtaacataaattgcatgcaattggttgtaaatggaattcatttacttattttttaatgaatgatttgcaaatcaggtagtcttctgggccagtgtacgctcagactcccaatggaagctattggaagctacatgctcaatgtgatcctccttttaatactaaaatcacaggacacgtggcctggcatagtggctcacgcctataatcccatcaccttgggaggccgaagcaaggcagatcccttgagggcaggagttcaagaccagcctgcccaacatggtgaaacattgtctctctactaaaaatacaaaaattagtcacgcatggtgggacatgcctgtaatcccagttactcaggaggctaaggcaggagaatcacttgaacttcggaggtggaggttgcagtgagctgagatggcaccactgaagtccagtctggccaatagagcaagactctctcaaaaaaaaaaaattataggacaaatctttagaaaggaattggggcctggcatggtggctcatgcctgtaatctcagcactttaggaggcgggcagaacacctgaggtcaggagtttgagaccagcctggctgatgcagtgaaaccctgtctctactaaaaatacaaaaattagctaggcgtggtggtatggtcctgtaatcccagctacttgggaggctgaggcaggagaatcgcttgaagtcgggaggttgcagtgagccgagatcgtgccagcctgggtgacagaacgagattgtctcaaaaaaaaaaaaaaattgtatctgcactgatggtttctgttcagagattcgattttatgttaacatctctggtattttttttttttttttttaagatggagttttactcttgcccacgctggcaatggcatgatctaggctcactgcaacctccggcttcaaggaggttgattctcctgcctcagcctcctgagtagctgggattacaggcactcaccaccacgccgggctaatttttatatttttagtagagatgggatttcaccatgttggccaggttggtctcgaactgacctcatgatccgcccgcctcagccttccaaagtgctaggatttacaggcatgagccactgcgtccagccatacatatctctggtattctttgtctctaacatcacctccaacagttaggaactgtcctcttcctatgaagtaactaatctaggatatgtacctggcatctgaaaactacccacttaaatttaatgacatattcagttcatggctggagacgatgagtagaaggaaaggattcttcccacacccactatatctaggccctgaaacattaaaaaagaagtcccacaagcagtgagatgtcaccgactcactaactgtatcttcaaatgaatgtctagtttttttggttgtgtgtgtgtgtggtgtgtggtgtgtgtggtatttttttgggggggggggggttttcttttttttttttttttggttttttttttttgatagtcttgctctgtcgcccaggctggaatgcagtggctccatctcagctcactgcaacctccacctcctgagttcaggtgtgattctcctgcctcagcctcccagggattaaggtgcatgccaccacgcccagctaacttctttatttttagtagagacgagttttcaccatgttggtcaagctggtctcgaattcctgacctcaggtgatccacccacctcagcctcccaaagtgctgggattacaggtgtgagccaccgtgccggccccctcaattcaactttttgatccatgcccctattttgctaagttgtcaacttccctttagtcttatgtgggttttcctccattacagtcatggaagtttctagaaggccgggtagggtctttgagaggccgaggcaggtggatcatgaggtcaggagttcaagaccagcctggccaacatggtgaaaccctgtctttactaaaaatacaaaaattagccaggcgtggtgtcggagcctgtaatcccagcttacttgggagggtgaggcagagaattgcttgaacctgggaggcggaagttgcagtgagctgagattgtgccactgtactccagcctgggtgtcagagcgagactgtctcaaaaaaaaaaaaaaaaaagtttctatacattcataaagtttcaagatttgggggtgtgttttcacttctccatcgtcatggactccaatctgccatctatttccaaggcccttccaggtcctgtgtccctcagctagtggtatgcttcacttgggacccagagatacatgggcattatagttcaaattataattaagtttagaactctattgagacagaagaaagaaaacagagctaaggtgaaatatctctgataatctgtgttggttaatatctaggatcctagtaccagatatgttggagtgtgagctggtgtcttctgcctgtaagacactacctctctagcaactgaatttagcaaatacaatcgtaatcccagcatgttagggaggccagggtgggcagatcatctgaggtcgggagttcaagaccagcctggccaacatggggaaaccctgtctctactaaaaatacaaaacttagctgggtgtggtggcacgcgcatgtgtgtacacacacacacccccctgtaatcccagctactcggaaggctggggcacaagaatcgcgtgaaaccaggaggcggaggttgaagtgagccaccgtgccagctgagaatcctttttacttctccaacttctgttggccacctgcattccttggcttgtggcccttcctccaacttcggcagagcatcttcaaacgttgccctggctcccttatcacgtcacctcctgctggctttgactctcagctccctcttatgaggatccctgtgattgctggacctacccaaataaaccaggatataaaccatcttaagatgctcagtcacctctacgaggtcccttttgctcgcaggtgccaggagttgggacttggacatctttaggggaggccattcttctgtccaccacaccaccccatgattccatttccatgtcaccactgtctctaagtgtgtctaacccacggctcaagagtcaaaggtgcatcacagcagtgagaactcacaggttcgggtttgctttcttcctgtggttgatttctaggctttggaactgcgacataactagcgatggctgctgcgatctcacaaagcttctccaagaaaaatcaagcctgttgtgtttggatctggggctgaatcacataggagttaagggaatgaagttcctgtgtgaggctttgaggaaaccactgtgcaacttgagatgtctgtggtgagttaacttataagttcaacttcctatacttacaccttactgaatctgtggctagtgtaaaataatcagtgaagccgacttcccaagttatataattgagaggacctttatagagtcgatcgagcatttactaggatggttaaaggaataagttctagtctatgtctaagtttttgtttttttttttcttgaagttttgctcttgtcacataggctggagtgcagtggcgtgatcttggctcactgcaacctccgcctcccaggttcaagcaattctcttgcttcagcttcccgagtagctgggattacaggcgcccgccaccatgcccagctaattcttgtatttttagtagagacagggtttcgccatgttgaaggttcatctcaaactcctgacctcaggtgatccgcccatctcggcctcccaaagtgctgggattacaggcgtgagccactgcgccaggccctatgtctaagttctagtctgtgtcatgcaaagaacacctgtgaaattttaaggatacagtgcctcaagccattcagccaaaagccactgcccagcaccccacattcagagaggtgggaattgggccaggcacagtggctcatacctgtaatcccagcacttcgggaggccgaagcgggcggatcacttaaggtcaggagctcaagaccagcctggccaacttgaaactccatctctactaaaatataaaaattagccgagcatagtagtgggtgcctcttttttttttttttttttttttgagatagtttcactcttgttgcccaggctgtagtgtaatggcgcgatctcagctcactgcaacctccacctcctgggttcaagtgattctcctgccttagcctcccacatagctgcaaataaacaggcatgtgccaccatgcctggctaattttgtatttttagtatagacggggtttctccatgttggtcaggctggtctcgacctccggacctcaggtgagagccaccgtgcccagccagtaggtgcctttaatcccagctacttgggaggctgaggcaggagaatcacttgaaccctggaggcagaggttgcagtgagctgagatcctgtcactacactccatcctgggctacaagagcaagactccatctcaggaaaaaataaaaaagaggtaggaattagatatcgtgccagaaaatgctggctctatcagcaggtgagtggtctcaacttggctatcttacaaataccttgtgagttagctacaatcagatgcacttgaacctggaatcctatctgggaggcaatcttaaaagaatttgactcgggatgggcaaggtggctcatgcctgtaatcctggcattttgggagtccaaggcaggtagattgcttgaggccaagaatttaaaaacagcctggccaacacaatgaagccctgtctctactgaaagtacaaaaatccgctgagcatggctgtgtacctctgctcccagttactcaggaggctgaggtgggaggatcacttgagcctgggaggaagaagttacagcgaattgagatcacgtcacctcactccagcctgggtgacagtgagatcctgtctcaaaaaaaaaaaaaaaacaaaaaaaacaaaggcgcctttttaatcactcactgacacgtgtagaggagcaaaaagtttgagttgctggttggcccaggaggtcaaggctgcagtgagccaagatggcgttaccacactccagcctgggcaaccgagtgagaccgtgtttcaaaaaataaagtggcagggtgcagtggctcatgcctgtaattccagcactttgggaggccgaggcaggtggatcacctaaggtcaggagttcgtagaccagcctgtctctactaaagagacaggtgaaaccctgtctctctaaaaccacaaaaatcaggcaggcatggtggcacatagctataatctcatctacttggaggcacgagaactgcttgaatccaggaggcagaggctacagtgagccgagatcatgccacagcactccagccctggcgagagagcaagactgtctcaaagaataacttcaaagatggaagttatttaacctctctgctcaaaagcctcagtgcttccctatgtcaatccaggtaaaatcctatattgacgatggcttcagggtcttctgtgagctggccactgcttacctatgacctcatcttgacaatcctccctgtctcactcatgcccgctgcctggatgttctattttacgtgtcagtcacatgtatcttcagggcctctgcacaagctatttctctgcctggagaactcccccccgagctctatgactcggtctcttcaccccctcacctccaaccattgtagccagaacccccagttattccctgtaccccttgcccttcagaacccctcatcgcctccatattttcctgttagcagatgagccctgagggcggagacgttttgtttgttttttgagaccggagtctcactctgtcacccaggctggagtgcaatggcgcgatctcggctcactgcaacctccgcctcctgggttcaagcgattctcctgccccagcctcctgagtagctgggattacaggtgcctgtcaccacgcccagctaacttctgtatatttagtagagacacggttttaccatgttaggttggtcttgaactccttgacctcaggtgatccatccacctcggcctcccaaagtgctgggattacaggcgtgaaccaccgtgcccggcctgagacttctgttggtcatgcagatccccaacacacgagggtgggcttggcttgccggagggcatcgatcagcactggctgcattaacgtgttgatttctgtgtttccccaggttgtggggatgttccatccctccgttcagttgtgaagacctctgctctgccctcagctgcaaccagagcctcgtcactctggacctgggtcagaatcccttggggtctagtggagtgaagatgctgtttgaaaccttgacatgttccagtggcaccctccggacactcaggtatgatccatttacttccccatcaggctttctccagagtggtaggtttaggggaagcataatgacatggacctgctgtaggagactgatctggtagctggattacaggttcccgccatcacacccagccaatttctgtatttcacttggagaaacggggtttcaccatgttggtcaggctggtctcaaactcctgacctcaggtgatccgcccgcctcggcctcccaaagtgctgggattacaggcgtgagcaaccgcacccggccaccttttttttttttttcctttgaggcaagaactcactatgttccccaggctggagtccagcagcacaatgatggctcgctgcaggctcgctccagctcctgggctcaagcaatcctgcctcagttcctgagtaggtaggtttataagcatgaaccattgcacccagccacggctgccgtctacctgctcatgatagccatttgtcactgggctgtgttttgtttgttgcattttgtcagggttttggggttttgttttgttttttctttctttttttttttttttttctgagatggagtctcactctgttgcccaggctggggtgcagtggttgctaactgcaacctccacctcccaggttccagctattctcatgcttcagcctcccaagtagctgggattacaggcatgcaccaccacacctaggtaatttttgtatttttagtagagacagggttttgccatgttggccagggtggtctcaaactcctgacctccgtgatttgcccacctcagcatcccaaagtgctgggattacaggcatgagccaccgcacccggcctgagttgtattttgataccatggcatcaaagaaccaagaagccccttcctaggaatgtgggaacttcagaaattctcacaagcaatatactctactgctggcttaaaataatctttatgtagaagaaacatagattacttgtttatttaacatgaaactcagcctaagatactttgtaagtcaaaagacatatggacactaagggtttttttaagctttaagtttgtttgtttgtttatttattatttattttggagacagttttactcttttttttggggtgcatcttttttcttttttttttttttttttcctttttttttttttttttttttattgatcattcttgggtgtttctcacagagggggatttggcagggtcataggacaatagtggagggaaggtcagcagataaacaagtgaacaaaggtctctggttttcctaggcagaggaccctgcggccttccgcagcgtttgtgtccctgggtacttgagattagggagtggtgatgactcttaacgagcgtgctgccttcaggatctgtttaacaaagcatatcttgcaccgcccttaatccgtttaactctgagtggacacagcacatgtttcagagagcacggggttgggggtaaggtcacagatcaacaggatcccaaggcagaagaatttttcttagtacagaacaaaatggggggctgacccccccacctccctcccggacagggcggctggccggttagaggggctcctcacttcccattaggggcggccgggcagaggcgcccctcacctcccggacagggcggctggctgggcggggggctgacccccccacctccccgcccggccagagttttactcttgttgtccagcctggagcgcaatggcgctatctcggcttactgcaacctccgcctcccgggttcaagaggttctcctccctcagcctcccaagtagctgggactacaggcatgtgccaccacacctggctaatcttgtatttttaatagagacagggtttctccatattggtcaggctggtctcgaactcctgacttcaggtgacccgcctgcctcagcctcccaaagtgctaagattacaggcgtgagccaccatgcctggcctgcatctcctctgtttaactggtactccggggtccactgagtagaagttgccaaagtgggtgatagagcgggtaagcaggtattagagctatagcccagctgtactcagcaattccattttctgtgtatgataatcaacaagcatctcaaactgcacaatggctatataccattacaaggttaacctgatgttatgtttttctctatcagatcaacatggttgagaataagaggaatgaaaaaaaggattaaaaagagaaatgaaagtctttaatattacattttattatttacttcatttattttttagacaaaaatctcactctattgctcaggctggagtgcaggggcccgatctcagctcactgtaacctccgcctcccaggttcaagtgattctcctgtgtcagcttcctgagtagctgggattatagggatgcaccatcacacccaactaacttttatatttttagtagagatggactttcaccatcttgcctaggctggtctcaaactcctgacctcaagtgatctgcccacctcactctcccaaagtgctggcattacaggcatgacccaccacatctggcctcattttatatttaaaaataaaaaataagcaaatcaagccaggtacagtttaggcaacatggtaaaaccccaactctactaaaaatacaaaaattagctgagcatggtggcaggtgcctgtagtcccagctactcgggaggcagaggataggatggcttgaacccaagaggcacaggttgcagtgagctgagatggtaccactgcactccagcttgggcaacagagagactgtctttttttttttttttttttttttttttttttttttttttgagatcgcccaggctggagtacagtggcacgatctcggctcactgcaagctccgcctcccgggttcacaccattctcctgcctcagcctcctgagtagctgggactacaggcgtccgccaccacgcccggctaattttttgtatttttttagtagagacagggtttcaccgtgttagccaggatggtcttgatctgctgacctcgtgatccacccgcctcagcctcctaaagtgctgggaattacaggcgtgagccatcacgccccacctgagactgtcttttaaaaaaaaaaaaaaaaaatcaatgtggaacactcctttgccacctagaataatcaggaaaggtgacccatgccctgtgcctccttaacagactttcaggtacttgggaatttgaaacaaatctccttgatgcacaaagtaaccttttcttcccccattgtaccccaggttgaaaatcgatgactttaatgatgaactcaataagctgctggaagaaatagaagaaaaaaacccacaactgattattgatactgagaaacatcatccctgggcagaaaggccttcttctcatgacttcatgatctgaatccccccgagtcattcattctccatgaagtcatcgattttccaggtgttggtgaactgcctgtgactcctctcctccccggcccctacccctcagggataatgagttcattgctgggctagatgttttagccatgattctgcctctgttttatacctgcacacatccttatctttgttacatatgaaatatctgtatcacgggtatattgagagaaataaaggtgagagcattcacaaa

SEQ ID NO: 15 - DNA, 3594 bp, Homo sapiens
agctgattcccgggactaggttgcgggagaaagcctgttgcgtggaagataaggcggcgcgggaagtggacacagggtgggctggaggtgtgcttcgcgtgtgatgccaggggagtggaaaggtggcttggggagtgcagaaccctgaggatagtggcggggaggaagatggggcgtgcaggccgcccccagtgaggagaggccaggatgcagggcggctccagggcaatctgggcagttgggggagccctccgtatcgttcccggaggtagcaggagtagctgtgcgggaggtgccactcctgggcgcttgctttgcctccagcatgacccccgaccctggcttgcaccctgaatctagctgcgagccttgggcagaatggatacctgaggaaaggtatggtttctctccggctcagatctaactggactctcgctcctgctggctggacatggaggatttggaggaaggtaaggaaaggagggagggaagaatgaaagggaggagtgagacccagcgatggagagctgcatcagggacccatgactggctttcattcttctttccccttcagatgtaaggtttattgtggatgagaccttggactttggggggctgtcaccatctgacaggtaccagcctctttatcccacttattttcctctaacagtacctctttgtctcgaatcccttactgctgaattattggcttgggttggtaacttagcaaggtttggcgcacttggggctgctgggcggctggctgactcgggcctctatgacactattggtagcggggagagaagggagaagctggagttagatttcagggtgttaagaagaaggataagtggatttgctgcatctccatcctggcatcatttctgatgtccgtaaatgctaaaggcctattaggccccatagaaccaggtatctcatcgcccagaggccacatctcacagccagcatgggcatcggggcctagggtcatgtccctggctctgttgtggggcttttatgcagtctcccttgcataatctcctgttcccttttgcatgggcatgatgcctggtttgtttcctgtctcagccgtgaggaggaagacataacagtgttggtgactccagagaaaccacttcgacggggcctctcccaccgaagtgacccaaatgcagtggcacctgccccccagggtgtgaggctcagcctaggccccctcagtccagagaagctggaggagatcctcgatgaggccaaccggctggccgctcagctggagcagtgtgccctgcaggatcgggagagcgcaggcgagggcctggggcctcgccgagtgaagcccagtcctcggcgggagacctttgtgctgaaggatagtcctgtccgagacctgctgcccactgtgaactctttgacgcggagcaccccctccccaagcagcctgacgcctcgactccggagtaatgataggaaggggtcagtcagggctctccgggctacatctggaaagaggccctccaacatgaagagggtgagttgagagagttgagttggaggtgtgccccagacatggtgtgtgccatgatgcagggagtggtttccttattggtaaaacagggatagcatttctacatctagaattgttggaattaaatgagaaccatgaaaaaagagaaccaaaactcttaccacagtgtctgagtatatgtctatgataaactcaataaatggtattggcaatagtgatggtgatggtgatgtggtgatgttagcagctaacttctacccttccttactgggatgtagacaactctccacctctatttcttaattccttaagccacagaacagatattttttccactctagtcttttttctctctctctttgtgtttcaggagtcacccacttgcaatctgttccctgcatccaaaagcccagcatcttctcctcttacccgatcgactcccccagtccgggggagagccgggcccagtgggagagcagcagccagtgaggagaccagagcagccaagttgcgggtgagtgggagtggggagtttgtgggattgaccctgaaatttctccacccctctccaccaggcccacccacccccatcagatccgtcctggccccacagccttctaccagcaactctcaacgcctgccccggccgcagggagcagctgctaaatcttccagtcaactgcccattccctcggccatccccaggcctgccagccgaatgccactcaccagccggagtgtgccacctggcagaggtgccctacctccggattctctgtcaactcgaaaagggcttccaagaccaagcactgcaggacacagagtgcgggaaagtggacacaagggtaagaggtcaggaggaagaatgcccgcccttgcccagcgtgtcctcaccctcccagagctgtcaacagtgaccacttttgccatccttattgcaattcaattggaagatggggagactgagttacagagaggatatggggctggacagagtctgagtcttagttttcaaatacctcatggtcagggggagagtactaatcccacactcgctcccttcatccagtatttcttttcgaggtcagttaaacttgctgctaactcatttcttttgttaacccccatgaagttcctgtttcccagcgactaaatcttcctgtcatgggtgccactcgcagcaatctgcagccccccaggaaagtggcagtcccaggacctaccaggtcagtctggtcctcccttgcccatcctgtctccctaccccgccatcatctgggattccaagctgttatgcacatcagccctgaattttgtatggaaagatggagagaggaggggagcctggggcaggggaagggggatcccatttcttcccaccctgaggagcttgaattctgctgggtgacaaatgggcttgaggaagaagggcattttaaagcagttattccttctatttctttaggtaaagagatcaggacagcaagcaagacttcagtagcaaaccactacagtcagtacctggactcgcctctacccagcagaccctgactccagcagattctggcccagggacaggaggaagagatgccaccagggctggtctcccaggagtagagaccatgggaaatggggtggattaggattgagctggagaagacttaaactctctgggttgaaagaagattaggggaaaagaggtcaccttccagcagtgaaatgaacaaatagaagatgagaagtacaggcaagtggtttgtctttatccacccccactgttgtggtcagccccagagaattttatcttcttccttggcattggttcactggacatttccacgtgagcggcctccgtagctaacctccctgccctctgaggagccatcttcctgaatcgcattctctactggactctggcctgcttggagaggtggcagcaggcacctggtcttcagaaattgtttcctgtgaattctgtgactcctaataggccagtttgtgataagcttactctatgagtcttcatttttctaaaataaagtgaatgtatttttatattctctgta

SEQ ID NO: 16 - DNA, 11012 bp, Homo sapiens
ggcaggtctacactggagcttcctctccgcctccttcgcctagcctgcgagtgttctgagggaagcaaggaggcggcggcggccgcagcgagtggcgagtagtggaaacgttgcttctgaggggagcccaaggtagggaggcgaggcgacggtgtgcgggagcgggctctccagggacttcccgggtccgcaactggcagggccgttcgattcgcaggggatcccgtttcgtttctgttgttttccctttatttttaggagtgcccggggcgacgggaccccgggagaggggaaagggaacagtctggggtccgggcatcgctgtgggccgggctgggtttagggggacggcggtgcgggctgggccggtttgggcgcggcgggggccggatgatggggcgagtccggaccttggcgggcgagtgctcggcgcaggcgcaagcgcagagtctcctcgcggtcgtcctctcggcccctccctctggggggacccccagtgccaggctgtcagtgcgcagccccagcccgcgggacccctggggactctgggcgcctgttctgcagatgaccggttctaacgagttcaagctgaaccagccacccgaggatggcatctcctccgtgaagttcagccccaacacctcccagttcctgcttgtctcctcctgggacacgtccgtgcgtctctacgatgtgccggccaactccatgcggctcaagtaccagcacaccggcgccgtcctggactgcgccttctacgtaggtgccctcccgccctgctcctgccctcttactgtgttaacgattctccacgtgaggagcgtttcttttccagtgttgggtagaggcgtctgtcggtggggttatttggacagttctttagcttttcaggagcatctgccttgaacctgtaccgttttgggttggagacatgcagacattggaaactccgtctccccttttctgttacacgcttgtggagtaactctaaactttctgaaaatacgatcattatatttgcaacaatactgttttggctgccgtattgaaaggaaccgtttaggggaaatgtatgtttaccctcagctagcgtgttggctaggataaagcagccctcctttaatttccagacacaggagtttagtgaccacttgcttttttatgctgttttttggtttgtttaccatgaatagttgagcccagtgcatatcccgagcataaactgaacacttgcttgtagaaataagaatgttgaaaccctttcaaaagttctagtttttaaacggttcaaaactattttataggatccaacgcatgcctggagtggaggactagatcatcaattgaaaatgcatgatttgaacactgatcaaggtaatgtgaccatatctttaccagtttgttttcttggctagtgttcttaagtataaatgtttatgtaggaagagtggttcctaaattgcttagttactaagttgcttaagtacaggtggcttgaatttaggatttttttaatttaaatgataaccattaagttactgattacagaatattatgcatgtatttttgcagtaaagccagttatggtcgccattgtcagtgtttacataaattgacactcaagtatttggcctttattttgtccttagaagtgggctggatcccagactggccagcgtttcattaggattttccactacaatgctgatgttttgagagttcagtttttagaagctaatttagttttcagaagctaaaggtagatttaaaacctgacaaaaaataggcaatcatgtctatattaattgtgtttgttttaggtatttagcaaaatatgtttccgttgcattttttgaatgagtaactagatgatacatttcctttcggttaagtaatttcttagagatccagatatgaaatgacttactcaaatttttttggtgacattggcacagtgttagagattggactggagcccaaatgcatagagctctctagctgaacatttgtttgcatgtgtattcatcagacataggtattctaaggagataggagggtacagagatatgactagagagaagatgagttgagcaacaggagaatggatggaggatggccacattttgtcaaaaaactaagcacccaattagaagaggcttttgcatgaaagctacttcttctgtaacttatactgcaggtattgggttttgtttgccagtagcttaccctgtgtaataagtaagcttgtaagtctaggttctatttgttcagaaacttgtaggggtagggagaaacactgaaaagcaaacgtctcgattttcagtgttacatagagaattagctgtttattctatgaaagtcactgccaaacttcatgaaatcctttctttttctttcttgtttttttttttgagctagagtctcactctgttgaccaggctggagtgcagtggtgtgatcttggctcaccacagcctccgccacccgcattcaggcaattctgcctcagcctcccgagtagctgggactacaggtgtgcgccaccatgctcggctaatttttgtattttttagtagaggcggggtttcactgtgttgtccaggatggtcttgaactcctgatctcgtgatccgcccaccttggcctcccaaaatgctggggctaatcttactgtttgcaggtcaggaccatatattgttcattcctatatccttagcagttggcacagattctggtacatagtagatgttagttgaaggaataaatgagatatagtgagaaggttcaaattgaaaagaaaatgtctattgaaaatttgaaccacagtggaaccaagtgcagtaatgagaggacttcactcccagttctcataaccctttagccatgtaaataagtttcttagcagcattggcttaatgttcaacataaatgttgttgatccagaagaccagagttctccattcatttgtttattcaacagatatttcttgagcacctagcctgtaccagaccttgcactagatacgggcagagatcacagaggtaaacgcagttcctgataggaaatctagaatcaagtgaggaagataacagacatgccactatgttaatgtaatctgaaattcaagacagcctttggtatgtgcaatactagtgagtcatgtgaagtgtgcactgtaaggtgaacagagaggaacggataactttgtagtcatggagagatttttctgtctgtagtagacatttccatggggttggatgaggcaaattcattacagttgaatgaatgtttcttttaattgtttattttaggaatctttagtaaaggtagtaagctagatgttggggttttttcccctttttttttctctatagaaaatcttgttgggacccatgatgcccctatcagatgtgttgaatactgtccagaagtgaatgtgatggtcactggaagttgggatcagacagttaaactgtgggatcccagaactccttgtaatgctgggaccttctctcagcctgaaaaggtaggctctttatattcattgcaggagttgatggttttggggtgatttttgtcttggtgcatgattgttgactatgcttgttgaatttaaaggtgaaaagtcaacatggggggaaaaaaggttgacagttggttttataaatccaactacatagaaatgctttaatgcaaaagaaaattaactttgggattttgggccaacttttatttgtcagttgttatatttgcttccatgtattgttaatgctttaaatcgcaaaattgagaagcaactcactgccttttcagagaagtcatttagcagactgttcgattgtcttaaattgacgctccatcccaaaccagaagattggatggagcatcacttattttcatttgttatctgaggtttctttgggttgactgttgagagggcaaaatgggttatcatttcaagttcagtaagaaaggtgttttatgttccctggcttgtactgttcgtatatttattttttaatactgacagatgtagtttcaaggcaccttagtgaacaaagctttttaaaaccaaaactttgtgtattattctaaccttttgatctgtatgataaaagtgtaattgagctttccttctgtatcctcatcagactttatcaggtggtagttaattttaaagattgattgtttaagcagtttaaaggtatccctcacttgagtctatttcctcagcgtgaatatactattcaattcctgttagccatcattatttacaatagtgcatccaaagagccattatttttgtcacatcacagtcgaatctactcctggcaagacctttgttcagaataaaataattgcattgtttctagttttgatttatggttgtatgtaacatgttaagaactgtgataaattgctgacagaatatcatataatggacagccacactgaatcaagctgcttattggttcagcaaggttcattatgtcactttttttaatactttctttgataaatgtatatacctagtcagtagcatgacagtggtttcacttgatttatgatcagtggggatagaaagcactattagaagcttgtgtgtcacctatatagtaaagatttaagataaaattcccagtatgattgtaccattataaatcgatctctttctggattctttatttttaaagtttggtactttatacatcttaattttcattttactgcaaacattttgttttctgagtaagctatgataaatcttaacatttctgacatttatatctgcttatattaaatctattgttttgaatcttaattttaattccttatttttcccttggtcacattaattgttgaattttaaggccagattctagagaggggtgggacatggcgttgttaaagctaacttggttcttcagctgatggtatgtggttaacatactagtgattattaacatatggcttaagtactgaatgttgaagagacatcatcttaccttgccatggggcctctctgcattttttatggcagttcttcaggtttgaaaatgctaagtcagattagagtttcttattaattgaaaataatagagcacagttgtgaatcgcaagtctagatttttaaaaagtgactgaacatgatcaggagaatatttttttgccacctttttaatgagttggctacctctgttttgtttccaagtaacactatatttgcaaataaaccactaaatgtttgcttgtaggaaattctatggtttattataaaggaatttttgtggaaagtttaatattgaagaaagacattataaggggaaaaataggggatacactacttttaaaaattttccctaatgttgaacttctatcttgaatgcatagtattacatcagggcacaagaattgctttgtcatatgtcagaccactatcttgtcttttaattttgagtttgtatgccaccaaaggctgctaaacatctaattagtggtggctccctcacccttcctggaaaggcctatttattccatgtaacaactggggaaaaaaaatcaagatttttagagttgcaaaatgaaatattctaaaaggtggttttagaaaaatagttttgaaaatgattgttttatgaaaagccagaaacccattaagctctaccttgaattattttatggctctattatctcatttttgaatttttttttacacttttatgttgtctctaaatgaaacatgaaggctaggaaaaatagtttaatttgttttagtaatggagagaattaagacttcaaaagctcctttacagaattacttagaatgtacattatatgatgcttggtgaagtatggagagcatcatgggtttgctattttatgtgaattacttggtttgaataattgcagtatctaaaattgttatctgtgattggggaattcagtcagctaattttttatggtcttatgatcagatggactttattttggggcaaaatgccattttcaggcaagaaggtgatttttagcaagttttgatcttttttaaaaggtatataccctctcagtgtctggagaccggctgattgtgggaacagcaggccgcagagtgttggtgtgggacttacggaacatgggttacgtgcagcagcgcagggagtccagcctgaaataccagactcgctgcatacgagcgtttccaaacaagcaggtattgaactatacctcctcttctttctggaatttgaaaataatatgatcttatattataatgatttggccactagcccctaaagccttctttttttttttcagtagtgatttagaatttgctgttaggtgtattcttccttgatatttttgacagccatgtgttaacaggaagtgcgttaacccccattttagagacgaccttgatgttcagagagaccaagtaatctgctcaggaagtggtttgaatagaggaggttttctgaccttttgttgatcctggtccaggatgcttcataggtatacagtaatcaaagagcgctttgcagatatttcagtttacaaaatgctgaattaaaatttatatctggattttaagcttatggaatttgctgttttctttttgcctttttgtaaccctaatgcttatggagttctttccccagtttgacaatagaactttgatagtttttttttttcttaaactcaactgagattagagaggcagggcccctcttatgactgactcttgatgtacagggtgggtcaccttccatcatcgctaaatgatattagcctgtttattagtgagctccctcctccctcaagtccttaaagttctaagaggagatggtggtgtggtcaggtgcaataggaattttgcaagaggaaaagtcattaaaaacagaaggtgtctctggtatcttatggctgtcctttggtggttgtagaacttgaagcaggtatgttattctctttgctttttaacctgcaaaggccagtacctcaaatggtgatcacagttcctttttttttaggaaattgtaagtttccatcgaagataaagaattgcagttatgtgaaacttcagagatttagatatgtgattaaaatatgcttacattgtgaacattattttaatgccattatatctaatattttatataggattatttctactttgtaatggaagttaaaaagtaggattttactgacttatatatttcttcataaacagttttcaggaataaatctttttcataccttgaaggattaaaaaatcatagatttcatatttggtgtgttagctcttattttttaagatactgtcatttcaacgaaagatgaaaaaacgtttaaaattgtaaaccacttttgaatgtccctgaaagtctttgtgcaaacctgacttgctgtattaaatgcaagaagtagtatgactgagatggaagactggtgttctagttgatttggattattgatgcccccaatgaaggaaacacaattcttaacagttgttcgcgatgaagaggcacagaacatagaagaatatattttaactgagggaacaaatttgagtctgctgggcaggacaacaaataagcgacactaaaacactttaaatttttgtttaggtttgatgcagtaactagatattttttattgtaatgtgcaaggccctggtacctgtgaggaaagcatgtgatgagtcttattttctttttaaagtcgtcataaccatgttagtacagcctaaacacttcattaaagcctgctgtacttctcatttctgaaataatcactctttagtgtgggttgaatttgggaattagcaccttgtttttggaagctggaatttaccatttttttcctctggttctctcttggcagggttatgtattaagctctattgaaggccgagtggcagttgagtatttggacccaagccctgaggtacagaagaagaagtatgccttcaaatgtcacagactaaaagaaaataatattgagcagatttacccagtcaatgccatttcttttcacaatatccacaatacatttgccacaggtaaagtatggcatgctgacctatatttaattattatactatttggtgcttgctttttatggtatttagtgaaaaaaaatctgtacagtgctttagggaaatgtaacttctatgaccttaaaaattaactgttaagagaatggttatttctgtatctggtgttaagaaccattttaactgttttgaaattacttccaggtggttctgatggctttgtaaatatttgggatccatttaacaaaaagcgactgtgccaattccatcggtaccccacgagcatcgcatcacttgccttcagtaatgatgggactacgcttgcaatagcgtcatcatatatgtatgaaatggatgacacagaacatcctgaagatggtatcttcattcgccaagtgacagatgcagaaacaaaacccaagtgagtatgcttcacctgtatttgagccttttcttgcattcaacccaggatttattaatttttctaaattcatgaatagcattgttgatgcctgctcgatattacagctgactgtagggttggagttgatgttatcatgttctcccaagctttcaatatccgtaggttgatagacgtctgatggataaaattgtgcctagttgttttgtagagaagaatgtcaaactcttattcttcttgaataggctctattatttgaatctctggagttattaccagctcattgcttcaaaattaagttgaggaattcaagaataatttattttagtaaattctatttaagatgtttaagaatttgaactgccaaaaatctttcctctccacagaggttgtttctttaatattaacacaaagtaagtgaccttcaggtcttattggaaactcagagtaatatggccttgcctggaattgcaaatttccttagttttgaaattttcatagatgtctttggttcttggttgtaactgttgactgagaagagccatttacattttttgataccaacagggcaaagctttttacttaattacctctaccaggctttaagggaaatctgatacttcagcatgtgttaaactataaaatacctactccaagtatctgcccagttccttgtcccctctccccaggcccttaaaggaagttctcgatacatatttgtagaataactgaatgttttcaggattcctgtactttgctgagttaaaatggatatggtacccttgctgattggttgagcccctaagagggggcagaatattaaatattccatatcagatatgcttttacaggtttgactttagaaaagtcttagcatgtgaagcctgttggataaagggctgtgtttgcatttaatctgtcacttttgtatctcctgtcctggctggccattttgatctcatgctgttctttttttcttttgaacttgtaggtcaccatgtacttgacaagatttcatttacttaagtgccatgttgatgataataaaacaattcgtactccccaatggtggatttattactattaaagaaaccagggaaaatattaattttaatattataacaacctgaaaataatggaaaagaggtttttgaatttttttttttaaataaacaccttcttaagtgcatgagatggtttgatggtttgctgcattaaaggtatttgggcaaacaaaattggagggcaagtgactgcagttttgagaatcagttttgaccttgatgattttttgtttccactgtggaaataaatgtttgtaaataagtgtaataaaaatccctttgcattctttctggaccttaaatggtagaggaaaaggctcgtgagccatttgtttcttttgctggttatagttgctaattctaaagctgcttcagactgcttcatgaggaggttaatctacaattaaacaatatttcctcttggccgtccattattttctgaagcagatggttcatcatttcctgggctgttaaacaaagcgaggttaaggttagactcttgggaatcagctagttttcaatcttattagggtgcagaaggaaaactaataagaaaacctcctaatatcattttgtgactgtaaacaattatttattagcaaacaattgatcccagaagggcaaattgtttgagtcagtaatgagctgagaaaagacagagcatatctgtgtatttggaaaaataattgtaacgtaattgcagtgcatttagacaggcatctatttggacctgtttctatctctaaatgaatttttggaaacattaatgaggtttacatatttctctgacatttatatagttcttatgtccatttcagttgaccagccgctggtgattaaagttaaaaagaaaaaaattatagtgagaatgagattcatttcaatgtaatgcactaaagcagaacacgaacttagcttggcctattctaggtagttccaaatagtatttttgttgtcaaactttaaaatttatattaatttgcaaatgtatgtctctgagtaggacttggacctttcctgagatttattttatccgtgatgtattttttttaattcttttgatacagagaagggtctttttttttttaagtatttcagtgaaaacttggtgtaagtctgaacccatcttttgaaatgtattttcttcattgcaggtccacctaatcatcctgtgaaagtggtttctctatggaaagctttgtttgcttcctacaaatacatgcttattccttaagggatgtgttagagttactgtggatttctctgttttctgtcttacaagaaacttgtctatgtaccttaatactttgtttaggatgaggagtctttgtgtccctgtacagtagtctgacgtatttccccttctgtcccctagtaagcccagttgctgtatctgaacagtttgagctctttttgtaatatactctaaacctgttatttctgtgctaataaacgagatgcagaacccttgaa

SEQ ID NO: 17 - DNA, 2449 bp, Homo sapiens
atataagcgttggcggagcgtcggttgtagcactctgcgcgcccgctcttctgctgctgtttgtctacttcctcctgcttccccgccgccgccgccgccatcatgagggaaatcgtgcacttgcaggccgggcagtgcggcaaccaaatcggcgccaaggtaagttgccggggcgctggggccaggcgggcctgccgggcggtgtgggcgggcggccggggaagatggcggcagcagcggccgggcggcgcccccgcattgcggccgccgggccccctccgcggggaattggccgagccgggcgaccgaagcccccaggaacccggcggccagggcgcgcggggcgggggaggggcggggagggccgggctgccgcgcccgtccggggcggggctgcctccctgcgcaccggccgcggtgactcagccccggcccgcccgggcccgcccgcgtcccttgtagttttgggaggtgatcagcgatgagcacggcatcgaccccacgggcacctaccacggggacagcgacctgcagctggaacgcatcaacgtgtactacaatgaggccaccggtgaggccccggccccttccccgaccgccctccggggaccccgcggcccctgccttggctgacgccctcccgtccccgcaggcggcaagtacgtgccccgcgccgtgctcgtggatctggagcccggcaccatggactccgtgcgctcggggcccttcgggcagatcttccggccggacaacttcgttttcggtgagccgtggctggggactgggcggcggctcaaaggtcaaggggctgctccaagggcaccgccgtgggaactgcgcagccggggcccctggacgccctcctcttctctgagccactcaatcccctctactaaatcggctttgggagcaaggtccagctgtctgccgaggcgaggagccgccacacacgtaatctccctgcagggagctgagctggggcagtggctgttcctctgtccttgggaattggcagtggcccccccggggaggggtttgttaagctgtcaggtttggcccctgacttaattcgtagcagggcaggctgccgtcttttggctttgaagggtccgtttgctctacctccagggtgaattctgtggtcagctcacaccatgtcactcggcttttttcgcatggcggtgaccagtagtgctgtctacctggctgacaaatgattagctgtgttctctcacaggtcagagtggtgctgggaacaactgggccaaggggcactacacagaaggcgcggagctggtggactcggtgctggatgttgtgagaaaggaggctgagagctgtgactgcctgcagggtttccagctgacccactccctgggtggggggactgggtctgggatgggtaccctcctcatcagcaagatccgggaggagtacccagacaggatcatgaacacgtttagtgtggtgccttcgcccaaagtgtcagacacagtggtggagccctacaacgccaccctctcagtccaccagctcgtagaaaacacagacgagacctactgcattgataacgaagctctctacgacatttgcttcagaaccctaaagctgaccacgcccacctatggtgacctgaaccacctggtgtctgctaccatgagtggggtcaccacctgcctgcgcttcccaggccagctcaatgctgacctgcggaagctggctgtgaacatggtcccgtttccccggctgcacttcttcatgcccggctttgccccactgaccagccggggcagccagcagtaccgggcgctgaccgtgcccgagctcacccagcagatgtttgatgccaagaacatgatggctgcctgcgacccccgccatggccgctacctgacggttgccgccgtgttcaggggccgcatgtccatgaaggaggtggatgagcaaatgcttaatgtccaaaacaaaaacagcagctattttgttgagtggatccccaacaatgtgaaaacggctgtctgtgacatcccacctcgggggctaaaaatgtccgccaccttcattggcaacagcacggccatccaggagctgttcaagcgcatctccgagcagttcacggccatgttccggcgcaaggccttcctgcactggtacacgggcgagggcatggacgagatggagttcaccgaggccgagagcaacatgaatgacctggtgtccgagtaccagcagtaccaggatgccacagccgaggaggagggcgagttcgaggaggaggctgaggaggaggtggcctagagccttcagtcactggggaaagcagggaagcagtgtgaactctttattcactcccagcctgtcctgtggcctgtcccactgtgtgcacttgctgttttccctgtccacatccatgctgtacagacaccaccattaaagcattttcatagtg

SEQ ID NO: 18 - DNA, 26743 bp, Homo sapiens
actgaagagtcatggtggggcccgggcctaccgctgctgccgctgtcggtgagtacgaccgctgttcccgttattctcaggcgttggaacacggccggggaagtaggaggccaccgagtgagttcgtcccgcgggaggtgcccgtccgctcgcctgcctaagtttcccctgggcgttttccatcccgggagcgcagacgggacccccaggtagacgtctgggtcctgggcgggggaggctgtgcgcaggcccagatacctcacgggcgtatttccagaaagccctgcagcagccttgcaaagagatgtcattgtcaccacgttccggataaagaaactgaggccccttgctcgggttttcaccagcagtgggaagctgcgcgctgttttgatccacatttggctccaggcagagccgggcgtggtcctctgtgccaggaggcggggtctggccgaagcccgggtctcctgcctctggcggggctctcactccacacctctcagcctgcggtggttagaagttgattggttaaatctgcacccagggctaaggcttctgcgttccctaatctcttagatgtgcttggagccctttcctacctttcaaaatactcctgctcagatgccactttctccaagatacgcaccgttgttttgtttcatccattattcctgttgatgcctacgaggtcctaggcactttacataacaagctttaaagatggcatttctgtccgccttataggcttagcagcagcaaagtttgctaatttgctagaagtcacggaggtgggactccaaccccctatgtcagcccctacgctctacattgcccgccaagctgtctctaaggatagatacatgagcatcagagagcaaaacagggcaactccgttcagatgaggttaagagtcgtttggcacccctgtcgtctttttgtcttccttcacatcattatttacttttaaccttttctagccacctactcccctcatttatgccctacctctgaactcccatacttcttttcgtctcttatggcccttagattttaccttatactgtaattgttgctgtgttgattttatctccactactagtttgaaagttcttgaaggcagaaattattgacttgtcatcccctcacaaatggcttgcgtagaaagtcaccatagtataggtgtctgccgtgagcagaccgggcgtattttatccttagtaccaacaaaggaagccatataagggtttgtgggtaaaaatcatcatccctgtaaaaaaacaaaagacgtaagaccaggcctggctcaccagctcaggtgggccagtaacagaaattcttcaaaacagactgttgtagctgagaacagtggctgtgagctccagggttagaaaagcctgttttcaagtcctggaattgccacatattagctgggtaactttgggcatgacatttactctctctgaatttcagattgcaaaaactcattggattgttttgtggattgaaagcaataatgtaaatttaggccgagtgctttgacttacgcctgtaatcctagcactttgggaggccaaagcaggagggtcacttgagctcaggaatttgagaccacccctggcaacatagtgagatcctgtctctacaaaaaatttttttaaaattatccagcatggtggtacacgcctgtattcccagctactcaggagactgaggtgtgaggattgctagaacctgggagatcaagtcaacagtgagccgtggttgtgccactgccctccaacctcagtgacagaggaagaccctgtctcaaaaaaaaaaaaaaaagtagtaagtttaaagaacttagtgtaggcctggcatataaatgatattgttgatgttgatgttagcttgaaggcacatttataggactagggattttataacattatgttgcaaaggcaaaatcactagagaaaagtgtcatcttttagaatattaatgaactggttaaaatcttgaactaaagttatgtcgtttgtttgcttgcctgtgttgcagaagagcggcagagaaagcttcaggagtaccttgcagccaagggaaaactgaagagccaaaacaccaagtgagtttatctgtccacagttacgcaagttttgttgccttctttgtactagcaatttaaagcctttttgaaaaatgtcccttttgcttagagtctactcagactgcactgggattctatgataacgcaaaaagagcatttcagtccaggcatgacaaaaacccctgggcagtgcttagtccattggcaaagctttatgcattattactgtgtgaatctccaaaggaaggagggaagaagggtcagtattacctaccatgctggaagctttgcctgtttctgctttttttttcttggggaagttgattctcatgaaggcagtttttggtcaagaacttgaatgaccatggttctggcatttcttgctaaggcaggagagccagttacaatcaatcctccgtagcagagtgataccctctgctcttgggtcattctcttagcatttactgttaaggtagacagaacatgtccacttcatttttatcctttgtagattcttaccatctttgtcgtgttatttgtcctttcttagcattaattaattttttccccatttgagttgctaagtatttatttgaaaattaatttttacaaagttagctttcaccctttattttatcttgggtgtttactcacctctatttccttgattaaatgaacctaattcacttattcaacaaatatttatttagtacctataacatctcagtcacttctgatgctagagataatggcgcttaacaagacagacattcctgccctcccagggcttatgctgtagatgggagagacaaacatcaaacaagtcataatcaaagtccttgttagtctagcaattgtttttggtccatgcagattgattccttctaaattcacctctgttttccaatcctttttctgcatttcctgtctcactagctatatttcatgtgtgtcttggtttttttttttttaatatttctttacccccttaaagttagaagagatagtatttgaagatactgaaaacaaggaaattttttttttttttttttttttttttgagacggagtctcactctgttgcccaggctggagtgcagtggcgcaatcttggctcactgcaagctctgcctcccagtttcacgccattttcctgcctcagcctcccgagtagctgggacaacaggcatgtgccaccatgcccagctaatttttttgtatttttagtagcgatggggtttcactgtgttagccaggatggtctctatttcctgatctcatgatccgcctgccttggcctcccaaagtgctgggattacaggcgtgagccactacgcccagccggaaattttttaaagaagcagttaatggttttatttggcattgtgtcttcggtgtctggcacattgcagtgctccaggaatgatgtgtgaatgagtaagactatataaatatgaaggaaacacatatatctcattaatattgtgagaatgctagatttatgtatagacagtctctgtaaggatcacaaggcaaaaaaaaaaagagtaggagcagttggtggtctccaagggggaggatacagaactaaagaaatgatgataaggagactttattaaatataattttgaattattttgccattacagaaattctaattatttaaaattctattcataatttttaatcactgtacttcccaagcttagcttagaatccttctgtgctgaggattaattttaatttgtcttttataggccttatctaaaatccaagaataattgccagaatcaaccaccttctaaatctgtaagtagaaattagtctttttaaaaatatgcattcataagtatgattagtaataaaaataataaagatgttagcaacctaaagaacatgtatttgaaaggtatttcttacagatataaaaacagtttggtttaataagagacaatcattttttgaaaagtatgacattttttgaaaagtagtttagttttattaaccaagaaaagcctcaagtgaactttagtcctcttgatagctaacatttattgaatgcttactgtgtgcctgatacttttctgacttgcattacctcactgagtcctcacaatcttatgaggctactattagtagccccactttacagataagcaaactaagtcacagaaaggttaaataggtcgtatagctattaagtgacaaagctgagagcctgtgatcttaaccactttggtatgctgccatgaagttaaatagctcagtagtcattaaaagagaacatttgcattgaaccttccaagccacttaacaagtatatgcttcctaatcaatttaatttagctacattagatagaatggtaaaggatccttaacttaaagtttaaatggaagaaattagccctctgaaagaggcacagattattcatctgcaataaaaatctcacctttagttttttaaaacatagtttttatctgtgttctgaaatgtaactaaaacagtgcttcctgaagtgaaaaattctcactggtgagaattttaataagttttaatgattcaccaaatcacttcagtcatatttcagtcatatgcatatgcatatatagacatataagtttttatctgtgttctgaaatgtaactaaaatagtgcttcctgaagtgaaaaattctcactggtgagaattttaataagttttaatgattcaccaaatcacttcagtcatatttcagtcatatgcatatgcatatgtagacatatatatgttgtatgtatacatgacatcattagacactgtgaaggatagcaaaatgtatataaggcaaaatttatgaacaatggtttaacgtttgggaagcactgggttacacttttactttatgcagattgaaccagtatagtatgcaagtcttaaggaaaaatctactggaaagggccctcattcagacttcccagaggcttctctggaagttgacaatactgacttcagtacatcagctcgtaaatgaggatgatacctaccttatctgctttacacagttgtaaaagtaaaaagtgaactcaggaagggaattacagaatttaggagaaactaaaagcacgatgtaaataatagtcatcattacagttatataatgcttgacaatttatataacactttcgatacatgacaacaataactaacacccagacatgtttatatacattacctcactcagaacaaccatgtgaggaagttggccatatgctttaatgtccaaaccaggacactttgagagtaaaaagcagtactctttgaccaacaggcataaatcaaaactatcttgtgaaaaccgggatatatggcatccttcctagataatagatacttttactattattaattttgctgtgaatctaaacctgctctaaaaaagttaattttaaaaagtaatgaagtactgatacatgctacaacatgggtaaatcttgaaaacgttatgctaagtgaaagaagccagacagaaaaggccacatattacatgattccatttatatgacacatctaaaataggcacatctatagacatacagagacagaaagtagactagcggttgccaagaactgcagggagcagaaaatggggagtgactgccaacaagtaaaccaagtttctttctagggtgatgaatatgttctggaattagacagtggtgattgctgtataatagtgtggctatactaaaatccacagaagtgtgcacttactaaaatggtgaattttatggtttgtggattatatcaatttgtttttaatatataagaaagcaactaaaaaaacacatttggaagctttcatgccaacgtccctccacctcttcagtaagcaatgatggagagatccgaggtgtatataaatgttggtgctcaaagattaatccagatatagccattgtgggtataccatccatctctctgcctcccactcccaactccgctgtttcactcctagtaacaccacacacaccgctatcatccagagtagacatctctttgccctcaatgccaaatggttctggttagaaatcctttacatactcgccaagtttatgtagtgattcttcacaatatttgtcaaatcaaaaatagagtggtaactctagcattcccatatcttaccctggaaacatattccataaatctctgtgaaattctcctttctgagtaattgctttcatgagagatgctcaggaattcatagtggcttgcccaattacttaccatatgaattctaaactcccttccctagttttcaaaattctctgtaatcgagtcctacctttcttatccaaacttaaatcacatgactaaacatttgtttattattaacatagactctaaccttaaaaccctgtcctggctgattttacaaatatgactattaagatgttacatgtttattgagagctgtggcagcatatctcaggcctcacatcatctgccacctatctccttgtcactgatctccagggatgagacagaggttcttgagtgatactgtgatgtttacaaaggcagtggtttaaaaaacatatagtgtggctatacaaagtactaggagagatttgttgggaggtaccctaacataagttcattatgtatgtattttttcagggttctttggagggcacttaggatataataggcattcaacaactactgtttgaggcaaattcatttttgaaagagcaagttttgtatattcactgcatctctgcttaattctgtcaagctaaaagattctaatatacttctgataggaactcaagttgtaaaaactacctgttaggacaggtgtggtggctcatacctgttatcccagcactttgggaggccaaggtgcgtggatcactggaggtcaggacttcaagaccaacctggccaatatggtgaaaccccaactttactaaaaatacaaaaaagtagccaggtgtagtgacatgcgcctgtagtccagccacttgcgaggttggggtgggagaattgcttcaacccaggaggcagaggttgcaatgagccaagattgcatcactgcacaccagactgggtgacagagcaagatcctgtctcaaaaaaaaaaaaaaaaaaaaaacacaaaaactacctattagtgagtctttctttactttctgaggattcaactttcttagatgaaattctaaaaatgattattttttttagcatgtgttaaacacagttattattttaaaaacaataagatatgttaaggattttttaatatgtattttctttgttttttcagactattagacccaaaaatgatgttaccaaccatgttgttttgcctgtcaaacctaaaaggtccatcagcattaaactccagcccagaccacctaatactgcagggtcccagaagccgaagttggagccaccaaaacttctgggcaaaaggctgacttcagaatgtgtttcttctaacccatactctaagccttctagcaagagttttcaacagtgtgaagctggatcgtccacaacaggagaactgtcaagaaaacctgtggggtcacttaatatagagcaattgaaaactacaaagcagcagttaacagatcaaggaaatggtaaatgtatagactttatgaataatatccatgttgaaaacgaatctttggataactttctaaaagaaacaaacaaagagaacttgctcgatatcttaacagaacctgagaggaagccagatcctaaattatataccagaagtaagccaaagactgactcttataatcaaaccaagaacagtttagttcctaaacaagccttgggcaaaagttcagttaatagtgctgttctgaaagatagggttaataaacaatttgttggagaaacacaaagcaggactttcccagtaaaatcacagcaactctctagaggagcagatcttgcaagaccaggagtaaaaccctcaaggacggttccctctcactttattcggacccttagtaaagttcagtcatcaaagaaaccagtagtcaagaacatcaaagatataaaggttaataggagtcaatatgaaagaccaaatgaaactaagatacggtcataccctgttactgaacagagagtgaagcacaccaaacccagaacataccccagtttgcttcagggtgaatataacaacagacatccaaacatcaagcaagatcagaagtccagccaagtttgtatacctcagacatcatgtgtactgcaaaagtcaaaagccataagccagaggcctaatttgacagttggcagatttaattcagccattccaagcacccctagcataagaccaaatggaaccagtggtaataaacataacaataatggctttcagcaaaaagcacagactttggactccaagttgaaaaaggctgttccccagaaccattttctgaacaagacagctcccaaaactcaagctgatgtcacaaccgtaaatgggacccaaacaaacccaaatattaaaaagaaggcaacagcagaggatcgaaggtactttgctttaattctaagcttttgcaacttaagatgattaggcaaattgaccatcaagaagactaggtcaggaaataggccataaataatggctcctaagtaatttttaactacagtctgaaaaaagatttgaagcaaatataacaaatattaagacttgacagggctaggtggtacatacacatgttataaatcattttctgtaatcgtatgtttacaatagctttttttttttctttttaagaaattgaaacagaatggatgagtaagaagtagggggtgcagatgtagacactcgttcaataagtgccgtgctagactgaacagcaatagagcagataagtgagttcacatagctaggaagtgagaagatggtaatctcttgtcaagcaaaccagtggttaagttcagaaaagttaccagggaagaaccagaaacttccgtgagtctgagtgggccaagttttggccagtaagctcaagcaggagcagtcagttcaaatacagagttcagatggtagaaatcaagatcttaggccgggcacgctggctcatgcctgtagtcccagcactttgggaggccgaggtgagcggatcacctgaggtcgggagttcgagaccagcctgaccaacatggagaaaccctgtttttactaaaaatacaaaattagccaggcgtggaaatcaagatctcaggttggttaatattaacatacattgattaaaactgagccagtggattttgtacactttctacccaggaccaaatgtagtctcatgaagtgggtgagcctcccaggagaagcacatatgtatacctgcttgaagtagaaaataaggaaatttctgacgagtgaagggagcatgtaaaattagatggttgctaaaaagtgtagcagggtgaagcaaggtacagcttggtacagccctgaacaccaccaccaagctccttgccctcctgaagagacagtaagtaaacaacttaattcagggtgctatgatcaagagagtagggctggaatggctgctttagataaaaggatcagtagaagtactttcaacagcaatgtctgagctgagacctaagtctgagaaaagactggtgacaagaagaaaaacaatcctgagcagaaagagaagtgagtgcagagaccttgaggtggtgaataaggaagtcagggtcccagccctggagctcagcctaggtcagacaacagaggattggtcataagactgtgttgcaggttgaacatgtttgattacaaaagagaaggagtctagagagggagagattcattcactcattctgtaggtgtttcttcagcacctgcagtgtgccaggcgctaggagacacagtgatgagcacacagtgagtctttacctttctggagctaattgtttggtgtatatatagaaagtactagagaaacaaaattatggcatcgaggtcctaggagtaagttgcctttagaaagggaaagttcactcttcgtttatgattagaaggaaggctaaggagatagggaaaatgctaggaacatggaggaagcacatgccaaatgtctcaccttgtatcatcaagtaggtggttggagtgaaggtgagggggcagtatttggggctgaaataataaatattgcatggatgttgctctggagtcagaaatgagagttaatagcattcattcattcaaaacttagttattggcattctggaaaaaccaaaactataaagacaaaaaacggatcagtgattgccaggaggggggcgttaggggtgagactgactaccaaggagcatgagggaattagtgatagtgttgcaaccatcttatagcttgataatagtcagacttaaatgacttgatgcatttgtcaaaactcagaattgcacactaaaaggtgaattttactgtgtgttattaaatacctatgtgtgctaggcactgtgctgggaactggactgccaaggtttctgccttcatagagcttacactctagtggaggagacagaaaaccaacacattgactaaataagacacggtaattacaggtaattgcgtcttcatggaggtgtcatttgaggggaggactgaagatgcaagaccttaaggcaggaatgagtctggatcaagaaacttcaaggaggcagggtacaatggttcacgcctgtaatcccagcaccttgggaggctgaagtggtcagatcacttgaggtcaggagtttgagaccggtttagccaacattgtgaaaccccatctctactaaaaatacaaaaattagccgggtgtggtggcacgcgcctgtaattgcagctacttgggaggctgaggcacaagaatcacttgaacccaggaggcggaggttgcagtgacctgagatcatgccacttcactccagcctgggcaacagagcaaaactgtctcaaaaaaaaaaaaaaaaaaaaagaaaagaaactttaaggatacctgagctcctggagggggtgagtgacagggagactagtgtgatacgaggttggagaggtaggcaggagccagattacactgtgcctttctgccttggaaaatattttgaattttattccaagagctgtggaaagttcttggcagtgacacagcctggggtgctatttaccaaagtaagaaaaatttgtaacagatgcagagatgaaaatcaataactttgtttgtgacagtattaaatttgaaatgcctgtcagacatcaaaagatatcaactaggcggtgggttttacaaagtttggggatccagggagagatctggactgaaatgtacacttggaagtcattattaatatgtagttgtaatttaaagaaactggagtgtctacatccaaacatgaggtctatatgtcttggtgcccctacccccaaaaagcagtctatcacctgttagaagctggagtggaaaatgtgaacagtgggggacacttggcactatcagagatcagctacttaagagccctgactttataggtctagcttatgaaagagtcatgtctggtcaagagagggctaaggaactaggtgaagtgggtcagtttacacaccaagaccttattgagggtagaatgcaggcttggtgggtttgggttgagtgacagcttatgcgtgagagaaatgaattgctgagttagtcatctcaaaaatagagggatgtcttaggaaagcaagtgtcaagtagcatatagtgaagtgaaaactttccgagaaaaataatgcataatcacgaattctatttgaagtctgaagtgctggccacgtgtgatcttagaatcttggtgtctgccttctcgtgggtgggcgcaacccaatgctgccattacccatttgtaaattgttttttaattccattctcctgattttgtctgtagttgaaagtatttaattatactctatctatacatatcatatactttagcagcttgactatgtttaaaaataaataaaaccactctccctttaattgaatttcaggaaacaactagaagaatggcagaaatctaagggaaaaacctataaacggcctcctatggaacttaaaacaaaaagaaaagtaataaaggaaatgaatatttcattctggaagagcattgaaaaagaagaggaagaaaagaaagcacaactcgaactgtccagtaaaattaacaacactctgacagaatgtctgaacctcatcgaaggggtaagtgaagaagataagctcctccagctttggcccaaagtcttataatttttaaacatattcctaaatataatataggagagatagccttcatctaagtagaaatttagctactcttgtaaatacagagtaataataataatgacatgcccataaacagtgtcttttgtgtatctgtgcttttataagcacttagctaagattatctcacataattatcataaccactgttactatgaccactttacaaacaaaactgaggcacaaagaagttggaaaactaatccaaacaaactggctccaaaaggaactttgctttctttgggtatcaagttctgaagagtacacatttaacattgaaactgaggtcagaaggcaagtttctgtgtaaagttggagtattctgaatactctgggtagctacaaatagtatttaaattttatcttggattctgcagataaggataaaatagatggtaggcaaagagtatgatccttaggagaaatttttcctgaaggaaaaatatattaataaaaaatgatggaataaacttctaagatccttgcctagagcaaaactcattcagtcctttggctggtaatgttgaacatcagcaaaaaaaaggaaaagttcagtttaagtctactccaggcaacattttcacaacatccagttaaatattaactatttctccttgtggaattgaacttgagttctttttcttatcctctttttttgttgttgtattatttaaaaatgagtacctttttattattgaaatcatttcaagtaatgcagataaatgatcagccctctccctctacaaacatacatacttaggcatcccaaacttctctctggaggtgaccaccattgccagtcattcattctgttttcatgcatgtccatacagtataggtatgtcgagaaatgaagtattatatttttgtgagttgcaattcttttattcacatttttgtgtactttggttgtcttttcttgtgttttcctagtaccaatgttatgctgacttaggcagatgagttgagtattttcctttttgccctataaactgaaaatagtttgtatgacatgagaattatttttattttttgaaggtttgataaaaacttgcccataaaaatcatctggaccgtgtttctttggaggataattttgtatatatcctctcaatttgttatggggtcattgttctagagttcatatatcttgagtcaactttagtaattttgtgactttttaaagggattttttctcaatctttttaaaagatctcaggttttattgccaaagattttttctcattaatctttttaaaagacctcaggttttattgattattttttctcttgcatcaatgtctgcatctatttttatatttattgctcttttcctagctttttaattgaaaccttagatcatttaaaagtgagtctttcttttttttttttttataaatatgttcagtgctatagcagatttgcctctgaattttactttggtcatatccctcagatttgactaagtaatactctttatcagtcaggatcaagtctgaaaaacaaaccacagaaagaatgtaattggttacacagtatcttatgtgggttctctagaggtggagcctaagaggagaatccatgtgaaagtagtttattaggaagacactccagggaaaactgggaggggagtgaagttgtaggatcagaaaagcgaatccatggacggtgactctggcacagccccacaggggagctctggagacagtgtaggtcacatctctcagagtcatcctgatcagaggcaagggagctacattgttaaagcttccatggtcatttattcatggctgcctcgggcggacaagaattgtcaggcacttctcactctctgggcacatacgagggagcacagatgctggctgtgaaagcacgcggtaagcctgtgtgcacaagatgctgaagggatcagaaggagtgtgggtgctacacacagggctgacagcacacaggaacctgaggtaatgtgataactgtaggaagcagcttgtacccactgggtctaggagaacaaagagaggttagggtatcagaaccaagaagcaggagagacaaaccctggtagaaatgggactccaactgtaaggaaggcatactacccagcagatgatggaggagaggccctgcagggctggggctcagattttgaggaaaagatgctatccatttggtgcttctgctctgaagctgcacagggaggtgggctctgagggggaaaaaaagatgctagaaccaactgttactgccagggtgagggaccgttgctggggtgatgaaagcaaataggaagaagcaagtgtcttccttctccatccctgcagcctccctctcgtgccccctgctggcagagctgagcagggagctgctgcccagcagaaagttttacagagttttatccccagcatcacaaagcagaggatggggtttggggccaatagacaaaagcttcataactgacatatcttgtcattgttcatttctaaatagcttgagattcccattttgagttctttaacccaaaaaatatcttagaaaagtatcttttaatttccagatgtgtagattttttttttctgctgttaatttctaattatattgcattgtagttggtgaatgtggcctatgtgtactctacttgatggattttgttgaaattttctttgtggccttaatatctgatcattcttggtaaatgttccaaaagtgtttgaaaataatgtatatcctatttgtttatttgatctattgctttctgaaagaaatatgccaaagtctgtcactggcactgtgattaatcattgacaatttctcttcatatgtctgtcaatttttactttctattttttaaagttatgttgttaggtacagaaagattcatgacttgctttgatttcttttgtctgattaatcttgccacacctgctttttgttgttagaatatgtctggtagctctggtagctctttttccatccctttactttaagccttcatgggctgacttattttaggtatgtctcatataaatgcacacagttaaatgttttaaacaaatttgaaactctctgcttttaaaaagcaaatttagttcgtacacatttattatgattacttgtatgtttaaacttatgcctgctattttattttgtaattcagcttacatgaattattttttcctcatttctgtgtttaatctagttttatttcataaaataatacactgaaatgaaaataaagtgatagatgtaagctcaaacatgatttgcagaatatatatcatattcttcttgcagttccttttttcattttttttttttttttaagagacagggtttcactcttttgcctagattggagtgcagtgatgccatcatagctcactgcaactttaaacctcctgggtggacccaagtgatcctccacctcagcctcctgagtagctaggactacaggtacacaccactacacccattatagtttacatttttttgtagacacagggtctcactgtgttgcccaggctggtctcaaactcctagcctcaagcagtcctctgcctcagcttcccaaagtgctgggattacaggtgtgaaccacccactgcacctggcctgcagttacttttatttcaagtctttcatgtgaattctaaagtttactcactagtgactttatgatttttgaatggcaaaccttttgagtctgtattcttgtgaaacttgttatttgccttcatgctggaatcatagtttggctgggggaaatttcttaatttcagcttgttttccctggaaaaatttaagtgactgcttcattttctttcttgcatctggagttgttgatttgttaatgtctcacgtcagtctgattctcattcctttataggtaatccttttcttccccctctctggaagcttgtacgattttctttttatctttggttttctattatatttttttctcccattcatcctgcttaactatctgagagccttttcaacctgaacaactgtttctttgttcatttcttgaaattcttcttctacaaccactttgtgtgttgaacttttttccttctagaaactctcttagatggatattggagttattgagtaatggatatatccttcagaactctaaatgttgttttcatactgttcacttcattgttttattacactggtttctaggaggatttcacagctgaattttcagctcacagatgtattcttcagcgctgtccatgcagttgttctgcctttctgttggttatttttcataacagcccattctagttttaggatagcaatactctctcttatcactctgaagatattgactgtgatactcttaaaagtattcctctttgctccagtgttcattcttgtttgttgagttttatgcctctttcatgtagtgttggttttctcaaatgttagtgattctcaattgtgaacttacctttgcgtctcccccatttctagcagtagaaggtgctgcttggctgagtgtgccagtacctggatttctgggcatggtagtgctccccattcgttgggtccatgtcactgtcctgcttacggcacaagccagaagggaaccaaaccagtgaatccatttcaaattatctttttgtgggatttaaccctctttcataaacacctgcataaatccctgacacttacacatatacacccctatgaccttcgcatgcctgtgtcattctttacactgctattagtcctatggaaattctcatcactactcagtgttctcgttattataaatatggaatattatgaatatgtaaatgtttactctaggatttgttttgtttttgtaccatgtaaaaatgaacatatttcttaccttcagctatgataaacattttctatttggtctcatataactcttaaaatttaatgatgaggaagccaggctcagtggctcatgcctgtggtctcagctactcgagaggctaaggtgggaggattgcttgatcccaggaggtagaggttgcagcgagttgtgatcgtaccactgcactccagcctgggcaacagagtaagaccttgtctcaaaaaaaaaaagaaaaattaagccaggcatggtggctcatgcctgtaatcccagcacgttaagaggctgaggtgggcggatcacgaggtcaggagatcaagaccatcctggctaacacggtgaaaccccatctctactaaaaatacaaaaaattagccgagcatgtggtggcatgtgcctgtagtcccagctactggggaggctgaggcaggagacttgcttgaacctgggaggtggaggttgcagtgaaccgagatcgcgccattgcactccagcctggacgacagagcaagactccatctcaaaaaaaaaataataattattattaatctcaaatcattaaaatggataattaaaacaggtgcattttattacatgtacattgtacctcagtaaaattgaaatttttttaaaagttcaaaaatattagtgatcaaaccaatttctgcatacctgctgtaataaatattaggagatgtgagactaacagtgaaatggtaataattacctctggatattttggtttatttcagggtgtaccttctaatgaaatacttaacatattgtccagcattcctgaagctgaaaaatttgctaaattctggatctgcaaagcaaagttgttggcaagtaaaggcacctttgatgttattgggctatatgaagaggccattaaaaatggggcaacagtgagtatctgtcttgggtgggtaacttcttaaaattctctttcatgtgagttctctgttgttgtttgtaatatgatggttagaagtttgcaacatcaatatccaacacttataaagtcataccttaccataaagaacttaaaaatatattaaacccaatacgtcagcatccttaaatcaataattcagagccattgcatgaaataacttttaattctaaaatttagaaaaaaaaactatataattattatttacaaaaactgcatcaaatagttttataatgcttttccttaaaatgtcattttccatgtcatgttctgtattctgtgtgatacctttttccataatggttcaaaatcagaattgtacatgcacatagtttaagcagtcaagtagtttgataagtttcgttcagtaagacctctgccttccttccctcccattttccccttcctagagcaaactgatttatttttatattaacctctatagtttcagaaaacgtgtttctgtttcttgatttttcagttttagatatgatttatggacttccagctatgcagagtgaagatttagccctctttcacacatacatacacagatccccagcacacacaaatacacacccctatttaccatccttatagacctttgccattccttatactttcattagagtcatggaaattctggtcactatttagcattcacattgttatgaatatataagaaatatatgggctgggcacggtgtttcacgcctgtaatcccagcacttggggaggccgaggcaggtggatcacaaggtcaggagatcgagaccattttggctaacatggtgaaaccccatctctactaaaaaatacaaaaaagttagccgggcgtggtggcgggcacctgtagtcccagctactcgggaggctgaggcaggagaatggcatgaacctgggaggcagagcttgcagtgagccgagatcgggccactgcactccagcctgggcaacagtgcaagactgtctcaaaaaaaaaaaaaaatacatgaatatgttgagccatgcaatatatactatgattactttgcctttcaagcacaactttctacttttcctggagttattgtcttgttttgcctttgcttagttttctgagtatttattatataattaattcacaaactcttcgctaattgtctaagttcctcaatactttgaaaacatcagatattctattgattcctttttcttagataaagagctttctcctagacccttctggcttattccagactgaacaagttactttttactgccgtcttcaccagctgtctttctgggatctctttaccatcacctttagattccctttacatccttcttaagttgggtggatcccttgtttttagaacccatattagttttcttcttcctacattgtctatttcttctccaatgtttttcatttctttctctcttgttattgtttgtttgttctttttgttttgttctctattattctttaaaggctttacacagatgctggtgaaactgggctgtttgcacatataaaaggtgggtctgaaaaagcttatttaaagcccgagacacatggatggggcttcaacacagggtgatctggctgagttgactagttagaaaaccctcaatatcagtatctttaggtctttcctcttaagctggtcaagttatctggagaaatctgttccaatctccttcctgggagctagacaccaggctgccagtgctgtgggagagaagagagcagggagtctcaaccctcaacatagaaacttttgcttatctccttttctcagaaagcaccctatcctaatcttgcatgatatccctcagagacttgcagaatacattcccagttttctgttaggatgaagggagtcagacacagttactaggctgcatagagtttaggggtgcaggatggatttggaggtctgactgctttttgaacagatgctaaagagtcctcctaatttgggccctaccacccattccttagcctttctgtcaggttgtttcttagccacactgccagcttgggattcaactctctcaagtagatcaaattgtttacctctcttccttctgcactgcagcttccaaaaccttattgtcatttcttctctcctatgttttgtggttattgcctcttcttaatccctttattatcctttcagtcgattttcaagagagattagaaataaacgtatatttaatccaccatcattaaccagaaggctatacaaatataaaatatgcttgatgaatgttgtatagaattcactctttgtaatatattctatacatttattcccattcatttagctgaaatcataattctattttggattttgaaaaaatgtacggaaagctttgcttttatgctttattgtcagtttatatctatttgatacagagttccaggtaaggaagacaaacctccaactataattttcttgtgggaaagtgcagcttctgcttcatggcatggtttacatacttgaaaaataaagcctatctcagataattttatcagaaaattacttttccatgaaggtttttttttctaagtatgttaacaaataaaagaagaaagacaggaaaagctggagaaaattactcaaaatgcctacaaagattgtatctgggccaggcacagtggcttacccctgtaatctcagcactttgggaggctgaggcaggcggatcacttgagatcaggagtttgagaccagcctggccaacgtagcgaaaccccgtctctactaaaaatagaaaaattagccagatggggtggcgcatgcctgtaatcccagctcttcgggaggctgaggcaggagaatcacttgaaccctggaagtggagtttgtggtgagccgataccgcaccattgcactccagcttgggtgacagagactccatctcaaaaaacattgtgtttggggccaggtacagtggctcactcgtgtaatcccagcagtttgggaggccgaggcgggtggatcacgatgtcaggagatcgagaccatcctggctaacacggtaaaaccccatctctactaaaaatacaaaaaattagctgggcgtggtggtgggcgcctgtagtcccagctacttgggaggctgaggcaggagaatggcatgaacccaggaggcagagcttgcaatgagccgagatcgcgccactgcactccagcctgggacagagtaagactctgtctcaagaaaatatatctatatctatatataaaatgcattttctgtgtggctagctttacatcattgggccagaatttttatgtaggaatacatatttgacagtattatacaaatcaataggaaaatagaatttgatgtagacaaattacattatggacaactttaaatacatctgttcattaagtcgagtgtgccaacacttaatcagaattttctctgttcctttacttttctcatgaagctataaaactgtcaagctagacaaaagatttatagttagacgagattttaaaaggaaacttttattataaaacatgtatttgaagttaaagttccttagcaaattttttgcatgaatgtttttaagattttgtatgttttcttccttccttccagccaatacaagagttgcggaaagttgttcttaatatcttgcaagactcaaacagaaccacagaaggtactattatttttgaatttaaattcatcttctctagctgtaccagtaaaaatcatccaggacatataggaaaaagaagaaaagaatcatcccctgaaatgcttctcacttcttggtttccatgacctggccctttcagccattgtcatcagctgacttatttgtattattacaagtaaatgcactactcaatactgaacaaaggttgtttccaccaaaacagcctagactggagtgtcccacttccttggaatcctagatggcagaagacaaacagctctttgctggaagagactgaggcagaaaggagaaatgccttaagttacatgtttaatcataataaacccaccaacatactcatctaaatttgtgttacgctttaaaaatagctatctcaggaatctcttcaattggatgaccatcactgtcagtggtcataacctttagaagactcttctatgagacatatattgtgccaaacacgagtgacattataattgcttacgatacttgttatatgaatggaaagaaaaaacaagctatctttagaaaataaattggattcttcttgttatcttaaaaggtgacaaatctttttcctttaatagtagatttaggctgcatacggtagctcacgcctgtaatcccggcactttgggaggccaaggcaggtggatcacctgaggtcaggagtttgagaccagcctgaccaacgtggtgaaaccctgtcttgtctttaaaaaaaaaaaaaaaaaaaaaaaaaaacagaaaagaaaaattagccagttgtggtggtgcgtgcttgtaatcccagatactcaggaggctgaggcaggagaatcgtttgaacccagaaagtggaatttggagtgaatgaagatcacgccactgcactccagcctggacaacaagagcgaaactccatctcaaaaaaaaagagtagatttaactggggaacaatcaagtcatgtagctaagtaacccactacatgtggtaagaaggacataaaatagataatagtagattctttgagaatgaggctacaattcagttatttggttaaaacatggtagtgttttaaaaggaataaaaagagaagacaggaatccatgcctttgttgcaccctattgacctcacttagggtgtcagcctctagccacagtgtgcctggcacagtctgatttccttcctttcattttggtgattgtgtttgggctaccatgaaaactattaatgcaagacagtttttgcccactgtccaaggcagtaaccatgtggtcatcctggggaggaatgggattgggaggttgtgtgagttaaccttagtgagtcaagaaaattgatccaaggtgtggtgtaagggtagaaggccagtgattagtccctaagagagctctcttgagagtgaataggagactggagatatgttcagagtcttgaaagggtgtcaagaatctacgtacagcagtctcgggggctggctacgagggtagcctgatgtagcaagacactgctacagagcttaacgtgaaaaaacaagttataagtcacacttcaaatcaatcactattcagtatgtggagcccatgaagatcactgggaaatcattgtatgtatgtatttttcatgttattgacttctagttgaagtattaaattggtaaatcttactttccttcatgatcttacatacacagggattacttctgactctttagttgctgaaactagtataacatcagtggaagagctggccaagaagatggaatctgtgaagtcttgtctttctccaaaagagagggaacaagtcacggcgacaccccgaatagccaaggcagaacagcataattatcctggtatcaaattacagattggtccaatccctaggtaagcaaactctaaagcagactttgtgttcacagacttaattctagtccaagtctcgatttttccttcacagatctagagtaactgagacctgacctgcagtgaggaaggtgctgccagagtcaggaggggtattagaatgcattcacccccgtcctatggtctcgcctaccttttcactctcatttgtcctgcacttgcagatcctatctgcctttcctgcaagtcctgacacagctgggtatggttggggtgataagatggggcacaaagtcccaagcgggagcaaactctgtagctgtgggagaaaagggacagtgaatacccctctaagaacggagagcagtggagtatgtactagtcagagactgctcataaagtcagaaacgttttattttttaacaaatataaatttaaggcagaatccatagtaatttaaggagctatgtcagggcgtcagtgtcattttctaaaatgtgagtgtagcaccactcttctctgatcatgatctggaaagaattccaaacaagggcaccaagacaacagttctttgttttagttacctggaaagcacagccgaatctcttccaatcctaaactctctgacacacaccattttcccactacagtcagctcataagaggatgaaaacagttcagttcataagtggatgaactacagtcagctcataagtagatgaaaacagttaatccaaaaactacctcttaatggctctagaattcacaaaaccactaattacattagcctaaggaaaactagcaggcaagtctgccaagattgcaccattgcactccagcctgggcaacaagagtgaaactccatctcaaaaaaaaaatgaaaaggctgggcacatggtggctcatgcctgtaatcctgtcactttggtaggccgaggcaggaggattacttgagcctaggagttcaagagtggcctgggcagcatagggagaccccaactctatgaaaaataaaaaattagccaggcatgctggcatacgtttgtgctcccaccagcttgaaaggctgaggtggacagatgccttgatcctaggaggttgaggctgtagtgagctgtgattgcaccactggactctagcctgggcaacagagtgagaccctgtctttaaaaagaaaaagctagaaagaatcttggaattcattaattcaaccaaatttggtattaggccccatttccttaaaacttgtcatctgttttgaaagtttatagaataaatgaacaccaactgccaaatatttgacttcaaataaaaaccacacttcatacttcattcaataaatccttatgcttacaccatccaagaacagatggacaccacccagtacattctggaaatcagggaaaagccttttttttgagactggggtcttgccatgttgcccagactggagtacaatggcataatcatagctcactgcagccttgaccttctgggctcaagcagtcctcccacttcaccctcctgagtagctgggattacaggtgtgtgccaccatgcccagctaatttttatattttttggtaaagatagtgtgttgctatgttgcccaggctggtctcgaactcctagaaaaagccatctgaagatgaaagctgctctagacatatctcttgtatcaccctatgttaaaatgtcttccctgttttattattgaataagaaacaaaaaataataaagataatttttttaaatgataaggtttttaatgcatctcttgctgtctctcagaataaatgggatgccggaagtgcaagacatgaaatttatcactcctgtacggcgttcgtcgaggattgagcgagcagtgtcccgctacccagaaatgctgcaggaacacgatttagtagtggcttctcttgatgaactgttagaagtggaagaaacaaaatgttttatattccgtagaaatgaggcgctgcctgtaacattggggtttcaaacccctgaatcataatttcttgatgctttttttaaaaaaggtgtttcagaaccaacataagacaagaaatattcttgtccaagtgacctggaaaaaaagagaggcatcatggatgcagattatggacgctcaggacttaagtaattcactgggcttactctcaaattttctctccccatgggaaaatctttgctttatgtgtttaagaccagtttgccagttttacagtatacataaatttcaaacttttgaatatttaccctacaactatgataaatatttatactttattgatctactttaatcccaacatagttttttatatcagaaggttggtcccacaatataatgggacttttctttctgcatccaccttagcagagggcaagttctttcatcgtggaagatctgaactttgacgctagcttgacaggctgaatggaccttgacagatggccaagtcaaaacccctcattttacagatgagtttatgctagctgtgcctttgctcagagatcataaatttatgtgtgatctttgactttcatcacagtatccttgtaaatgagagagaattcttgttttttctatgccaggtctcctcagatgaaacacaatcctgaattggcatggtcgtctagcttttatattcaaacctagttttgcatttgttactcagaaacacttcaagtaacaaaaggggggcaggggagaggggtggggagtggacacttgcttcttcagttctttgctcagctagggtatagctggcctgagaaggcagtgcaagccccagagactgttgtaggttgctttttcttcctcctgggcaactatttgtggaaaggttttaccttagtcattatgtaaatataattgtgtagaaaaacctagtcaacacattttaaattttagctttcttaatatttaagtattatcttaaaacaacattaaatttctattagttcctg

SEQ ID NO: 19 - DNA, 228025 bp, Homo sapiens
attagttgtctctgccgctggggaaggtaaagcggcgacggcgtcctcaggagctgtggggtcccctgctagaagtgggggactcggcggggtgagtagtcgcgccgccacccgcccgccaagccttcttacccttacatcggccccgcgtccacccagcttctcctgagagtggagacccacccagtccccccgggcggacaagagaaggggcgggggcgccggttcccccggaacggggcgacgcggtgaggacgtcccagcccggagtagcccctcctcagcgctcccctgcgcctctggaagggcttcccccgaggggctggggctgtcttttggggtgtggggaggcgaaagggtgtgaaagaggggcggcgggtcgagcccgccccgcggggttcccctcagcggcgggtctgcggcgtccccgccccgccgctcccgcggcacgagctccccggggcttgcggcgaggtaagccccttcccgccggcgccgaggaggggcctgcgcgccccagccccctgcccgagttcggagggagcccgagactcgccaggggccgtcagtcgcggcccgggcccttctgaccttggctgcccgcgagggtgggctagcgaccgggcgccggccccgcggctccgcaacctcccccggacaagtttcaggcgatgctgtgaagttcacgactggcatagtgcggggaagaagaatggccccttctcagaccttcataccttttggaccctcatagaaatcggattctgggatttggaaccgtctcccagaacgaacaggtcctccttgcattgacacgttttgtgcccacgttggggaaaaaaataacctgaacatatttcagtgtaaaggcagatcttccttgagggttttgtttttcgcttcatttgagtgttaaagaacagatgcctgaataagaaaagcctgaccttagtatctctacagtgagattagacgggtgctgtgatatttaagtagttgcagatcagtattctgttagcacaatctattttaattggctggaatttaagctgattttagaaagtattgttgacaccgaatgatttctttctgtgcatctgaattaggtttgtttgaacgtaatggttatatagttaatgtaaaagattacacaaattaatttgtctgagagcgtttgtcagaaacaggagacagagatgtgtatagaacaggattatcgttttaggtaacatctgctggaacatttccagcttgtttctttcttgctgtagggttacaaaaaagacatcttcaccgaggctattcggaattacatgtgagtgacacttagatgtaaatttgtttttatttccttcaagtgttttaaaatgttttgttcacaaaatgtgaagaggctatatttacttgttcctgtatgttagtgttgaaggtgatagtatgatcttatgattaacaatccaattagggtccattaataatagatttttaaaaaaggcgtgctgcttttcgagaatatgataggttgagtacctagcaagacttctaatttctttttattaaaagtactattttaggattgagaatttttggcgttgacactgaaaccaggaataaggaagcctgcagcagtcttagcagtttgacaccaccagtaggtgtttctgttgacaaatgcagagaagagaacatttgggaaggaaatctttttttcggggcgggggttgggggggaggtgagggtggttgaggggggaaggagccagaagagagaagctaatgctgccagcactgtatgctgagcatttcacaagtacaaggaaacctaattagggaaaaattccgtttggctctattaaataatagaactacaaaagaggcatactaaataaagttaaccattccaagagtgttagatattatctgccatttcagagtagttgggggttcctcaattggagagggtatcaaatctctttgaattgtcttgcctttttaacatagtcaatgcagcgattaatttgctagatgtatatatatcaaacagttgagtattccagttttgttgtttagcatatttcctaagcctaaattttttaaaatcaaaatccgatatattttttttaaatttgaaatagaattctttgtccagagagtaattccttttttcctggctcagtcttaaaatttattcatgatttaggggtttgtgattggtatttttttacccctttttctcaggtttttgatttttacttatgcaagttccctaagtctgcctttgtttatattgtaattttcttggaattatttaaatcagagtgtggcatctattgtgtcccctggggttttaaaaggaaaggctcccattgaaagaaattgcagggccgtctcgcatagatgggtaatagaaggttgactgattgcgaatcagatgtattcggttgcaaatatgctgcttggggttaaggcagtttcagttaacgggaaccagattttacgtggtgtttctactttgaaggtacagtattgttacattacaaactgaaagacagaggtggagaaattcctttaagtatcacccctagccttgtttcaccactgtgtccaggaatctatgagagactgttaacaatagctgcattgttggaaatgacagtggcttctcttgcagaaagttaacctttcattatgattttcatttcagtttactttgtaaaagaaaatttagctttatctgagaaattggctgtaagaaatttgcaaagagagcaaggaaaataggttttcttcaacgtgtctgttaaaattcacattctctccccttccgttttgataactggtggtgatctttatttcctctagatattaggtatgctaacacagtacctgatttttggcagttactgtgggaatatgacttttttatgtaataaattgatgtcaaataataatatgaggcttttaggaataattaattcacatgcatagatctaaaacatgagggaaatcttttagatgacccttcactttggtacaagaatagcacaatttgaagtattaagttgctttctaagtagaaaaagctatttactcagaattgggtaattttagattttaaagttttttttttttttttgcaacatcaaataatttggcaacatcaaatttcttgttaaaggaggcgacagaatctcacagattctttatcatctgatcatggcatcagttggactacatttcaacttaggacaataatgcaattaaaagactacatttaaactttctgtttggaggtttttctaatttgctttcaatctcaagcccaatgttagaaatcttttgttggtgacgcacaattttagtgttcagattttaggttttgatcgtttttagaatttttttttatgtgtgtagagcagcgcatggatgactgaattaatcaaagatctggcctcatttctcattcaagtttgtacatttcttcacactgagatacgagcttgggtgcaattctgttggtgggcgtgaaagctgagggtaaggaccttctacctagagactgataacatttaaatatttcagatttgggaattaatagaaagttatttattaggttaaaaggaactagcccattcaggtatttgaaaatgattgtcaatactttgaattaagctcttagaaacattggggtttgagacaatcctaatcagggtcaggttttgggtgtggtctctcttttgggcagtcttctctgtaataattataatactccatctattgagccttactgcatgccagacactgtgacacgtaatttatttgcatgaatacatgtgtgttctcacaacagctctatgaagtaggtcttcttacctcctgtatacatgtcaaatgggctcagagaaataaagtactttgctcagattacccagctagtcatcagaaacagcaaaattgccatccaaactggtctgacttgaagccgtgctcttcaaaaccatgctttctgcttctctttaggaaactgatttcccaagcatatttatttttgacaccgggtctcactctgttgcccaggctgaagtgcagtggtgtgatcacagcttgctgcacccttaacttggcagactcagtggatcctcccatctcagcctcctagtagctggagactacaggcacgtgctcccataccaggccaatttttctttatttttaatagaggcggggtctcatgatgttgctcaggctggtcttgaactcctggcgtcaagcgatcctcctgctttggcctcccaaagtgcttggactacaggcatgagccaccgccaggcccaccccaagggtattttgagttcctactgtatattatgcctcgggtgtactgaaggtatatgtatgcttcttggagttcatgggctacattggcaaggctgctggacctttagtcacatgggggactgaactcagatccatcaggactgctagataggacaattggaagtgcagacttttctaaccagagggtcagacttttctaacagaggttctgtttcttcataaatgaaggctgtacataatcatgccaaaaatgaggtagttgtttctaattagctacttggtatttcatgtttctggatattgcattataacttttgatggactttgattacatttgctacactaataaaggcttcgaagatactccttgaattcaattttgtggcttagatatacccttgaagtaaaatggcagccattataatttgcagatgggcacctcttgtgtaattatgaccagtgaaataaaatctggaggtaaagtctatagagatatattattgtgtgtgcgtgtttttttgagatggagtctcgctctgttgcctaggctggagtgcaatggcgtgatctcggctcactgcaacctccgtctcctgggttcaaacgattctcctgcctcaacctcccaagtagctgggattacaggtgcatgccaccatgcccagctaatttttttgtattttagtagagacggagtttcaccgtgttgcccaggctggtctcgaactcctgagctcagacagtccccccgcttcagcctcccaaagtgctaggattacaggcatgagccactgcgcccaccgcttgttgtgtgctaatacagaggttggactctgaaaatttttctacatgaaagtagaactttctgctatttaaagcttcttgtgattaaaacaaattttctttacatttttaattttttttttcttttttttttgagatgagtcccccactctgttgcccaggctggagtgcagtgatgggatctcggctcgccgcaacctccgccccccaggttcaagtgattctcttgccttagcctcctgagtagctggaattacaggcgcctgccaccacgcctggctaatttttttgcatttttagtagagacggggtttcaccatgttggccaagtggtctcgaactcctgacctcaggtgatcttcctgcctcggcctcccaaagtgttgggactacaggcatgagccaccgcacctggcggtgatttttttttaaaacaagacccatcattaagagaactaaacagttatgtgccctaaggaacacttagaagtccatgttaggaaaaaagaaaacttaacatctttttctgtaatcgattaaaatcacttttgttacctatttaagttagaaagtgctgatgaatactgtagagcctcagggccagaaatatcttggccaaagcaggaccatatttctacacaggtgggacctgtgtgttaattttgttgatttcttttcttttttttttttttttgagacggagtctcgctctgttgctcaggctggagtgcagtggcgcggtctcggctcactgcaagctctgcctcccgggttcacgccattctcctacctcagcctctggagtagctgggactacaggcgcccgccaccatgcctagctaatttttttttttgtatttttagtagagacgggtttcaccatgttagccaggatggtctcgatctcctgacctcgtgatctgcccacctcggcctcccaaagagctgggattacaaaattttgttgatttctttataacgtaatggaggtgtactttacataccataaaactcacctttttagtgtatgattcaattatttttaagttaatttatggagttggtgtgactatcattacaatccagttttagaacatttccatcaccccccaaaattctctcctgtcaatgagttttttttaaccttatttacttgcttcacctagacctctcctttttttgagacagggtctcactctgttgcctaggctggagtgcagtggtgtgatctcacctcactgcaacctccacctcccaggctcgagcgatcctcccacctcagcctcttgagtagctggaactacaggcacatgccactgcacctggctaatttctttctttctttctttctttctttttttttttttttttgagatggaggctcgctctgtcacccaggctggagtgcagtggtgtgatcttggctcactgcaacctctgcctcctgggttcaagcgattctcctgcctcagcctcctgagtagctgggattacaggcatgtccaccatgcccggctaatttttgtgtttttaatagagacagggtttcaccatgttggccaggctggtcttgaacccctgacatcaggtgatctgcctgcctcagcctcccaaagtactaggattataggcatgagccatcatgcctggcccacctggctaatttttgtattattagtagagacaggatttcaccatgttggctaggctggtctcgatctcctgggctcaagcaatctgcccgcttcggcctcctaaagtgctaggattacaggtgtaagctaccgtgcctggccaacctagatctttttgtcatcagatactgacaaatgaaatcatgtagatcttaaaagatgtctttttttttttttttttttgagaccggatctcaactctgtcactcaggctagagtgcagtggtgtgatcacggctcactgcagtctccacctccccaggctcaagtgatcctcccacctcagcctcctgagtagctgggactacaggtgcaggctgccatgcctggctaatttttttgtattttgtagagatgggttctcacagttttgctcaggctggtcttgaactcctgagttccctactttggccattcccctactttggcctcccaaagtactgggattacaggcatgaaccactgtgcctggtctaaaagatgtccttaaaaaatatcttctggagaccaggcgtgggtggctcacgcctgtaatcccagcactttggcaggccgaggcgggcggatcatttgaggtcaggagtttgagaccagcctggccaacatggtgaaaccccatctctacaaaaaatacaaaaatcagctgagtgcagtggtgtgcacctgtaggcccaacctcctgggaggctgaggtgggaagatggcttgagcttgggaggcagaggttgcagtgagccaagatcgtatcactgcactccagcctgggcaacaggagtgaaaccctgtctcaaaaaaaaaaaagaaaagaaaagaaaaaaaatacacttctcggccgggcctggtggctcacgcctgtaatccctagcactttgggaggccgaggcaggcggatcacctgaggtcgggagttcgagaccagcctgaccaacatggagaagccatctctactaaaaatacaaaattagccgggcctggtggcgcatgcctataatcccagctactcgggagcctgaggcagaagaattgcttaaaccggggaggtggaggttgcggtgagccgagattgcatcattggactccagcctgagcaacaagagcgagactccgtttaaataaaaaaaaaaattttcacacacagtatcatttcataatgctttttgtattttcaaaagttcttgcctatgcataatacatagcggaatttaaaggatcataactgcaaatgatataaattaccttgtgtttgtggcttaaattttattttcatttgatcttttttaaaccagcaaataaaatacaacattcttggtgatatgttgggaatgcagggaaaataaatgaaggtaaaagtaatgtaattattgtgcaagaaaaagttactttcaaatgtaagagcacagggaaacaattggttttcttgattttaagctaatgacattgtgcattttgttgtttggacctctaatcccccttgacagatccatgcctaatgcgcgtgtcgtagagcaggcttcatcaaatttaggtatttagacactgtgtctacttcagactggattgtgatgggatttgcaaacagcttaacatgcaaggtactgtaactgccttttcctgcctgcatcattttcttcttagttaccttctagggtgggctgaggagtaaggccagcttaggaacgggaagtctcatcagcacaggctgatccccacttgtgcaggtttcctcctttgctcagtgtattgcttgggtagacggacactgcttagggatgttatttttttgggtacatataggagaggaatgtaatggtttggttagaagtaaagtgttttggaaaatgtatctaattttctttgcttttagatgaacatttctctatggaaagtgacccttatatgtaccaggcaggtaaatcaataactccttgtgtggttggttgtgtctggatttttaatggcaaacaggttagacacacggcactggtctgatattaatattttactgtcagttcaatcgtaactggtttgaaataggcataggtaacatgaagtgccagtgtaacttgattttgatagtaagaacaactttggtttctggaaattaacaaaacatatataaataatatatattgtttaaaaggattatgttattttaggtaagttgcaattttagatatcagttttaaactgtgtattttgtattatgggccaggcatggtggctcatgcctgtaatcccagcactttgggaggccaaggtgggcggatcccttgaggtcaggagttcgagaccagcctggacaacaaggtgaaaccctctctctacaaaaaatacaaaaattagctgagtgtggtggcacgcacctgtaatcccagctactcaggaggctgagtcgggagagtcccatgaacctgggaggcaggggttgcagtgagccaaggtcgcaccactgtactccagcctgggccacagagtgagactctatctcaaaaaggaagaaaaagattttgtattatgtttaaagattaggttcttggaagtatgagattgtattttgataattaaagtaaacatatacagtctcatgaggaagatatgacagataaaaaaaggtggtgagtaatagttgaagaacaacttactgacccggatttacctgattaccctgacattgctgattttagaaactaatttcctgatgagtagaatctttcaaagattaccagaggctgggtcagatgtgacatatcctagaatttatccacaccctcagacacacaccccaccaaggtttgtcagccgcttatgggatatattaactttaattgctagtaattattattcctaatattaccactaaattcaagtttagcaatgcaaatgaaaagaaaaaatttgattttaattgtacttactgaaaatagttggggtagacaaaagctaattttgtgcaaataattattttatactttatcaattatttatttctcaaataacctgtcctacatcctgaggatctgtccttcattcatttaacaaatattacttaatgattctgtattgtgtgccagactttgctggagactacatggagtgataaaatgtaagtaggccctgccctcaaaaaattaattaattaatttttgagacagaatctcactctgtctcccaggctggagtgcagtggtgcgatcttggctcactgccacctccgcctcttgggttcaagcgatttttgtgcttcagcctcccaagtagctgggactacaggtgcgtgcctccacacctggctaatttttgtattttcagtagagacggggtttcactatgttggccaggctgatttcgaactcctgacctcaagagatccacccaccttggcctcccaaagtgccatgattacaggtgtgagccggccaaagaatttagtcttgagatggaggcagaggagaactgcagaacactatgggagtgtacttgacccttgaacaaggtaggggttagggtgctgaccctcacgcagtcaaaaatccaagtataacttttgacccccccaaaaacttaactactaaaatggcctactgttgactggaagccttattggtaatataaatagtcaattaacacattgttttgtatgttatatgtattatgtagtatattcctacagtaaagtaagccagagaagaaaatgttattaaaatcataggaagagaaaagatacttactattcattaagaggaagtggatcattataaatgtgctcatcgtcttcacattgagtaggctgaggaggaagagggaggggttgtcttgctgtctcagcaggggcagaggtggaagaggtagagaaggtggaaggggaggcaggagagggaggcacactcagtgtaatttatattgaaaaaaaatctgggtataagtagatccatgcagttcaaacctgtgttgttcaagggtcaactgtatgtaacagggtagggttggagagtctgtccttgggggaagaggtgggaaggtcgctctgaggaagtaacatttaagtgagacccgaagaatgagaaggacctggtctagttggggaaataagttttccagacagaaggtgcaaatgtgatgaggcaaggtgagagagctggggtttttgcacaacagaaccttttaaagaactgaaagagggctgggcatggtggctcacacctgtaatcccagcactttgggaggctgaggcaggcagatcacttgagcccaggagtttgagaccagcctgggcaacatggcaaaaccccatttctacaaaaatgcaaaattagccaagtgtggtggtatgtgcctgtagtcccagctactcccagagagtaagctgggaggattgcttgagcccaggagctggaggctgcagtgagccgtgattatgccactgcactccagcctgggtgacagcgagactcttgactcaaaaaaaaaaaaaaaaaaaaaaaaagaactgaaagaaatctaaaacgaccagaaaatagagaaacaggcattgaagcacaagttggcagcaggggccaggtcttgaaaaggtttagtaggccattttgctgggtttttgaacttgtcctaaatctcctgggaaacggttgaagattttaaggaggggtgtgacatgaaatgaaatgctacaaaacccaagaattttagttcaatggaaccttggtaatttaccagaaaggtcataatctctgcaaagtaaaatattcttcccttgtttcattaaaatttttgtaactcctttcttgattgattgtcgtctgcggtactcctttcattgtttttgtagaaattccctttaattttctaaaggtaccttttcttttatccctcactgttctgttaaccttatataggaatgtcatttctatttataactgaattagaatattttttctaacagctttagctctcttccatatttaaacttaaaattctttgctgtttttttccctccagacacctttaatctgctcgaagtatttaatgttttaacgaaatgtttcattaagtttgctttattcttttgttcttccaaatacagtgtcttagatctagtttaatatttctcagcatttatgctatttcatgttttatgaaatcacatgtgagcacccagaatgtttttagaaaattttgttactattgtataggagcactactcttcatcaggagcaccattttcaaatctggttcacattctgtggccttatcttttacattaaattggtctctgttaaacattttatgttcaggtgggcttatgtatatataagtgctataaaggtgttattttttatatcctgatttgtttctttctccgacaataaatgcccctacatgctgaattctttttaggaaatctttgccatactaagtttgtgattgccttggtgattgtgtgagcattcattcaagtctttcttggtgtaaagttgttagctcatgcctgtaaagaatacttttgcccactgttcctctccacatatacgaagaataactgcagcatcacctctttcaaatagttccttggaaatctacatagtgattcaggcttgaattgagttcgcttttgccatgagttattttctttcttttctttttttttgagacggagtcttgttctcttgcccatgctggagtgcagtggcgcaatctcggctcactgcaacctccgcctcccgagttcaagcgattctcctgcctcagcctcccgagtagctgggattacaggcatgtgcccccacgcccggctaagttttgtatttttagtaaagacggggtttcaccatgttggccaggctggtctcaaactcctgacctcatgatctgcctgccttggcctcccacagtgctgggattgcaggcttgagccaccatgcctggcctgaagaggtacactcaacaggcacttaaggggactgggaaaggaaatgactcttgagtgcttgtgaagagtcttaaaggaagtccagaatgtcaggtgcaggtaaagggtttacaggcagagggtgcattaaaagacaaggatctggctggccgcggtggctcatgcctgtaattccagcactttgggaggccgaggcaggtggatcacgaggtcaggagttcaagaccagcctggccaacatggtgaaacccccgtctctactaaaaatacaaaaattagccgggcgtggtggtgtgtgtctgtagtcccagctactcaggaggctgaggcagtagaatctcttgaaccctggaggcggaggttgcagtgagccaagattgcaccactgccctccagcctgggcgacagagcgaacctccgtctcaaaaaaaaaaaaaaaaaaaagacaaggatctaaggatgggcatataaagctgggagaattgcaagaagtaatgtttatttatgtattacatgctttgctttgatgcttgtaccctagctatatcccaggatcttttctactgtaagctccgtggaggcaaggagtgttgactgttgtaccctcagtatgtggcacattgccttgcacataggaagtgctcaataaacacttcccttatcaaaggtgcccctttttgcccccccccccgccccccaccatttcctcatgtctgtatcttcttccttgtgcagtggtatatcaggtgcctatccagtggatcctcctctctgcttaccctatagttatgcctgtcctgtgtctagttacctgtgtaagatatgtaattgttataattggatccacactggtaaatgagtaggtgctaatagctctctgtggggctccagaatcttttctaccaacatttatggtatggcagatgaaggggaagccaaaggtgacaactaccagagtgacatatctgagctttttttcatgatttattgcatgaattcattgaaatgctgagttctattccataataggtgtgtgtgtgtgtgtgtgtgtgtgtgtatgtgtatctacattgtacaatacaggcatactttggagatagttttggttttagaccaccaccataaagcaaatattgccataaagcaagtcacacaaattttgtggttactgagtgcatataaaagctttgttggctgggcgtggtggctcacgctatatcccagcactttgggaggccaaggcaggcagatcaccagaggttgggagttcgagatcagcctggctaacatggtgaaaccccatctctactaaatatacaaaattagctgggtgtggtggctcccacctgtaatcccagctactcgggtggctgaggcaggagaatcgcttgaagccaggaggtggaggttgcagtgagctgggattgcatcactgcactccagtctgggcgacagagtgagatttggtctccaaaaaaaaaaaaaaaagctttgtttatactatactgtagtctattaagtgtgcaataacattatgtctaaaaaaaaaaagcacatactttaattaaaaataatttattgccaaaaaatgctagcaataatttgacccttcagtgacccataacctttttgctggtggtgggttttgccttagtattgatggtgactgactgatcaggatggtggttgctgaaggttgggggatctgtggcagtttcttaaaataggacagcaatgaagtttgccatatctgttgactgttcctttcattgtaggttcttctgtagcatacgatgctgtttgatagcgttttacccacattagaactatttctccaagcctgctgctgctttatcaactaagtttatagagtagtgtatttttgaaatagtcatttcaaaaatgtttaaggcatctttaccagtagatttcatctcagaaaaacagttcctttgttcttccataagcagcaactcctttgtccattcatgttttatcatgagatcacagcaattcagtcatatcttcaggctcctcttgccttggcctcccaaagtggtaggattgtaggtgtgaaccactgcacctggccatatcatttttttgtgtgtgttttgggtttttttagacggagttttgctcttgttgcccagactgtagcacaatggcactatcttggctcactgcaacctctgcctcccgggttcaagcaattctcctgcctcagcctcccaagtagctgagattacaggcatgtgccaccacacctaggtaattttgtatttttagtagagacggcgtttcactgtgttggtcaggctggtctcgaactcctgacctcaggtgatccacccacttcagcctccatataatctttgtgtctttaaatgggtatgtctttccttctgctaggccgttagtgctggtatttgagttaatctagttaggaattggtgtagccaagtccaaggttgtactactcaccaaatgacagccaataagttaagagacaaggtgttggcgcaaagaaagcaaccttatttggagagccagcaacctgagaagatggtggactagtaatgtccgaaagaaccatcttaatatgaattttcgcctccttttatgttagaggaagagggaagagggaggaggttgaggtcaagagatgactatgatgaccacagacatctaggtggcagtgagggtctgtggaggttgtgaaacttctttgtccttggtcaggtcacaatactataaatctttaacatggctgggcatggtggctcactcctgtaatcctagcactttgggaagccgagtcaggcagataacttgagtctaggagttcaagaccagcctgggcaacatggtgaaacaccgtctctatcaaaaatacaaaaattagctgggtgtggtggcacacacctgtagtcccgctactcaggaggctgaggtgggaggatcacctgagcccaggaggtcgaggctgcagtgagccatgattgcaccactgcactctagcctgggtgacagagtgagaccctgtctcaaaaaaaaaaatcattaacaacgttgttacttgtgtgtacactgcccctatctcttcaggggttttcagaagggactatttgctttaaactataaactgaatttctcccatagttagatggtttcactgggtggtggtgggggggcttagaagcaaaatgatgttagtcatgctaggcttccttttcactgttacattgggctggatttgagtttttttgtgttgttatggttaacctagtgtaccccagttttcaaattctcttagagatactttgtgatcagggtgggaattggtttaccagaacagtgtctgttccagtctaaatttcaggtctccccttcgaagtgtgctttagtgagggtctctttacatactcttgattttctcccgtccctttctcagtgatattctgctcttactgttcctggaagtttgtttgcttggaggtggggaggggtgataggatgtggtctctgttcttgattaagcctcagtttcaggcctgactctcaggatcttgccccttccctggctgttgtattgggctcaatgtggaatcctacccctctcccaggacttgggcccccacccctcctccctgctgctctgatttttcactattgtcttaagggtagaagtaaccattgtcctttctgtcacagtgaaggcttgtcttcctgagtggagataggggagagtgatctgagggtagtgtccagcctctcaggcttagctgctgcccacccccaggtttgcatcacaatgagcctacctcaggactctttagagctctgagtgagtggggtgggggagttggaggaggaagaccctacaggaagttgaggtatcatatcctcaatttctgtgacccccagtggtttcacactatcttttcagcaagccacattggatttcacgcatttactgactcttctacccgttctttttggtgtccagctgtactctccaacaggcgagcacatggtcgtctcctctctcccttcaggtactctccttagtttttgagccaactggttgctctgttggtttttttgttttgttttgttttgttttgttttgttttgttttgttttgaggcggagtttcgctctttcgcccaggctgaagtgctgtggcgcgatctcggctcactgcaagctccgcctcccgggttcacgccattctcctgcctcagcctcccgagtagctgggactacaggtgcccgcctccacgcccggctactttttttgtatttttggtagagacggggtttcaccatgttagccaggatgatctcaatctcttgacctcgtgatccgcccgcctcggcctcccaaagtgctgggattacaggtgtgagccaccgcgcctagcgctctgttgggtttaaagaaagtcttgaatttgaaattagttcagctctttttcattgtagttctcttattccagggtttaagccagaaatttggttactcttaaaattttaacatgagcgtttccttaagtctaagcttaattattattcctgtcctcctgaataagaccaagagtttggaatgatttactccttaaccgtcagcccctcttccatgttaatgttatttatgtgttagttttgccttatttaagccaccttacaccaataaaaatagtgaatatttactcatgtgcttttcaggtttctttgctcaccattcttccttcactccatttcttccttcttggttcagtttcttccttctttattaaaaaatgttcttaattatttcagtaagggccccttaatagtaaatttggttttggtgtttgtgaaagtgtctgtacttcactttttcccttgaatggttgttgagctgggtccagaattttgggttaattcctttccccgagtactttgatgttattctcttgtgttttgacaaatttgtaaattttttttaacttttaagtttggggctacatgtgaagttttgttacataggtaaacacatgtcacaggggtttgttgtacatattatttcatcatccaggtaataagcccagtacctagtagttatcttttctgctcctctccttcctctcacccttcccctcaggtagagggggatagttaatgttattcttttgtgttttgacagatttttaaattttgtttaacttttattttaggtttgggggtacacctgaaggtttgttacataggtaaacacatgtcttaggggtttgttgtacagattatttcatcacccaggtattaagcccagtacccaatagtcattttttctgctcctctccctcctcccatcctccaccctcaggtagtccccaatttctgttgtttccttgtgttcataagttcttatcatttagctcccgttaatttttagttttttggtctaggctggtctggaactcctggcttcaagtgatcctcctcagcctcccaaagatctgggattacaggtgtgaaccactgcacctggcctagttttatttgctaatgacaagtcaacagtcagtttagttgtaatttcgttgtaggtaagtaattctctctcctcttgagctacttttaagagcttttccttgtttatttatttattttttatttacagtacttttgagttgctgtttatttccttgtttttttgatcttcagggttttttttttttgcgatatctctaggtgtggatttgttttatgtatcctgcttttatttgatgtattccattagtctgaggacccctgatgtcttcagctgtgggagaaaatcttagccattatcttttaaaatagtttcgtctccattttccatttatggaaccattatttagatatgttttgggatttttcatcacatccttcgtgttgtttaatttacatttctatctcttctggctaatctcttgacatctatcatacgattcactaatttcctctttggctgtgcagttaatttgttaacttattgagggtttcactaaaaacatttggctatatatagtcaaatatataaatattgatatttatacaaatatacaaatatatatgtgtgtacaaacatatatatacatgttttaaagataggatcttgctgtgttgcccaggttggtgttgaactcttggtctcaagtgatcctcccaccttggtcccccaaagtgctgggatgtacaggcatgagccactgtgccccacctcgaatatattttcaaatttaagaatttctgttacattttctttcaaacctgtatttaaattttctttcaaatcagcttttaaattttcataagagcattttctttggacatttaaaaatatagttatgtttaagtcctctttggattattttcttagctgtaatttttgaggaatgaaatctcccatttggcttcccttcttccctccaagatttttgctgtttctccgtgtggtgtgcagtatttgacaatttaacgattgtttgcctatgcccgggttgtggaatgctcttttggtctagttttgcatttgtctctgatgggaccctttgggttcactgcgtctagagaggttttggtctattctcagatgggtctccagcacctggaaagtagtgtaaattttgactccatatttgtgtagaacagacttggggttttcccttctgtttgggtcactttttttttttttttttttgagacggagccttgctctgttgcctaggctggagtgcaatggcacgatctcagctcactgcatcctctggttcccgggttcaagtgattctcctgcctcagcctcttgagtagctgggattacaggcacacgccaccacgccctgctaatttttgtatttttagtagagacagggtttcaccatgttggtcaggctggtctcggactcctgacctcaagggatctgcccgcctcagcctcccaaagtgctgggattacaggcatgagccaccgcatccagcctgtttgggtcactttctctgcacagcgctgggctggtgcttgtagcttttctttttattttttcactcaaggacagtcctttatgtctttgtctttgtgctagtggttcacctccagcttctttcccatgcacaggcttcaggcaactgataatactttggctcagtatctccacccaaatctgatctcgaattgtaatccccacatgtcaaggggagggacttagtgggaagtgactggatcatgggggcggtttcccccgtgctgttcctgtgagttctcatgagatctgatgattttataaggggctcttcaccctttacactctgtgccctgctgccttgtggagaaggtgcctgcttccccttctgccatgattgttaagtttcctgaggcctccccagccatacggaactgggggtcaattcaacctttttcctttataaaataaattacccaatcttgggtagtatctttaaagcagtgtgagaatggactaatacaggaaacttctccagtttcctggtcctgtaatcatttgcatttgcagcccttgatttagagggcaggggtgagcaggtgtttatcatatgaagaatctcatttaatacgtttttctgtctttgcagccactcctttctattctattttcttcctgactgttgatcaggaagtagttctaccagttaagaacaagaaagtaggcttgtaatcccagcactttgggaggccgaggtgggcagatcacctgaggtcaggagtttgagaccagcctggccaacgtggtgaaaccccgtctctactaaaaatacaaaaaaaaaaaaaaaaaattagccagggatggtgggcgggcacctgtaatgggaggctgaggcaggagaatcgcttgaacctgggaggcagaggttgcagtccgtgagctgagaccacgccattgcactccagcctgggcaacaagaacaaaactctgtctcagaaaaaaaaaacaaaaaaacaaaaaaacaaaactgggaagtagttgtaaccacagacaacccccaccttgaacaggttatttaccaaaagttcttttggacattgattgtatagaacacagttcacattatctgataggaactatgttatttaaaaaatggatttgtttcccaggtgagcctgaggagtctgttctctcctttatgcagttgaaattcatatagacttgtgagttctttgggactgtaatcaatatacagtatgtgatttctgtgggaaggtataatacattttaacgttctcagtgaagaagggagtatgctgttttccaaccccagtcggtattccctggtgtgacctgccagctaccagaccccaacagttgttacaaactctagccactgttttcaaatctgccactaaatatcaccactcatactcagcacatgaccttgcctccacttcactgagaactttgagccatctggttgattttcttcacacttctaccagtttgtcatccctgcttctccagagttgccctctcctcctgtctcaggggatgagatgcttcttctgctgtttgaggcagtcctttgccaggagccttaggcttcactgctgcttctttggcagtcttttctcatcagttattccccttcattctccccattctgttcccagtggctgtccacttggggaggaggggtgaagattttgcctccaggagacatttggcagtgtctgcagacatttttggttgtcacaattggggggtggtggtgatgcatgtgctgctagcatctaacgggtagaggcgtgtagatatcctacaatgtacaggacagccccatgacaaaggattacctggtccacaatgtcagtagtgcctgggttgagtaatgttgctgcatcctcagggtctcacttttgactccttcgtttttctctgcccattatcttatgcctaagattctcatcctaggaaaccttccctgaaccacatgtccaatcctctcctagctacctaacttctccccttctcactgaaacttctgaaagagcgatttacacgtagtctctcattcactcttcaaattttagctgttgctttctggcttcccacccccaccgctgcttaaactgtttttgctgagaatgcctgtgacctcttgtgtgctgcatctagtggattcatttagtcctaattttacttgacatttttgttgcacctgacactgttaatcactatccccttgaaccaatgtattccattgtcatccttgttctccatgtccttctcttgtatttctttccctccctcctgtgtgggcttcttgatgatctacttactccttacacactgctgttacctggttttgacttcttagccaagaattatcataggtcattgtctccatgaagtaccttagttaccccaaggatttcagttgcacttatatacagatgtttttctaaatttctaaattctttttttttttctttttgagacagggtctcactctgtttccctggctggagtgcaatggcatgatcacagctcactgtatcctcaccctgtaaaaacggggtttctctgtgttgcccaggctggtctcagaactcctggtttaagcgatccaactgccttgacctcccaaagtactgggattacatgcatcagccaccatgcccggcttaaattcttccatgacttttcccctccaggctttagtgtctcttgtaatctgctggaaatctacacctgaatattctataggtaccttacgctcagcatgtctaatgtgaagtacatcttttcctcaaacttcgttttctgagatccacctgggctcccaagacagatagtggggtcttgtccagttcatatattatctacagttgccaatgtgatataaaatatgatttaggtcatatcacctacttgaaagtctgcactggtgctgtcttggtaacagaaagagaaagactgaattcccttattttgcccatcaggctctccttgatatagtctctgcccacccacctctccaacctcacatcatctctcttctgcctcatacgctatgctccggcacgtataggttcctatacaattttgtttcatacttgatgtctttactttttgtcttttgcctggaatgcagtatttttctattgaatatgtgggttgcttgccttctgagtggtgagattccccattcctcatggaagctacagttaattggcaccttgccccacttctgtggcctcaacattatgaggagtaaggatgtctgaattatttcagagagccagggcttggtaaatgctgcattagtcttgttgaaagaaggtagggaggggacattggcaagggtgtttcacagctcttcagttgtttctttcctcagtccctacttcctctattttattacctttcaggggttcttctggaaaaatgtatctttggagggagagcctcttttctttatttttttaaatttatttatttatttttgagacgaagtctcactctgttgcccaggctggagtgcagtggcacgatctcagctcactgcaacctctgcctcctgggttcaagcaattctctgcctcagcctcctgagtagctgggattacaggcgcccgccaccatgactggctaatttttttgtatttttagtagaggcaggatttcaccatcttggccaagctggtcttgaactcctgacctcatgacccacccgccttggcctcccaaagtgctgggattacaggcgtgagccactgcgcccggcctgagagcctgttttctttgggttttgccatctattttaacttgcttcagtgctccttggaattcctcactgatctatgtgctgagagcatctcctagattctcagggctgctctggattaattttttatttctttcgcttatttcactgagttttggtgtgggaggaaaggtaaatgtgtgtttggtcagccattttaaagtagagcttcagtgccctgtcttcgtgggtttcccccttttctctattgcagacatcatggccgagaatgtcttttaaagtgaatcattgtgtacacctttgatcattttattaagatactggccttatatcctgcccttcccccctgccgccccccagaatcactgggtggtgatggtagatgattcacatgggaatgtgctacacttgtgaaagatgtagaggaaatactgctgattctcctgaaggaaaagtctgttaatttttctctgttggccattctggccgcatggtttctccttattgtttttttgttggattttaaaaattactagtaagattgaacatttataagattcatttgttgcccatttatattttttcctgcattttcttttcatgttaataaaagttttttccccttaatacgattcccttaattctttttttttttttttggagacggaggctcactctgtctccaggctggagtgcagtggcgcaatcttggctcactgcaacctccacctcccatgttcaagcgattcccctgcctcggccttccgagtagctgggactaccggcgcatgccaccacgcgcagctaatttttgtatttttagtagagtcggggtttcaccatgttggccaggatggtctcgatctcttgacctcgtgatctgcccgcctcggcctcccaaagtgctgggattacaggcatgagccactgtgcccggtccccttaattcttttgaagtgaaataagcagatgctgccaaatgtaagatatggcccggtccccttaattcttttgaagtgaaataagcagatgctgccaaatgtaagatatgttgctcagtttttagtgtagatttattatgttctgattcttggaaaatgaaaatctactcctggttttttggttaatacatacctcatgcggtggctgtgaaaattaaactaaataacataggtgaagtgcccaacacagtacttggtacataataggcagcattaaatactagttcctgttattcattctttcttctttgccagattattaaaatgactacagtactccacaccttagacaaaaagttgtttttactgaacccttgttcgatgaaggacagtatgccaaataccttgagggatacagagatgttttaggctgcttcctgtccagggataaatattagcatactatatatatagttacattttgaggctttttttttgagacagagttttgctcttgttgcccaggctggagtgcaatggcgcagtcttggctcactgcaacctccgcctcctgggttcaagcaattctcctgcctcagcctcccaagtagctgcaattacaggcatccgccaccacgcccggtgttttcttgcatttttagtagagatggcgtttcaccatgttggccaggctagtctcaaactcctgacctcaggtgatccacttgcctcggcctcccaaagtgctgggattacaggtgtgagccactgtgcccggcctttttttttttttttaacatgctgttgtgaaaaccttttggtcttttaactgttactttatttgagcacagaacactttaaagtttggttgccacatttaatccatgacacctctgtgagagtagttattagttccattttatagatagggtccctgaagggtggcaggagtaaaaatagggtatattgggatgtagaagaatgctaaccattattgtttccaaccttggtaggtatagagtaaatacttgttgaatgaatgaatgttcttttataagttgtgtattaagcccatacctaaatcttatctctacttcttttcttttttatttttgagccggagttttgctcttgttgcccaggctagagtgcaatggcatgatctcggctcactgcaacctccatcttccgggttcaaacgattctcctgcctcaggctcccgagtagctgggattacaggcgcccgccaccacacaccgctaatttttgtatttttagtagaggcggggtttctccatgtttgtcaggctggtcttgaactcccgacctcaggtgattcacccgccttgcctcccaaagtgctgggtttataggcgtgagccaccacacccagccaatatctctacttcttatagttttattcaaccccttctatgtttaatttaattgattaatttttgtgagacagggtctcactctgttgcctgggctagagtgcagtggcatgatcttggctccctgcagccttgcctccctggttcaagcaattctccagcctcagcctcctgagtagctgggactacaggtgtgcgccaccatgtcctgctaatttttgtaatttttggtagagatggggttttgccatgttgcccaggctggtctcaaactcctgatctcaaaatgatccacttgcctcggcctcccacagtgctgggattacaggcctgagccaccatgcccggcccccttttatattttatctggcaaaaataagcattaatgtttagtggttgatagggaggacattggaagtcggaagagagataacccacactgttttatacataataaaaaggcattaagggaaggtatatgtgctgatactgatttaactttttgcccttgttctgattctttgcaagactacttttctggtttctgtaacaactgcaaagggcttcccaagtttggggctagggtaaatggctcaatttgttgcactctaaggatgattgtattaatagatttttcattctaatctctggtagagtacggaaaatcaattataattaggctcagactcaaggggaaaactttaggtagatgaatttcataatatacaaactttaatagaataagtgattactgtctcagagtttactctgtatttagctgtctgtagttggttgtcttagatagtgaaatatggtcttttagtaaaaatggtaagacccctgtataggatttgaagtaggacatctatgagcttatttcaggtagtaagtagtattaacacatcgctttcactctccacatggaacactgcattatttttttttattttttttgagacagagccttactctgtcacccaggctggagtgcagtggtgcaatcttggctcactgcaacctccgactcccgcattcaagcgattctcccacctcagcctcccaagtagctgggattacaggcacacgctaccacgcccggctaatttttgtatttttagtggagatggggttttgccatgttgcccaggcttaggtattctttttctgtgtttctcctcaagtgtatggttctctagtttgtgaattcactgggtggttgtgatgtccagtcagtaaaatgataaacatgaaagcactttgaaaatgatttaatgtcattgcatggaaatgttatagtatcattgcatcactatttataatagttctcaagtttttttttttttttttttttttttttttgagactgtgtctcgctctgtcacccaggctggagggcagtggcacaatcttggctcactgcaatctccacctcctgggttcaagtgattctcgtgcttcaacctccctagtagctgggattacaggcgtgcaccacgacgcctggctaatttttgtatttttttgtaaagatggggttttaccatgttggccaggctggtctcgaactcctgacctcgtgatccatccgcttcagcctcccaaagtgctgggattacaggcgtgggccactgggcctcaagtgtttttaaccacgtttgagtgccctcttctttttggtcacacaactttactgtaaccccactaattttttcagatgtagttcatatactatctcctgtataaaacataacctcttcagtctgaaaggggtactgtttcctttgaacatttatagctattttgatttgtacagttcatttggtcatcatgagtctgaattgtcacatcttgccttttgtcttgataagttaataatgtaggatcttaagatgtttatctcttagtgagaccagcaaacatttattaggacaataacacctattgtcctaatctctggacataaagtttttgtgtattaattccagtgttcacaactggattgtaaggtactttaaagaaaagaccatgatgtgtatgtacttcctggtttcatgaatgttttctttatatataataaaatgtagcagtgggtaagattagtggatgtatcattaatgttaaaattgagttttaacattttcctttttagaaccagtctagcacttctctggggtaactgaatttttgttaaaattggtccatatatatttcctgtcttttttagtttgtttcacatactttgacttatttcctacttatttctcctccattaaggtataaattctctccttaaattgcttagccttggattttcacagattcttttgaaaaacctacgttttcataggcgtgttgtctttgtaagatctaactctgcagtgatttattgagctcgttttgttttacttattgagcatcaagattgaaagaggaaagtaatgtaattttcattatttataatgcatttggctttttaaagtgttttgaggttaaaaccaatagcagtctagcactagttgaaggtattttgaagaggtggttagtatccttggggctgttaatcaggaggtagcctttatgtagagacttgaaggaatagtgttagcagggtgttcttgtaggagctccccttattcgatggtttggagtccataattggaaaattaattttaaaaattggtaaagctctaagcaatcaaatacgaatgcacatataactattttgccataaagcatacttttctttcttctttctttttttttttgagatggagtcttgctctgtcgcccaggctggagtgcagtggtgtgatctcggctcactgcaacctccgcttcccaggttcaagggattcttgtgtgtcaacctcccgagtagctgggattacaggtgcctgccaccatgcctggctaatttttgtatctttagtagagacatggtttcactgcgttggccaggctggtttcaaactcctgacctcatgatctgcctgcctcggcctcccaaagtgctgggattacaggtgtgagccaccgtgcccagcctaaagcatacttttgattaccagtatttgtttgtttgtttgaggcggagtcttgctctgtctcccaggctggagcgcagtggcgtgatcttggctcactgcaatctctgcctcccaggttcaaacgattctcctgcctcagcctcccgagtagctgggattataggcgcacactaccatgctggctaatttttacatttttagtagagatgaggtttcaccattttggccaggctggtcttctactcctgacctcaaatgatccacctgcctcattatatcatttgaaaatgatataatgtcattgcatggaaatgatataatatcattgcatcactataatagttctcaagtgtattttttttttttttttttttgagaccatgtctcactctgtcacgcaggctggagggcagtggcatgatcttgggtcactgcaacctctgcctcagcctcccaaagtgctgggattagaggcatgagccaccatgcctagctcattgccactattttgacgtatgtctaggatctttctcagttgactgaagttcggtgtcatcttgtataatccatcctatgtgtgcagtaggttcagtttcgacgacttgaaagtagagcaataatttagataacctatgaaactagtgcagaataatagatttttatagttgtctcctgtcttttaacataatctaacccacatccgatttgacaggcacattttttaagtgactcatcacctttgttgaatcttgccaaagcatccaatgtaatttttacaaaattggcactttcttgtaattggtttgcacactatttaaatgaaaaacatgtaatgattgttaccagaggaattgacagttttgggtaagaaatgcaactgacttttggatacaaagcatccagcttaatataagggagcagaagtgtgaagttgaactagatagttaaccattagccaaaaacatttgtactgatggcaacagccagatctctgttttccagaggtaatgaggagtttgatgaggagtttggtaactgttaggttgaggactgttaagaggcctgctggaggccagtatggcacttcagtgcacagtgcaaacccgcttctgtaatgcattttatactttttaaaaattccatttcccatgaataacatgcttttttatgtaacagaagataatcgtaacaattatcatgtaacagaagataactgttatttggaatgcttggagaaaatcactgtttaagatttctgtaaagccttttcctgtccaagatttctgtaaagcctgtttctgtcattgcctgaaacatcattatgcagcacgtgactacctttattttagcacttctcatttggagttaaccctttcacctttactatgaggtcttcctctgaaaaacttttgtatacaacatctgatccacagttgatacccaacaaactgaatgaaacagaagttctggccacttaagtagatgtcacaacccaatctttttctttctttctttctttttttttttttgagacggagttttgctcttgtcacccaggctggagtgtggtggtgctcactgcaatctccgcctcccaggttcaagtgattctcctgccacagcctcctgagtagctgggattacaggtgcccaccaccacgcccagctaatttttgtatttttagtagagacggggtttcaccatgttagccaggctggtcgaactcctgacttcaggtggtccacccaccttggccacccaaagagctgggatttcaggcgtgagccaccgcgcccgcccgtcacaacccaaccttccgtcacaacccaatcttgatgtggtgtagttttcattgatgtgctactgaaaaataagctgttattatttataaactcagttcagagaatattttaggataattatactcagttgagtatattatattccatatgtcaaagatgctgtgctatgtctacagagttctgagcttaataatacatagttcttgtctgtggacatgtatattgttggtacagtgggaatatatgaggaggagagattaattcaagcctgaaggaatttgagaggatttgagagtagataggacctgaactggacttggaatggtaacaataattaggattttttggcagatattttactgctttatggcattggatagtctggatctccttcaaattcttttcccttcttttctgtcaaatacacctagtcttcctacttccatctctagccttcttcctctgcaataatctttattttccttaacaatctattgcttttggccattttcctcttctttcttgcccttggtgtaatgcgttattgttttaaccctaaccctgtgcttctggaaatatgcttttctatcttctacatagccacaacacttcatcagtatccttcttagagcatttatcgtttctttgcactatagttacatacagactccatcctctgctggaccttaacttcttgagggcaagttgcacctttatagttcttaaagtatctagtatatagttttctaagtagtaggcaccacatactattctcttacatttagcttctttcctcaaactcaactcctcttctagacttgcctttttctgtgcatagtactagagttctttcaattccccattctggtcagtgagttctgcttctgtctttgaaatgttatttgtagccccaccattttttccactgtcgtcattgcatgccaattaaaagataaatatttagtgcatattgttctaagcactgtgtaggtgctaggaatacaaatataacagatccaattccttgttcttagaatcctagtcggggattattttggtactttgttgagcaaatgtttattgaacactttctctgtgcggagctctattgtaggcatagatgtattatatcattttccacaggctgctcatcttcaaggggaaaacatggctactggatttcctctgttctaaggtacacttttcttcccattttcttctagcatctctgaaatccagatgcgtctaaaccctggtatgtttaatgtttttttgtttgtttgtttgtttttttttgactgagtctcgctctgttgcccaggctggagtgcagtggtgtgatctcggctcactgcaacctctgcctcctgggttcaagcaattctcctgcctcagcctccttagtagctgggattacaggtgcatgctgccatgcccagctaatttttatatttttaatagagatggggtttcaccatgttggttgggctggtctcgaactcctgacctcgtgattgacctgcctgggcctcccaaagtgctgggattgtagacgtgagccaccatgcccggctttttttttttttttttttttttttgagatggagtttcactcttgttgcccagagtggagtgcaatggtgcgatctcgactcactggaacctccgcctcctgggttcaagagattctcctgcctcagcctcccgagtagctgggattacaggcatgcgccaccatgcctggctaatatttttgtatttttagtagagacagggtttcaccatgttggccaggctggtctcaaactcctgacctcaggtgatccacctgcctcagcctcccaaagtgctgggattacaggcgtgagccaccgcacccagcctgcttaatgttttttattcccccttcaagagctgttaaagtgatgctgcttacaactagtagttgtaactatagtataatttctaattactatactgtatactatagttgaactatagtatatattaatggtaaatatgatggacatgtgtagaattgtgctgtcaaatgtggtagcttctagctacatgtggctatgtaaatatgttaattagacattaaatttattaaattttaattaaaactaaaagattaacttgaacccaggagtttgagaccagcttgggcaacatggtgaaactctgtgtctacaaaaaatccccccccaccccaaaatcagctgggtgtggtggcacatgcctgtagttccagctactgtgggagttatggtggaggtggggctgaggatcatttgggaacgggacatcgaggctgcaatgagctgtgcattattgcaccgctgcattccagcctaggcgacagagcgagaccctgtctcaaaaaaaaaaagaaaaagaaaataaaggttcagttcctcagttgcactggccacagttcagatacccaatagccacatttgactagtggctactgtattagacagtgcagatatagaacattcccatcattgcagagtgttctgttaggtagcactggtctagaatgtggttccacagttgtacctggagggttggaaaagctttggttagtttacttcctggcattattattacctgtatttccttccttcagggaggtcagggaacttttctgtcttttccttctgcctttagttttaccagggcctgggacagtaagtggtaggtacgcagaaataaaaaacaactggagcattaaatagtttagataaaaaggggaaaggctatacatgtgcataacaggaaatagcttagctggctttattcaacgtgtatcctggtgtacttttttaagagggtttttagaacaaatttcatcacattgaaaatttaagaacttttatctaggtttgtatcagttttgttgtcgtgctgctataaagaaatacctgaggccgagcaccatggctcatgcctataatcccagcactttgggaggctgaggcaggcggaccacctgaagtcaggagttcgagaccagcctggctaaaacatggcaaaaccccgtctctactaaaaatacaaaaaaaaattagccaggcatggtagtgggcgactgtaatcccagctactcgggaggctgaggcaggagaatctcttgaacctgggaggtggaggttgcagtgagccaagatcgcgccactgcactccggcctgggcgacagaacgagactgccttaaaaaacaaacaaacaaaaaagaagtacctgagactgggtaatttataaagaaaagaggtttaatatgttcatggatggttctgcaggctttacaggaggcatgactgcttctggggaggcctcaggaagctttctttctttttttttttttttttttttttttgagatggagtctcgttctgtcaccaggctggagtgcagtggtgtgatctcagctcactgcaacctgtgcctcccgggttcaagtgattctcctaccttagcctcctgagtagctgggactacaggtgcatgccaccacacccagctaattttttttttctttttccgagactgagttttgctcttgttgcccaggctggagtgcaatggcacgatctcggctcactgcaacctctgcctcctgggttcaagcgattctcccaccccagcctcccgagtagctgggattacaggtgtgcgccaccatgcctggctaattttgtatttttagtagagacagagtaattttcgtatttttagtagagatggggcttcaccatgttggccaggatggtctcgatctcttgacctcgtgatccgcccgcctcggccttccaaaatgttgagacaggcgtgagccaccgcactcggcctcaggaagctttcaatcatggcagaaagcaaaggggaagctggcaagtcttacatggctggaggaagcggggtgccgtaggggggaccgtactacacacttttaaacaaccaggtcttttgagaactcagtatcacgagaacagtacccaggtagatggtgttaaactattagaaactgcacccattgtctaatcatctcccaccaggccccgcctccaacattgaggattacaattgaacctgagatttgggtgaggacacagatccaaaccatatcaaggttctttttatttatttatttattatttatttattttttggagacagggtctcactctcttgcccaggctggggtgcaggggtgtgatctcagctcactgcagcctctatctatccaggttcaggtgatcctcccacctcagcctccagagtagctgggaccacacaggtgcattccaccatgcccagctaattttgtattttttgtagaagcggggttttgtcatgttgcccaggctagccttgaactcctgggctcaagtgatcctctcaccttggccttccaaagtgctgggattataggtgtgagccaccattcctggcttatctaggtttttatcccttattaagtgggattcaaggaggcccatcatgtcagaatgctgtgggttggcaggaggcatcacaatgaaattttccatgttcccaaatttgatattcacagtactacatataatttctcagggaagatagggttggacacgatggaaatattttggtgaaccattcgttcccttgggtttctttctcatttggggagtgtggtttacaatgattggagcaaaagtttcctgaatctttttcttgtttccattttattgcatggtaaaacacaatttatccactttcttgtcaatgagtatctagttagattcctgttttttggctaattcaaataaaactatgaatgtttttgtaccggtcttttggtgggcagttgctttcctttctcttgggtacatacctaggaaggagggaagttgctgggccacagcatggccagttttctaaaacagttgtagcaatttatgttgctttctttttgaaaggacaaaagattaaagtttgccattaggcatttttactgtccgagtatttccatcaagcctgtgtgagttaagtcattaattaccaaacatcacagacctttggggtcacttgcagataaatctgaaaatagtatagacctaccatatcattcaaaagaccttaaaagaatataaaaactaagcatcttatctctccctctattgtcaatcttgatttactttcaagacacacggtctttgaagaaacttgttcatgcctttgtaaatggattgtgttgagtactgcttcctgttgcttactgttatgggaatgagtgtactttgcctgtcagtgatattactagctactatttgagggcttgcagtgtgtaacagaataaaggacaatgcccttttgaaattctagttcagcataagtcagcaagtttcaaactgagttcttgatatttgcaaggttctgtgctaggcatctccatgtccaaagaccaatgagaatgaatctcctaacctcttgaccttgtctaatggggataggaggcacataccatgatacaagaccaactataattgtcactagaattggaaataaagtgctgccgggcttccatatcacagcatatcacattttatttgggttgcagagaggggaaggtatccttgtaaagtaagcttatccaacccgcggtctgtgggctgcatgtggcccaggatggctttgaatgtggcccagcacaaattcgtaaactttcttaagacatgagattttttttgcggtttttttttttttttcttttttagcttattggttatcgttagtgttagaatatttcctgtgtggcccaagacaattcttccaatgtggcccagggaagccaaaagattcgacacccctgctgtaaagcttcatggaagggttgtggtctaagaggtccaccttgaaaggatttcagtcgcagctgcaatatatgccaggtgaagggaattgcttgatggaatcatgtagcaggaacatatagtctataccaagtggttctcagagtgtggtccccagaccagcagcatcagcatcatctggaaacttgttagaaatgcaaactcttgggctccactccagacctactgattcagaaactcagaaatcccagaaacctgggttttaactagttctctaggtgattgtgatgtgttaaagtttgaaaaccattggtctagacttaattggtcagagaatagttgaagtaaggtttgagaagggaagttatgagaacaagaaggcaggggccttactgcagagaccttgattgagtactagggtgtgagtatatggggctggggaaccgttagggtgaaggaaaggacatccttggagtttactttaggaagagtgagccaacaaactttttttgtaagatgaattaaaactaaaagatactggaggccgggcgtggtggctcacgcctataatctcagcattttgggaggcctaggtgggcggatcacttgaggtcaggagttcgtgaccagcctggccaacatgatgaaaccccgtctctactaaaaatacaaaaattaaccaggcatggtggtgtgcgcctgtaatcccagctactcaggaggctgaggcaggagaatcgcttgaacccaggaggcggaggttgcagtgagccaagattgcgccactgcactccagcctgggtgacggagcaagactctgtctcaaaaataaaaaataaatgaaaaaaataaaagataccggaagctgggagtagcagccttggaaagtgaaaggagcaacacagctgggatgagtgagccttgacagctggctggtcaagtgtcaggaaagaggccacagcctcagaagcagctatggttctgaacctgggtgttgagaggatggtggtgcctttagaagcagtgcaggcagaagacgcaaaggccacatggtgcaggaaaatgggacaagggggaagaggatgttttctacaaataattgcttcttcccctgaatgtacaagtttagtgtaagaaattcaggtacttgaggggacagtgaagaagaatgcagaatcgcctcaaatcccactttacagagattagcaaaacattattctctttaaatattttgagtatacatttgtttctttaaactcagttttgtatgcatggaattatacaattccgtaacaaattttctcagacaaattgaatttgaatacgttagtgttccacacatgaatgatcagtgtgcgtttggaaattggtggattttatatttgggaaacagaatgtttatacaagcagctaattggtaaagattgcaatttcattatccatggtcataaaaacatcctgtccacattagttgttacagaggaaatctggggcaaaacagtttaagatgcttggtgtgctgttagtctggggagaagaactgcaactaagaagaaaaaagatgaaacatttgtggcttttattagaatagcaagtttattacggtgtcttacaagaactaattaatattgggcataaaatagtctcattacataggtcaataccaagttccaaagttctcctttaaaataggcagctagctcctagtgaattttatgagccacaagcaaagatgtggaatagtttgcccatttcttagttttgtgacatgtatgacagaatataccatcttcttaagtatggtgtgtgtgttttttttgtttttgtttttgttttttttttaaagaaattatgggcagaaacctttatatttcttcctacctgatttgaatgtgagttcacattttcccatacctatgagagagcactagatattttccagttactttacttattaccaatctgataggttaaaactgatttctcatttttgttttttttttaatttaattgattactattgcgatggaacagggtttttctttttcttctttttatttaaaatagagatgaggtctcactaagttgcccaggatggtctgtaactcctgaggtcaagtgatcctcccacctcagcttcctaaagtactagaattacagatgtgagccatcatgcctggccaggaacaaacagcttttattagataattgcatttcttttgtgaaaggactgttaatatctctttgtctgttttctctttgggtgtttatattatactgatttgtaagatgctaacatattaaggatattcagcttctgtctttctcttttttttattttaccacttttttaaatcaagaggtgtagatactcattggctttttaaactatgccacagtgaagcatggcaaacacttcataaggtataggagatattcagtgaattatcacaaagccaaaccttatgtaacttgacctaggtgatgacataaacattgcaaaaccccaaaagtcagtagtgtacctaaggctgggggtgaaaggtgaggtctaccccaggttcaggcaataacaaagtgcattttctttagggaatttaaaatcagtaaaattattgactaagagttggtctgctttttgttatcatgtgttggccatttaaaaaatgtcagtgtgtgtacatgtatatataatatctgctttgtggctgaactgttaactttctttttgacaaatagaagttcttaattttaatatagtccagtttatctgtcttttcctttatggtgggtgcttgctgtatccacaaagagatattcttctatattatatttaaggagcattattgttttgacttttatatttaggtctgtaatccacctgaagttagtatttatgtatggtgtaagttggaggttaagttgaattttgttttcccttatgaatagccaaatgacagtgtcatttgaaaagatctgatttgcagtgccaactgtcttgtacagcaagcatccctgtatgatctatttctgggccttctgttcattcttttcatctgtttgtctagtgactgagctttataatatgtcctaatccagagagaaagtctttttgttgtacttcttcaaggacgtcttgtttgccttggctatttgtatttatgtatacatttttaaatcttctgccgggcatggtggcttatgcctgtaatcccagcacttttgggaggccgaggtgggcggatcacttgaggtcagaagttcgagaccagcctggccaacatggtgaaaccccgtctctactaaaaatacaaaaaaaattagctggatatggtggcgggtgcctgtaatcccagctactcgggaggctgaggcaggagaatcccttgaatccgggaaggggaggttgcagtcagccgagattgtgccactgctctccagcctgggcgatagagtgagactctgtctcaaataaataaataaataaataaaatcagcctgtaaatttcgattaaaaatttgttaggattggttgggattgttttgggtctctagatcaatttggatagaattgacatctttacagtgttaaatttcaagaacatgggatatcccttcactttattaggtccctttaatttgtaaaagtattttttgtttgtttaatagctttctacatagaagattttccactttttatttctaggaatttgataatttttgatggtttcaggaatggtattaaaaattcatttcctagctttattgctggtgtatagaaatactgttggtttttgaacattaacttttgtatccctcagctttgataagctaattttttctgctagcttacttgtagattgttttggattttctattgtgtacaatctgtggaaaatgataggttttttggtcattcctagcactcatttttgtctagatttctacctgttctcagtgaagagatttgtctgaattatatataatcattattactggaagcagaaagtcttcctaaatgaaagataaaaactacaccccattctcatttctgaattatctttgaatttaaacccaaatctcaaaggtgcctcaatcccagtgaaagctaatagtattttttgagacagtgttataaatgttcctaatggatttataagcaaatcttatgaaatctttaaaatttaattttttttgagacagcttttaatgtgtatctcaaggacttaaaatatgaaaacttatcagtagtttaaaaaattcttccaagtagtgaagtcactagtgaagccataaggtgtctctgatgtgctcatttttcttttcctttttttgagacagggtcttgctttgtcatccaggttggagtgtggttgctcattgcaacctcagccttgagctcctgggctcaagagatcctcctgcctcagcctcccgagtagctgggactacaggcacccgccaccacgcccagataattttttgtatttttttgtagagacagggtttcgccatgttgcccaggctggtcttaagctcctgggcttaagcagtcctcccaccttggcctcccaaagtgctgggattacaggtgtgagccaccatgcctggctcatttcctagtccttgttcttatgagcctcctactggaagtaccccagggagctctccgcatttgcagagggcattggcttgcttgggtaatgctctgtggtgccaatagagatgcactgcaggaagaactctggaaacttcgttgggagagaagtggcatatgagcatcattgtgagcaagtgtcaggtaatgttttccagaggaaaataccaaattgactagttgtatgccagacacatctgacagtaataacagaggcatactctgaatatgaacctgtatagcatatgtacctgacagcagtaacttacttaagcataccccgagaatgaccctgaggtctaagaacaacttgtgttcatagggtaccgaactaaggaatccagcagtgaccaaccagcagattcattcattatctataaggaacatctgagcccccaggccagtcctgtggatcctgggctttgccggaagattgaggatctttgttttgggttaaatgaaggttgccaggtggaggttggtgggggagggtgctaagtcaaaatgttatataaactgcatgcttttttacaagtgggatcagttcttctttctagcctgctgccactggactggatggccctgcatgtaagttccctcaaaaaccctacatctttttcactagctctgggtctcttctttggcttttcaaacatggtgctgtccctattgaagttaataggggttcaggacaacattagtaatttgatgagttgcagctgagggatcagagtattgtcataggttgtcctgtagcattttcatgcatgctccttgtgaacttgaggagtctgtaagctgctgtagtcaaggaggtcaacaaatgctaagcagcctcagtaaagggattgcaacttaaaacagcccaccattgcaggttcatctccatgaaggaccagcaagagacagttacaatgagcaagggctctgttgactattttgggaattaagggagtgggcaagcaaaagctgtaattgtaattagtgttgtggaaggagaattatcccccacctttttttttgtctttcactgcggtttacatgtgataggtgtttgattaatgtcagttgtatatgtgaattgttatgaagactttagaaaactttagaaactaatgttaagtgatgattgaaatgtgctcagattaaaaaaataattttagtatcttcaaccagtctagctggttaaataattttattattcctgtagattaaaaaattttaaatatcaagtttagagaaaaatcttattctaattttggagtatgattatatttcaattcagtatgtagttttccaatttgaaaaaaatagctatagctataattataatcagcaaatgaatgggatctgagactgatttaagttaaaatttgtgaccttaaaggaattgattcacagtgttctggattcttttcagaatgtgcggatactgtaagtacaatttttcttcatagtaagtgtaaattaaatataaactctatagtaaactcaagcattctataagaagccacataacgtgctatttctttcttttcccagtggtgttttagtgaatcattagttgtatgtttctttcttgagttggagctgaagaaatccttcccactggaaatatgagttctataccattttgtgggtagggatccagcggtgggcctttagtaagcgtaagcactggcttttgcatttatacttgtttttatagaataacaccatcttgtaaaatgatttgttcccagagtttttctagatacggtaattttaaacacaccttatgaatgttcttttaaaataagttataaagtgaattattttgtaaaacaagagttcttttattagcatgaatatctcctaatcttccctcacccccagtactactagctacttctagggttgggttttcagatacaatcaattttcttagtcttacgtagtgctttggagattagtgctcagatctcgtattgaagtatggttcttactcatggcagataatttctgtcttttcacttttgagttgtttttatacccttgaatatagtaggctaactatagaatacctaatgtcacaatcatgaaagaaatagttggtaatttataaaagctgtacgaaaatgtatattagacttttatggtttttaaggtcaaaaagaaactgaagactctttagaaaaggtcacaaaaaatcattgaatagggctgggcgtggtggctaacgcctataattgcagcactttgggaggctgaggcgggcagatcattggaggtcaggagttacagaccagcctggccaacatggtgaaaccccgtgtctactaaaaatacaaaaattagccaggcgtggtggcacacacctgtagtcccagctacttgccaggctgaggtaggagaattgcttgaacctgggaggcagaggttgcagtgagctgagatgctgccactgcactccagcctgggcgacagagtgagactctgtctcaaaaaaaaaaaaaaaaaaaaaaaaaaatagcggggtgcagtggctcatgcctgtaatcccagcactttgggaggccgaggcgggtggatcacctgagttcgggagttcgagaccagcctgaccaacatggagaaaccccatctctactaaaaatgcaaaattagctgggcgtggtggtgcatgcctgtaatttcagctactcgggaggctgaggcaggagaatcgcttgaacccaggaggcggaggttgcaatgagccgagatcgtgccattgcactccagcctgggcaatgagagcaaaactctgtctcaaaaaaaaaaaaaaaaaatttcattgaatcagacctaccagtgtctagttcaggatttgaatgcttagtatatattcattccttttgggggaaaagatatttctaatgactacttcatatgttttgtgtttttataattttctagttagaattcacgggcttatttcaaagaagacttctttaaaattaccaatttttagtccatttgtcttttctcttagcaaatccccaaatgacaaattgattaaaagaacacttagaataaatactgtaagttgtattatttaatatgtatttttatgtgccacatgtagagaaatgattaaagacaaaagtaatgaagcagactttttaaagaatcacttgacagaaagcagagaacatttcttacatatagaagtaaatgggctgggtgtggtggctcacgcttgtaatcccagcactttgggaggccgatgcaggcggatcacctgaggtcaggagttaaagaccagcctggccaacatggtgaaatcctgtctctactaaaatacaaaaattagctgggcatgatggtgggtgcctgtaatcccagctacttgggaggctgagacgggagaagcgcttgaacccaggagatggtggttgcagtgagctgagatcgcacagctgcactccagcctgggtggctgagtgagactccgtctcaaaaaaaaaaagaagaaaagaaaaaaaaaaaaaagaagaaaagaaaaaaaaaaaaaagaagtaaatggatgaggtgaacctcattatcttaggaacattttagcttaatagtaacaggaaaatagctttcagaatgggtttaatcagaataattaaacccattctgtcagtactgctggattacagattaattgctgaattttgagtacattactgagaatttggtcagagaaatagaaccactgtgagtattatgggtaaggaacttatatggtaatcagactgtacacaattataagaggtgctggggatgggaatatctatctgaaaaaggaaagacctgaaaaaatcactaatagatcctcctgaggtactggtacaggttgataaatgagagcttactgggaaaattttaagaagccaaatgtgtacagtcaccaaagtaggcatgcagaaaggcttttttctggagagttctgtggaaggctgtttcctccgtgtagctgctgcctctgtgggtccacagccaagcatttgttgttgggtcttgctctactgttggtcagatcagaagaagagctggacacagaggggacaagaggagagcagggacaagctggaagctgccacacacctctgcatttgtcgtcaccctgtgtgaccttcatgaagatcttgtaagaatttggccatcttgaacttggtgtactgtgcaggaaagggaattctgggaaacacagttcccggcttgatcaagttcacaagagactgatccactacattgagcttctcattttgagcatctcaagtctttttttttatgtgtggttaaaaatttttattttttatttttattttttgtgggtacatagtaggtatatatatttatggggtacatgagatcttttgatacaggtatacaatgcataataatcatatcagggtaaatggagtattcattacctcaagcatttatcctttctttgtgttacaaacaatccagttatactcttttagttatttttaattttaatttagttttattaattttttttgagacagggtcttgttctgttgcccaggcgggagtgcagtggtgcaatcacagctcactgcagccttgacttccagggctcaagccatactcccacttcagcctcctgagtggctgggactacaggcttgcattgccacacccagctaatgtttgtaatttttgtagagacgaggtctccttatgttgtccaggctggtgccttaactcctcagctcaagcaatcccctaccttggtctcccaagcaatcccctaccttagctgggattacaggtatgatccactgtgcccagcctagttattttatttttatcttattttgtttcagtttatgtattttatttattttattttttattgtttttttgaggcggagtctcactctgccacccaggctggagtgcagtggcatgacctcagctcactgcaaccagctcttcccgggttgaagcaatcctccaggctcagcctcccaagtagctgggattacaggtgggcaccaccacgccttgctaatttttgcatttttagtagagacaggagtctcaccatgttggccaggctggtctcgatctcctgacctcaagtgatccacccactttggcctccgaaagttctgggattacaggcatgaggctctgtgcctggctgctgcctagttattttaaaatgtacaataaattattgttgactatagtcaccccgttgtgctatcaattattcattctgtctaactatatttttgaacccattcagtgtctcttttggtctcatctcatcagtagatgatagcaatgttaaaatactttgagcctcaagattttcatttcctgatggtatttactgaggaatttaaaatgctgtactttggatagcttttgttcttttacttattaacaccatggcctttccctagtgtattttaccatacagtgcatctgtatcttattttctgacttttctcattgttgttaaagttttacaatcccagtaaatgaattccaggccagataatatcatttcagttttggagaggaaaacgagtacaaactttaagtagaagtaacttttacatagtctttggtggatttaggttaaaaatacccaagcatgccataagacattgtgctgtccttctgaaacgataatattccactctagcaataatgaataaaaggggatgacctttttcaggagatctaaatttgtgtacttctaggctctttgaaatacagagcatcaaaattttgttggctaggttgatatattcagccagcaaaattaagtggtttgctgttctctgattctgcgacacatcgtttgtgttctgggtctataccttctgtcttctgcagtgcaagtataacatacatgctagatagtttctgatttttttttttttaaatgtggatatctgacggagtaggggattttagggcatgataagatatagaaaatgctgaaaatagttttcatttatttccttcctgcagtccataatggggtgttcatttgcctctttcccatttaatttttcctctctagggttggagaatctcttctaattttttttttttttttttgagacaggatcttgctctgtcacccaggctggagtgcagtggcgtgatctcggctcactgcaacctctgtctcctggatgcaagccactttcctgcctcagcctcctgagtagctgggactacaggcacatgccaccacgcctggctaatttttgtatttttagtagagagaggggggtttcacaatgttggacaggctgatctcgagctcctgacttgaagtgatccatccgcctcggcctcccaaagtgctggaattacaggtgtgagccactgtgcccggccctcttctaatttcttttaagagcattcactgataataactgaagtatcctggagagttacatgaacctcttagatgtagtcatagaatatttaatatattttgttggcttctagtatctgttcacttttagaatagtacagtattttttttttccagtaggtgctcgtcacccaggtaaacactacattttccagtctccgttaaagccaggtgtggtagaggattaaatcttgtccagtaggatatgaatgaagatgttaggtacatcttgggtgttttgcctaaaaggagtggagttttggcctccctgtcctccacttttcccccttctctgtggctgagatatggggaaattggtgagagttgagttagatatctcagactgtgatatggacagtgctggaaccacttacctggacttttacatgaaagataaaaatgaacttctctctcttttttttttttttttggagactcagtcttgctccatcacccaggctagagtgcagtggcgccgatttcggctcactgcaacctatgcctcccggattcaagcaattcttgtggcattttttaaagacctgggggtggggagaggggatggtgtatgaaaagtaggccatcaggggaacttcggttcttttttttttttttgagacggagttttgctcttgtcacagctcactgcaacctctgcctcctgggttcaagtgattctcctgcctcagcctcctgagtagctgggattacaggcacgtgccaccacaccagggtaatttttgtatttttggtagagatggggtttcactgtgttggccaggctggtctctaactcctgaccacagttgatccacccgcaccatcccaaagtgctaggatgacaggcctgagccaccgtgcctggccctgggaactttggtctaatgaaataaaatttctgcaaattaaagtgttcgtttttgttaccttgatagcattagtctagactttcttcatttttacaagaccgtgaggagattattcatggtatagtatggtatcagaaaaattgtaagggtatggtatgtgttgattatttccccgaaaaccatcctattttcatctctgttgcctctacctttattaaggtacataagtccccaagttttataagtccccaagtttctacctcctcggaaccattttccctcatcctcaacaatcctttctgatatagaagtttatcacttgtggtatgactgttctccttaaaaccttcaataatttctaatgcctgaggaccaaagtaaacacagtttataacaaacaataatcaaacacaccttgtagcaatcagtataacaatgcccttttacagcagattaaattattgaagtgacttgttcaaagtagcagaggaagataaaagcataagcgtgttttgctgtacagaattgtgaaaatggaatccccgttcctagggaccttaacttttagtagtggaaaagcaacttaggcaggcaaataattcagagatttggtattgtttagtccaaagttagtgtttgaatgaatataaggtagtgaatgaaatttggagaatctgttgttcaaacttttaaaaagttaaatagtattaccttaaatataggaacacattttctcattttgtattctttgaatttttatttattttaaactttgtaattattttttgttttttggtttttttttttttgagacagaggctcactctgttgcccaggctggagtgcagtggcaatctcagctcactgcaaccgctacctcctgggttcaagcaattctctcctgcctcagcctcctgagtagctaggattacaggcacgcaccaccacacctggctaatttttgtatttttagtagagacggggtttcaccatgttggccaggctggcctcaaactcctgacctcacgtgatccgcccaccttggcctcccaaagtgctgggattataggcgtgagccaccacacctggcttaaactttgtaatttttatttcttttcttttctttttttcttctttgtttttttgagacagtgtcttgctcagttgcccaggctggagtgtagtggcacaatcacggctcactgcatccttgaccttttgggcacaagcgatcctcccacctcagcctcctgagtagctgggaccacaggcatgcccaccatgcttggctaatttttaaaaatttttctgtagactcagggtctccctgtgtggtccaggctggcctcaaactcctgggctcaagccatcctcctgcctctgcttcccaaagttctgggattacaggcatgagccactgtacctggcctgaactttgtaattttgtaagaacattttaagaaaatgctaattggaaaattatcatctctactctttttcctgtcaaatattatatacatcatttataatttattttagccttctaatacttagtattaatacagtgagaactggtggtggtacttcagtgttccaaactcagtctactgcttttcttggaaaagatgatgaaaataactactttaatgtttgtggttattgctcttttctagtatctgaattttaaaaatacattgtatagagttatgtttactcatataacaaattttagattttgttcttacaatgtatttccaaaacaagtaacattactattcctatttcttagtaacttgtgtaactcaagatcagaaaatttatattgatcagaccttgaaatcagggttaagcattcacatttgaacaaaggataggtttcttgagtattttctctgtagttcattccttatgtatttcttactgtgctcatccaaattttctcatttctttggttcaactttcagtactttgtgagctctctcattaggtgcaatatgtttataatttttatcccttcctgttggattgactcttaatgtccttctttatctttttttaatttttgagatggggggtttcactgtgttgcccaggctggagtgcagtggtgtgatctcattgcactgcaaccttcgcctcctgggctcaggcagtcctcctgcctcagcctcccaagtagctaagatcataggcatgcaccacgatgcctggctacttttttgtatttttgatagagacaggttttcaccatgttgctcaggctggtctcgacctcctgggctcaagtgattcacctgccttggcctcccaaagtgctgggattacaggtgtcagccactatacccagcatccctctttacctttagtaattgatttttgattaccaattactgactattggttattgatagtgattattaataaagtccacattcagatttttttagttttttaccttatacttttaaaagtcttaacatctagtttgtttgattttaatatagccattccagctctcttatgcatttatatctttatcctttcaatttccacttatttatagctgaatgtaaaatacgcctcgcatagacaacatatagttgaatctttttttttttgagacggagtctcgctctgtcgccatgctggagtgcagtggtacaatctcagctcactgcaacctctgcctcccgggttcaagcgattctcctgctgccccagcctcctgagtagctgggactacaggcatgtgccaccacgcccagctaatttttgtatttttagtagagatggagtttcaccatgttggccaggatggtttcgatctcttgacctcgtgatccgtccaccctggcctcccaaagtgctgggattacaggcgtgagccactgcacctggccctgaatcttgttttttaattttaatttttattattattttttgagacggagtctcgctctgtcaccgaggctggagcacagtgttgtgagccggattcaagagattctcctgtgtcagcctcccgagtagctgagactgcaggcacgtgccaccacgcctggctaatttttgtatttttagtagagatggtgttttgccatgttggccaacctggtcttgaactcctgacttcaagtgatctgtccaccttggcctcccaaagtgctgggattacagacatgagccactgcacctggctgaatctttttaaaatccagtctgacaatctttgcattttgattggattgtttaatcctttcacatttaatatagttattgatatgtttggatttacatctattattttgctgtttgtttactgtatttttcattttgttgttttgtttttctgtttctcctttactgttttattttgtattaagggaagaatttcaagtgtaacattttaatttctttaatgatttttttttagtttttttggagttattttcttagtgttgctctaggacttaccacatacatgcttatcagaatctacttcagatgtatgctaacttaactccagtaagatatagaaaccgttccttccatgtagctctattctctcttcctttttgtgatgttattatacatgtcttatttatgttaaaacctgagatatgttgttaaaatgataactttatataatttcatattttaaagaagctgggagaataaaggagaggaagtatatatttgtagtttgttatattaactttcttatttaccatttctggtttccttaatttttgaagaaatttgagttaccatctggtatcatttccttactccagtatagctttgttcccacccacctcctttgtgctttagtggccctttaacaaaaattcgtgtggagtcatgttactgtctagtgtcacttgttttcagtatgtaaaacttcctttagtattttttgtaagttggatcttctagcaatgaattctctcaagttttcatttatctgggaatgtctttattttgccatcatttttgaaacatagttttgttggatatgaaattcttggttgacaagtttttttttttccttttctttcatcgctttgaatgtgtcatcttactgccttccagtctccatcgtttgtttcttttctttccttttttttttttttttttgagatggagtctcactcactttgtcgcccaggttggagtgcagtggtgctatgtcagctcactgcagcctctgcctcccgggttcaagtgattttcctgcctcagcctcccaagtagctgggataacaggcatgcaccaccacacctggctaatttttgtaatcttagtagagatggggtttcaccatgttggctaggctggtctcaaactcctgacctcaagtgatctgcccacctcggcctcccaaagtgttgggagtacaggtgtgagccaccgtgcctggccaatctccgttgtttctaatcagaaagtcagctattaattttattgaggattcttcttatgtgataagttgtttttctcttgttgctttctttttttttttttttcttaaatatatattttgttgttgttgttgtttttgagatggagtctggctctgttgcccaggctggagtgcagtggtgtcatcttggctcactgcaacctctccctctcgggttcaagtgattctcctgcctcagcctcccgagtagagtagctggggctacaggtgtgcaccaccatgccccgccaatttttgtatttttagtagagacggggtttcactatgttggccaggctggtcttgaactcctgacctcaagtgatctgcctgccttggcctcccaaagtgctggtattacaggcatgagccaccacacctggccttaaatgtattttttgatatagagatggggtcttgctgtgttgaccaggctggtcttgaactcctggcctgaagcaatcctcctatcttggcctcccaaagtgttaggattataggtgtaagacaccgtgcctggcctctcctgctgctttcaagactttctatgcctttcagcattttgactatgatgtttctgggtgtggatctctttgtgtttattgtatttggagtttgttgagtttcttggatatgtagttaaatgtttttcatcacatttgagaagttctcagccactatttctttttttttttttttttttttttgagatggagtctcacactctcgcccaggctggagtgcagtggcacgatctccgctcactgcaagctccgcctcccaagttcacgccattctcctgcgtcagcctccctagtagttgggactacaggcacccgccaccatgcctggctaattttttgtatttttagtagagacggggtttcactgtgttagccaggatggtctcgatctcttgaccttgtgttccgcccacctcggcctcccaaagtgctgggattacagacgtgagccaccacgcccggccagccactatttcttaagtatttttttctgttctttcttctcctctggtattcccattacatgtatgttgttgtgtattagtccaggctctccagagaaacaaccaaaaggggatgatgagatagatagatatgtttagtggtatcccatttttctctgaggttctgttcatttttcatttttttctgtgttcttcagattgcataatctctatcaatcagtcttcaagttcactgattcttctgccagctgaaatctattcatctcctctagtgagtttttaaaaataagcttcataatttagaataggttttggtttacagaaacattgcaaagatagtggagagtttccatgtaccccacatgtagttttccctattattaacatcttatattggtatgatacattcattctaattaataaaccatattgttagtgattattgattactgatattcaaagttcatactttattcaaatttcctgttttaatctaatgtctttttttttctgctctaggatctcatgtaggatatcacattacatttagttgtcatatcttcttagactcctcttggctgttacagattctcagactttctgtgtttttgatgaacagttttgagtaatactgcttaggtgttttgtggagtatccctcagttgggatttgtctgatgttttccttgtgattagactggtgttgcaggtttttgggaggaagaccacgtaagtaaagtgtcattttcatcacatcgtatcaaagggacatactatcaacatgcttatcactattgatgttaattaaccttgatcacctggctgaggcggtgtttgtcaggtttctgcattgtaaaactactctttttctccctttccataatgtcctctttggaagaaagttactatgtgcagcccacatttaaggactatggagttatgttccaccttattgaagatggggtatttacataaattatttagaattcttctgcacaggggatttgtcaactctgactctctcatttacttatttaaaaaatcattatggactcatggatttctttttaatactttggttaataatccaaatgtagtactactttattttgttgctaaaattgtccctgctttggctactgggggccccttcagttaactagtgtgatttgacatagcacacttcttcttccttcttcctttcttctttcttcttcttcctcttcctcttctttcttcctttttttttttttttttggagaggaagtctcgttctatcccctaggctggagtgcggtggcgtgatctccgctcactgcaacctccacctcctgggttcaagcgattctcctgtctcagcctcttgagtagcttggattacaggtgtgtgccaccacgcctggctaaatttttgtatttttaatagagatggggtttcaccatgttggccaggctggtctccaactcctgacctcagatgatccacccgcctcggcctcccaaagtgttgggatgacaggcgtgagccactgcgcctggccttcttttttctttctctctttctcctcctcctcctccttctctctctctctttttttttaaacctacttctttattttctggcactagaatatgctccaggctcatcttgtacatttttatgccccagtcctagtttcagccatttcaccaaagagtcctggtttctttctttctttctttctttctttctttctttctttctttctttcttttgaggcagggcgtcactctcacccaggctggagtgcagttgcatgatcgcggctcaccacagccttgacctcctaggctcaggtgatcctcccacctcagcctccagagtaactggggctacaggtgcgggccaccacacctggctaatttttgtattttttttttttttttgtagagaaggggttttaccatgttgcccaggctggtctcgaactcttgggctcaagtgatctgcccggcctgtctcccaaagtgctaggattacagacatgagccactgtgcccgactcctggtttatttttatcacagaatggtattagaaagcaggatctaggtgctaggtgggtgctaatgaatctttcattttggttatttactttcctattccagaatttccatttggttccattttcagtattctcagccttccttgcctggggtagaggtgctgccctataaatgaggctaggtggaggtagctctgcttgaccggaatagttcctgcaacatgaaacagaggctgcgaggggtggcaggggatgtgaaattctggtaacctactgctcctggggagaaactttcgtcttggctacactcactgggcatagagctgggggtgagggagagggaatgggcatgtaaggaagtgagtcctggttcaaatttttccaacttggtctttttaccaagattcagtagattttcttgactaaatattgctgcgtttgccccatgtccttagggcaatttctgcagactgtaaatagtttcttctctttccttctttttttgtatcctttgtaccagttaaggttgttttgctgaggagagggtccagggtccacatggaccacctcacactgccattctggaagtgcttttctttggtttaattttgttggaataaagtattacttatggaaacagcattaggtaaatatatttcacgtattctaaatagtaatcttcattgccccatcttgttttctatatcctttgatactaatttataacaacagttctttagaatttagacactaactcacctcttctctttgtattttatcttttgagaatgaagcttcattttatttttcatagccctggcagactacttccatttatagtcctgtaaccatcccttttgtgtgtgtattgtttctgtgatgtctttcatgaaacttcttagggctaaaggtaattgaagcacatttgcttttcctcccactcaaatgtttttatttccttcaaacaaataccttagcaattctgcatctagatgttcttcaatttgtcagttcttgtttttttttttttttcttggcacaacagaagatgttctatttcatacagttaatgaaaggtatctttacttacgtaactataaatgatcaataatgatgatagtgcaatgcaatttcagaagttgttctagatttagcatagttctaaattgttgaggccgagtagaaaaattttcagtgatattgttcaacttgataaagtaacattactttgcagataatataattgtcatcagaactggcaagactaaaattgtttgctttaaaatattttattttccttaataaaaatattgctttaaaaatgttaatgacatttcatgaatctattcttttgggcattgacataaattactggtctcatttggggaatccatttaaatgtaggctctttgagatgatataataaatccctctttctaaagttattggccttcttattacatcatctattgtgtttcattagtgttatcttttaattagtaataatctctattatgtggcttctatgcatcagaggctttatataatcttgaatcctcttcattagcctataagtaggtggtatcagttcttcttaatgaatgagaaaataggcttgaagggactacataacttgctcatggtcacataattagtgagggatgacacccagatgtgtcagtattctcaaaagactagaaagaagggtccaggtagaggaagggtttgtggcaaaagcagtgcatggactgcttgttcatcatctttttttttttgagatggagtctcgctctgttgcccaggctggagtgcagtggcacaattttggctcactgcaacctctgcctcccgggttcaagcaattctctgcctcagcctcccaagtagctgggattacaggcacccaacaccacacctggctaattttttttttgcaattttagtagagacggggtttcaccatgttggcctggctggtcttgaactcctgacctcgtgatccacccgcctcggcctctcaaagtgttgggattacaggtgtgagccacctcacctggcctcatcatcttaattggtcttggattgttgaaataagttttcatcttctaaggaggacatatcaaaatctagaaactaaaaagttaaaaaaaatttttatgttagcctaaacaattgaaaatagcagataacaaacaatatttaaatttgaaatgtctgtgggtttctatattgaatcctgtgtctatgattatataaactaggagttacttcaaggaaaatgatgacaccacattgagaagtaggctccttagtcaccaggaggctatctgattttcccacttactctattgtgaatggagaagaatcctttggtcaagccagagcatagctcctcctcagctgattaggagacctggagatgagatctgtttcctctttgctataatgaatgtgtagggtttattctctctatcagattctggattccctgaaaacaaagatggtggtttgtatttcaatgcactttacatgtcatttgcatgaaatgagaagcgcaagtaactaactagttggtattgtggaactataaaatagaatgcagtattgtttacaagttcattctctgttagatactgttataaatatgcataatcaattctttttttttgggggggggacagtctcgccctgtcgcccaggctgaagtgcagtggtggcgcgatctcggctcgctgtaacctctgcctcctgggttcaagtgattctcctgcctcagcctcctgagtagctgggattataggagtgtaccaccatgcccagcgaatttttgtatttttagtagagatggggtttcacaatattggccaggctggtctcgaattcctgacctcaagtgatccacctatcttggtctcccaaggtgctgggattacaggcatgagccaccaccactcctggctgcataatcaattcttaattatttatgaattgttagaatggtttatcccaagcccatttctttctctgtatcttttttttgtttgtttttgacacaggatctcaaaaatcatcactagatggtaaatctgtagggaattattattttgagtcaggatcttcctctgtcatcccggctagaatgcgggggtggtggggggcaggatctctcctcacagcagcctctgtctttcagactcaagcgatccttctacctcagcctcctgagtagctgggaccacagggacataccaccatgcccggctgactttgtaatttttagtagagccagggtctcgccatgttgcccataataaataacaactaagacctcatagttgtcagtcatgtaatattattttccatttgctccatctctattcccagtttcagttagtagagtcctgatatacccagtagtcaaggcagaatttttttttcttttttttttttaatataatttttgattttacaaaccctggcctacaggtcacagcagaaattttagcatcattttagacttttccatttctcattcatcaactatttttaaattgtcgctgtgtcttttgattacatctcttaaatatctcaactttatctgcctttctttgttcccactgttgctgctttagtttaaatttcatcattttgtgcctggcctctataaatcagtagctttctgactagtgtctgccctaactctcttcctgcctccatggtgatttttctgaagtataacactggtaaaatgctcaacttaaaccttctcttgatttcttgttgtctatggcagtagccttcaaacttcttgtaaggcagttagaccccttcttcaaatatagggtgtcaacaaaatttcaacaaattgagtctcagagatctgattgggttttattaacgattcatggaccaggtagcatccagtctacgaaacagaaagagctctaatgacctagacttagtgggtacattttgtatgcacaaaaaagtggaggaaagcaggaccaaggatcaaatagtgggttggtcatttcaaggttactttccttatagggaatcttggcttaagggaatttagctatcatctttctcctgatttcttaggtggtcagattttacaagtaaataagttaggttttggtttggtaacttggaaccttagcctgagtgactccatttgggcctgctgttctttctttaactaaggcaaatacaatgtttaaaatagattttttttaaaaagagagagcgcaacactattgtctgattgaagcaggacaggaatgtaggaactctgcttttgcttctacctttctcaaaaagccccttgagccatatagggcaaagtttgaaaaccaccatcctgaagcagaacctagacttcttagcatggtatagaagccttttatgattttgtccatgccttttttcgtgttattcctggacttttgccctggatttcagatatgctgcattacttgcattcaccgaacactcattttttttgcctatatttttgcacaaacttttcatagaatgcctttacccattttgtctatcagctaaacttctgttcttgtctcaagtattaattcagatatcacctcttcaatgaagctttctctgattttccaagtcaaagttaatcttttttttctgcttttctagtatctcttcacattggaaagcaggaagactttgttatatgtgattcagcactagtagcttgaacttacaacctgttatatgacttacaatatttgcatttaaaatgcctgaaccaaacttttgccaacatttaattgtctattttttgctttctcatgaaagaaaatgtcagatgttttgcttaaaaagcggtcaagcacaatggcatatagccttaacttggttatgaaattgggcaattaaatcttttcattttaggtaaagtcctttatattctgtggtattgtagatggcattattaaagtactgaagtttccttttgttatctattttaaaggattgaatatgtactatgattatcatgtattgtgactcgcataaagagtagcaaatttatgacatgattggttcccttcaatcaaggcaccttgttgaaactcttttgaggaaatttttcattcagatttatctttaatgcagcttccaaataagtgcttgatgaatattttatttaatgagtaaattgtgaattaccttgtggtcgaagatattgtctccttattcactactttattctctcctccttctccatattccacttagctacatctttctcctcattcctaaaaaaaaaaaaatctctaaatatcttggtgcataagaaaagaagaaagaccagtgaattttcttgtttcttgcctgctttaagaggtggaattgactgtagataagaattgtggttaggctaaatattgcatatatgaacagcaagcatgccataatagatgcttaataaatgtttgttgaatttgagtagggtagatcttaggctctcagtgctttaaatgattactgagatttgaggatttcttcactttgccattgaataaacttaaggcttagagaggtagaagtggctttgcagatttctggtgaataggaatttttcaataattagaacgatctgaaattggagtgagctgttttgttttgtttagacaggatcttcctctgtcaccggagtgcactagtgatcatagcttactgcaggcttgaactcctaagctcaagctatccttctgtgtcaacctcccaagtagctgggactacaggcatggaccagcacacacggctaatttttgaaattttttgtagagacaaagcctcgctgtgttgcccaggcttgtcttgaactccaggccttaaacagccctcctgccatggcctcccaaagtgctgggtttagaggcatgagccgctgtgcctggctgtgagctgtttttgtaggcactaagtttcatatcacacctggcacggtggctcattcctgtaatcccagcactttgggaggctgaggcgggaggatcacttgaggtcaggagttcaagaccagcctggccaacatggtgaaacactgtctgtagtaaaaatacaaaaattagctgggcgtgatggcgtgtgcctgtaatcccagctacttgggaggctgaggcaggagaatctcttgaacccgggaggcggaggttgcaatgagcctagatccccctactgcactccagcctgggcgacagagtgagactccgtctcgggggaagaaaaaaaatcacttcctagctagaccaatgtgaaaaaattatttgtttgagctcttgttttgatattaacatgatgtagctaagtggtatttttctgctaattgaccttttgaaattcaaatactacttaattctattatggaacagtagaggaaatggggattctggccagagaaaacaaggaaaaagtacctcttgaaggtacttgacagtgaaatgatgaaacctaaaatgttgagatgaattgcaacaaaactttgatatttaataatgcatttgaagggaggccctgttctgttgatgaggcagaccatcaagagcagtgtagacgttgccaactcataatggcaagctaagagttcaggattttcaactgaatttattaaatctggatattcaaaatttttgtcattttgccatatattgggggtgtcttaattaaagggattttatgtagttcaaaataaatgttacaattgttgtattatactagtactatgaagatgactatgataagagtgtcttttgtatgctaattgggtgactcctggcagaacctcctagatagcttctgatgggggctggtcaaccagaaagaagaaggcactattagagatttaggactttcatcttcaccccagactttctgggaggggaaaagggaaggagaatgagctcaatcaccaatggctagtgctttaatcagtcatgcctacataatgaaaccttcctaaatgatggtgccctggagccttgtgggttggtgaacacactgtaaagcaaaacaaaattctaagccgcccagccaactgaatgaaaccctcctctcagccaagggcactctaacctgaatgctagttcaggccatgataggaaagacatgcctcattatacctttgtccctttggaattcaggcatggctaaccagcattaatgttaaaacagactctttgtagcagtaagataccaacatgatacataaaatgtatcacactttgtagcagtaagataccaacatgattgcaggccctgaaagaaatagaagtattttaccctgaaatatatttctctattttgaaatggccctggcaaagctgtctctcatggggaaaaaaatctacattctatagataatccccttccctttccaggtctttttcctggtccaggagagaatactgtctggcacctttttaagtctgttttttttgggaacaaagtctccgctctgtcacccaggctggaatgcagtggcatgatcttggctcactgcaacctccgcctcccaggttcaagcaattctcgtggtattttttaaagacctggggtggggacaggggattctcctgcctcagcctcccgagtagctgggattacaggcatgcgccaccacgcccggcaagtttttgtatttttagtagagacggggtttctccatgttggccacgctggtcttgtactcctgacctcaagtgatcctcccgcctcagcctcccaaagtgctgggattacaagcaggagccactgcacagactgccttcttaagtctgataagaaacatttacaatctgttccataggaagcctctgcataataagaaccttggtctccacaaccccttatcttaacccaaatcatagaagggagattctattgattccaggtctttaggtaaactcaaccaattgccaatcaggaaatctctgaatccacttatgacctggaagcacccccctccccacctttgagttattctacctttctggaccaaaccaatgtacatcttacatgtattgattgatgtcttatgtctccctgaaatgtacaaaaccaagctgtagggggccaggcgtggtggccttatacctgcaatcccagcactttgggaggctgaggcgggaggatcactggagtccaggaattggagaccagctgggcaacatggtgagacctcttctctacccccaactctccctcaaaataatagtaattaaaaccaagctgtagcctgaccaccttgggcacatatatattctcagcatctcctggggctgtatcacagttcgtggtcttcatatttcgctcagaataaatctcttaaaatattttagagtttgactctgtcaaaatcatcgaggtgctgggaggctggtgtgctctgagaaggcacggaaggcctgtgctggctccccaacccctcataccttgccctgtgcatctcttccatttggctgttcctgagttgtatcctttataagaagctggtagtaaatgtaagtaatgcatttccttgagttctgtgagtcacgctagcaaattatcaaacttgaggagagtgagttgtgggaacccccaaatttgtagccaagttggatagaagtatgaatagcctggggacctgggacttgtgacaggaatccgaagtgagggcagttttgtgagactgagtccttaaacctgtggattgaattgaaggatactcagttggtgtcagagaatcagaattggtgttggaaaagataccacgcatttgctgtctggggaaaaaaaaaaagccctcaggtaggcacatgaatcttcagcttacaaatggaaacgtaccaaagcttcaagagactgctgagctcatcattaaggtagtatgcgggaaagctataactcaaaagtgctcttaaccatatctttttaaaaaattgtatcctctttgagggaaagaatctatcttttcttttttaaattgttattatttattagtcagcttctcagatctctttggaatttaattgaatgcttttatcaattaatggtcttgatgaaattgcttgtatttttgactattatttgtatggccaaagtaattttacgtacccttctgaagttagcagcacaaacaattgaggaagtgcaaagattttcgcttgatttttcttcagtttcttctatattttaaataggacacaaatatctctgtaaataaaaataacttccaatacatttggaaaacatcccagacttcctgtccatgcctcgcaaagttgctgctgtctagtcattattactatgttttttccctttgacataagtgaccctcacaggaatagcttcatcaccagctgtttggccagtggtattccacttactttgtttttcctgtttctctgaaatatgctgaaagataatcactccgtgccttcccttgtttagaatgaatttactcaattgctctggaagcttaccttggtaaatgatttggaaccgtaatgaaaaaagagggtaggctttatatattttatattggtgccttaggaattgacatttatttattgaggatttttgtgctcattttcaatttgaaagggtcctagtgtttagaattaaattgtgggacttgaaagctaaaaaggaacttggagatcgtccaactgaggagccttattttttaaatgaggaaacaaaagttgtcaagatcaaccataaatctgatagtttggcttggtgaaagaaacctaggtttcagaaaatctctcatgtagtttgcagtttatagccacaaggaccaggagtctgaagacttgataagagggtctgtttttcaaaatattaacaaagtttagcctggaagctccctttgtgaattttccatgtcattgacagtgtttgaaatctcgtcatgtcttcaggatcaataacctctaccatgtacttttatactttttaattagcggattttcaaacttttaaaaacagtaactcctttttttcaatataatcttatattgaaccacaggatacaaaaaagatacgtgatatttaattaaaatagttttaagcacaattttaatttgttggataataaattaatgatgacatagctaaaatttatgaaatgctgattagagtactgtacatacatatttcacttctctctctagcttaaaatatttgaatgggtgtactgtaattcatttaactaggcccttgttgatgtgtatttagactgtttccattcttgtttttgcaaacaatgttgcagtgaataatgtatgtatacattatgtggtgtgtgtgtatgtgtttctggggataaattctggaaatgtaattgctgtgtcattagaatatgtttttagttttgaaggattttatcaaattggtttccaatttgatatatattcccaccagcagtgtatgagcaagcttaattctctcatgctctcatcagcatggtatgttatttttggtttttgctaatgtaaaaaattgtatctcagtgtggttttaatcttctatttgtattatatgtaaatttgagtaacttttttatgtttaagagccatttgtgtttctttttctctgaactatttgttcatatcactttgcccattttaaaaattgggtttccgcccctcttaatgagcaggagtagccttctgtgtattgagtttaactttgtgatataagttgcagattcttttcctcaggttttcatttctatttttcctgtagtttgtaccttttccatttttatggatatctaaactcaaccttaacttgacaaatggaaccttggatttctatccttcctttaacctccttctcttctagtcttcctcagtgaagaaacagcacctctcatgtgtctctactcatacatagcccaagcccaaaaccaagaagttatccttgcctcctctttccctccctccctgtctctaatccatcctcagtggtattgacttcctctccaacatgtcccaaatctattcatttctcttaatatccaccaatttagtccatcctccccttatctttcacctgggtggctgccatggcttcctagctgttctaccccaaaactgatgtctcccgttccaggtactgagccattctctactctgtagcttatgtgatcttttcaaactgcaaataatcagattgtcataccactccctgaatccacccctcctattcttgttcaaaaccctcctgtaagtccttatgtcccatggcaaagattatgcttcttgaaatagcccaacctgctgtttctccagcctcaccttgtactatgttattgacccccacccctccccacctcacctgtgggtctcttgtgtcaccctgttccctcctgacttggggctttagcataaattattttctcctggagcatcccccttcttccatgagtttatgttgaattattctacaggcctcagctcactaattgctttctctaagagagccaacaactcttcctaataggtgggaaacccctgtcataagcccttccagcaacttatatctctttcatagcactaatatttactgttttatacttactgtgtgagtctttgattaagctctatgagatagggatcttgtctgttttctttactgttatgtcccagaatctatcatagtacccggtacatggttagctctcaaaacattgaatgattgcttaactataaacccttaggtgtagagtttacagaatgtactgttttgccctttctggaaaatgggacatttgctcttggccagtctttgttctcctcttcttttccctgtgattttcccaagactactaaatttcagcaattccattttgaaagtcttaaagcatttcaaacatgaaatttatccaggtcaatggtcttgaattcatttaaagcctgtaggtgttcttcaagtcttggacttcagttccttccattcctttttcatgtgaagtttatttttcttggagttgaggacaataactcagaccacattttctgacccacatcaatccagcaaaatctaggtggtccccaacttctgtaagtttattttaaattcagttacttagaatttgcagttcagaaaatattaccccaaagaaaccgtgttaaaattgatctttatattttcatgaagatgtcttcaaaatccttttaaccaatagggtatctgaaatagtacagttttagtatgaactctgagtttctctgatcctattttattgaggcagggtcttgctcatcacccaggctagagtgcagtggcgtgatcatggctctctgcagcttcgacttcctgtgttcaaatgattctcccacctcagcctcctgagtagctgggagtagctgggactcaggcatgcaccaccacgcttggttaattttttgtagatgcagggttttgccatgttgcccaggctggtctcaaactcctggagtcaagcgattggcctgcctcagcgtcccaaagtggtgggattacaggcgtgagccagcgcccctggctctgatcccattttagctctgtttttctttttctttctttctttttttttggggacaaagtcttgctccgtcgcccaggctggagtgcaatggcaagatcttggctcactgcaacctccgcctcctgggttcaagtgattctcctgcctcagccttccaagtagctgggattacaggcatgtgccaccataccccgttaattttttgtatttcttttttttttagtagagatggggtttttgccacgttggccaggctggtctctaatgcctgacctcaggtgatccacccgccttggcctcccatagtgctgggattacaggcgttagccacccagcccagccttagctctgtttttcaatctgaatccaaagaccctcatattaggaagggctgggagtttaggaggattggcagtgctgggagaagtatcaagtagctggtagaagatacattgggttgatactggatttcctcccttgtggaaggattctgaaggtcaagggtagggaggcacataacatatttggtagtttgaaatttttatgctagtaaattgtgtataactcatgataatcaaatatctgtttgatttaataaggggggactgaattataaaggatggattgataaatcaagttactctccacttttgggagaataaagcaaaatgaagatcctattaattatgggtcagatggtcccatctagaaagaaaactaagtaggagtgcttcatctccttgcttgtattcagcatggagaagtctttacaaaagggtaattaattagggtgtttttcacaaggccgtgccttccatagaaatggttttcttctgtatgtggatcttgagttttaagatgctttccaaccatttgaactctcttattataacagaagtttagtcatgtaccaaatgtattcctatgcaattttcagtgacaaaatggttctctcatttggatgtgtaaaaacaatgccaggaacaaaaacaaaactcatgattcaactgattttgtactctctttgggaagaagaaaagacccgttgagatgaagattataatttcagtaacaaagaaaacattcaaggcccaggcagctcttaaattcaatactaataatctatgaaataaattataagcctacgtttctgtcagttctttagatacctgcttgtttgctaatacagaaacattgcttaattttacatgtattttcttagtgtgagtcaaatccaacctaaaatgcatttggttatttgtttacacagttagtgactggtaatcaaaaacgcaaacaatttttgagggagttagaatcttcactttagtaggtaccttagagggcatctagtttagtacaggattcctttctaccagggacaaactgtttacagaggccccttcctgcctcttgcgaggttcctccttgtctgttctgcttcagatatacaggccttctgtgttccttgaatttatcaaactctctaagactctttgtactgccttgaacactcttctcatagccctggtggcttggaatttttacatgggacagatttctctgaaatactgccttctcagacaaccttccccagatctcctacctaaaggacctctccccttcccaactgccataactctatcataagactctgttttatttccttataatacttgtcactgtctgaaattatcatatttattgtctatctcctttagctccatgagagcaggagcatggtccatgttgttcaccgctatatcctgaagtatctacaatagtggctgtcccattgtaggcatctgacaagtatgacaaaaatgagaatgaatgaataaccattgatgattgatcattttgttaatgttaaaaccaaactctgtaaaatattttaaagaggtttattctgagctaatgtgagtgaccatggtctggggaacagtctcaagagccctgacaaaatatgtcctaggctatcagattgcagtctgcttttatatgttttagggagagaattgtaggtaaaatcatcagtcagtacttggaggatgatgtacattggttcagccaaggtagtgggggatcataggtggattaaaggattttctgattcgcagttggttgaaagagttaagctttttctaaagacttgaagtcagtagaaagaaatggtaaagttaagataagggggttgtggaggccaaggttcttgttatgtagtaaagcctcataggtagcagctttcagggagaatagatggtaaatgtctcttttcagaccttaaaggtgtcaggctctcagttaatgtctcctaggttgggggaaaggcccagaaagggaaggcttggctgcactatggagattctgttggccccgtgacagttattttaaaatatgtcaaagaaatatattttggggtaaaatattttgattgccttcagggtctgctatttgtcatgtgatgctataacacagtcagattggaaagtaagccacattatactttatactaggttaatcatctctgatgaggctttatggtttgtagggcgtgacttaacccctgctttgcctgaccttaggtgttgtttataatttgttatcttattgccacagtgtctggtttgccagtcttaggatcgccatccaaaaagagggagtataacgaggtatgtctgacctctcttcctggctgggaattcagtttttcaggtttctctggggtgcccttggccaagaaggagtttgttcagtcagctggggggtttaggatttttttttttttctttttgagatggagtcttgctctgttttccaggctggagtgcagtggcgctatctcggcttactgtaacctctgcctcctgggttcaagcaattctcctgcctcagcctcccgagtagctgggattgcagacatacgccaccacccccggctaatttaggattttatttttggtttacatgttccaatcactactgagctgaaatttgtctcctttttgcttctactactgaacttagttctgtcccctggaataaatcactggctcgattccattttttccaaagtcttcagacatttggatgtcagtcatctctcactgaggccaaactcacctggtttccttaccagttcctcatctggcatggttttaggtgagtggtcactatccaggttatcagttgttggcaatttttggttttgttgttgtgatacccagcactaaacatagtgcattatgtggtgtcttgaacttccgagagagagaacagttaaactttcttgtttaatgtgatactgcaatgctttgtctttgataaaaattattttttaataccatataaatgacgaaggaactatttatatatgaaatcattatcagaaatattctgaggtcttaaaagcttgttttataatggaatataacaacgtagaaatacattaaacataagtatatactctaatgaacaattataagtgaatgtctatttaaccatcactcaagacatagaaatagtgccccaggaacccctcctgtgttgtgttgtgttgtgttgtcttgtctagcctttccctttccctttctctttccctttcttccttcctttctttcctttctttctctgtcaccccggcagtgcacagtgcacagtgcacaatcacggctcaccgcagctgtgatcacctaggctcaaggaatcctcccacttcagcctcccaagtagctgggactagaggtgttcgccaccaacgcccagctaattaaaaaaaaaaaaaaaaagttgttgtagagacaaggtctcattatgttgcccaggctggtctcaaactcctgggtttaagtgatccttccgcctcagccttccaaagtgccgcctcagccttccaaaatgccgggctgccatatgtcttttctcaatctcagtccctccttagaggtaattaatatcctgatttttttacaataaacacttccttgatcacttttttatacagttaccacttacatgtacatacttaatatagtttatagttcagctttgcctgtttttaaactgtatataaaagaaacaatgctgttgtatcagttttctgttgcataataacttaccacatgcttagccatgttaagacaccatatattattagctcacagttctgtaggttcccagcctgatctttttattacttgtgttttctgtttcatgaatttttgctcttactcatttctttcttcacattttcattgggctcattttgtgtttcttttgtttagcctcttgagtttgatgcttagttcatgtttccagtttttagtattttctgatatatgcatataagattctcaatttcctccttaagcattgttttctttctatagatttgtatttttgttattgttaagtgtattatgttttcttccttgattgacatatggattattttgggagtgtatttatttccaaacataagaattattttctaactacttcttttgtgattgatcaactttagttgtggaaagagaccatccttttacttcagtccttgtaatttattttatttatttatttatttttgagatggagttttgctctgttgctcaggctggagtgcagtggcgccatttggctcactgcatcctctgtgattctcgtgcctcagcctcctgagtagctgggactacaggcacgtggtcatcacacctggctaagttttgtgtttttagtagagacaggatttcaccatgttaaccaggctggtctcgaactcctggcctcaagtaatctgcctacctcagcctcccaaaatactgggattacaggcccgagccactgtgcccggcccttgtaatttattttgaattgctttatggcctagcatatgatcagtttttgtgaatgttgtatgtgtgcttggagaggagaaaaagatattttgcagttctttgctatagttgatatgttcatttggtcaaattttaaaaacatgttcaatgtcttctttatcctaatatttttctctttcatttagttctctttttttgttatgctctctatctagcattctaatttatttttatagtttgatctttcaccttttggaccttttagttctgtcacaatgttcagtctttgtttttttttttttttttgagatggagtctcgctctgtcgccgaggctagagtgcagtggctcgatctcggctcactgtaagctccgcctcccgggttcatgccattctcctgcctcagcctcccgagtagctgggactacaggcgcccaccacaatgcccggctaatttttttgtattttttcagtagagacagggtttcaccatgttaaccaggatggtctggatctcctgacctcgtgatccacccgcctcggcctcggcctcctaaagtgctgggattacaggcgtgagccactgcacccggccagtctggtttttattgcatcaaccctaccgttgttttgtaggctattgctgatcatttataggctatccctgacccaaagtcttttgggatcattttctttttcagttgtttctattggttcttgttcgtggtatcttaccttgcgtgtttggccatctttgattatgtactgcacattgtaaatgagaaactatctgtagcagtattgtgaggcctggttgatgccatcttccctcagagcgttgctttttttctttgtttcacccagacaactggtggctttaacaatctgaatgtggaaccaccttaatccaaagtacatttaaagattttatctagatcgcccagatgacataaacctacagttcaagtttgtccaagggctgatttatttctgttttttcttatcctgggagtatattctggggttttggcttcaagtgagtggtgatttatcaaactttctccttatttataaaaattttatttttaatgattatagctacttaatagttgtatatatttatgggatacatgttatattttgatacaagcatacaatatgtaatgatcagggtaattggggtatccatcatttcaagcatttatcatttctttgtgttaggaacctcccaattccactcttttagttattttgaaatatacaataaattattgctaacaaactttctcattttgagacacccttgactttgaattttgtgttccttgatctctaacgatttcaagagcaaacctgtttttctctcattttctggatcttcaaataccagaaaagctaaaatagttttgggtggtttggattatctctctggattctattcttttgctttgattgctttgattttagccaggtaattcttcacaatcttgttaagtgtttggagcttttaagatgtttctgaaaagtattccctctagcatttgtatttgtctgtaaagggacatttcatccaagatatgtagtttgccatcaccagaactaaaacgttttagtttttatgccttaaaaaaaaagattaatcagttatattcatataaaattgcagctaaatccaatatggcataatttttttcttcagtatgaatactggtatttaaaagaccattcttgacatccaagataagtatccactcacatcattattattttttttatttgttttgagaccgactctccttctgttgcccaggctggagtgcagtgacgtgatcttggctcactgcaaccatcacctcccaagctcaaaaaattctcgtgccttagcctcctgtgtagctgggactacaggcacccaccatcacacccggctaattttttggtattttatctggagatggggtttcaccatgttggccaggttggtctccaactcctgaccttaagcagtctgcctgcctcagcctcccaaagtgctaggattacagacgtgagccactgtagccggccccactcacattctgattcccagtttttttgtttgtttgtttttgtttttgagacggagttttcactcttgtcatccaggcttaagtacaatggcaatatctcagctcactgcaacttctgcctcccgggttcaagtgattttcgtgtctcagtctcccgagtagctgggattacaggtgcctgccaccgcacctggctaatttttgtatttttagtagagacggggttgtaccatgttggccaggctggtctcgagctcctgacctcaggttattcaccctcctcagcctcccaaagtgctgggattacaggcatgagccatctcacctggcctaattcccagtttttattactcagttttgactgccacaaagaatagtgagaccaaatgttttttttaaaaaatttttatttttttttatttttttgagacagtctcgctctgtcgcccaggctggagtgcagtagtaagatctcggtttactgcaacctctgccttccgggttcaagcaattctcctgtctcagcctctcgagtagctggcactacaggcgcgcaccaccatacccagctaatttttgtatttttagtagagatcgggtttcatcatattggtcatgctggtctcgaactcctgacctcaggtcatctacctgccttggcctcccaaagtgctgggattacaggcgtgagccaccacgcccggccacaaatgttctttacaaatacttttatacagaactttttgggtcttcttagtgagaatgattaatttttatctcaagtttcctttgaaatgaaccataccattattggcagagagtagaatatttaaatatttcctgagtgttctttcaaaccagccgtagaaaatgaaagagtgattcgttttcagaaatgctctgagcatcttttaccaggaatgtgactgacatagatcctcatatagctggctccttgtcattgccatctcagctcaaatgttacctttttagagaagccctccctgtctatcattctttttccctctttcataacaaaatacaagataatagtctcgtattttttctccaccagcaaaatgtaaagttccatgagggtaaggaccttgcctgtcttgtttaccactatgttgtgtgtcttatcctgaaaacatgggaggcagtcagtaattatttgcttaatgaattaataaatatttcatctcaaattgtgacatctttttctctaaatatcagaataatccttaaaaaatttttgattccagtgaactaaagttttctaagctaagtatagcgaaaggaggtcagtgtagctggagtgaagctagtcaagggagagtctagtaggagatgatatcaggaggggaggtcaaggcctgtggctcatgtggattttgcttttcactcttaatgatatgggaggccattagagggttttgaatgagaagtttatgagaagtgacatggtctgagttatcttcaagagttactctgacttctttaaggtctgtaggaatctgtagggatactgaagtatggtctattctgggctctcacatctgttctattggttatttatccgtgccagaaccaccctgtcttaatttccctcactctattataatcctcaacctattcagtagggcatcctgccagatcctaccctcaaagcctagtgctcttgtaacttttcttatctttcttactcttttctttttcttattctttgctgctcatacttgtagtaggagggtgttgcttctacttggaactctgcccttccatatatattttaaaatcagcttgtcttaattctttagaaaaccttgttgggattgtgattggaattgcattgactatatagatcaatatggaaagaattgatacctttatagttttgaatcttcctagctgtaaaatttggataacttatttacgtgttttttaatgtcttgagtaaagttacatatatatttgaaaagtcgttttgaatatcttttgttaaatcttaggtgctttttaaaattattgtaaatgtggtttgtttttgtttttctttgagacaaggtctggctctattgtccaggctagagtgcaatggcacaatcttggcttactgcagcctccgcttcccgggctcaaaccatcctcccatctcagcctctggagtagctgggactacaggcatgctctgccacatgcagctaatttttatatattttgttgaggctggattttgccatgttgcccagtctggtctcgaactcgtgagctcaagcagtctgcttgcctcagcctcccaaagtgctgtgattataggcgtgagccattgtgccccgcccataaatgtgatttttaaaaattgcattttctatttcttacaaatgctctttacagatgctgctgatatttgtgtattaagcttatgttcagctaccttgccaaacactaataattccaataatttatgaattcttttgaattttctatgaggtaatatatgcaaattctgttttcgtttccctcttttcaatcatacattttattcatttattgtttcttattttactaagccagctataacccacaaggatgtttttgttttgtttttgtttttgagacagggtcttgcggtgttgcccaggctggagtgcagtggtgcgatcacggctcaccgcagcttcgccctcctgggctcaagcaatcctccctcctcaccatctgagagtagctgggactacaggcgtgcacaaccacacccggctagtttttgtagtttttctagagaaagggtttcaccacatttcctaggctggtcttgaattcctgagcatgagtgatccgtccacctcagcctcccagcagcctcccaaagtgctgggattatggacacgagccactgtgcctggctaggatgtttaatactaatgttaataagtattaatagtagaactccttgtcatgtttttgtttgtttggtggagacagggtctcacactgttgcccaggctagtgtccggtggcgcaatcacagctcactgcagctttgacctcctgggctcaagtgatcctcccgtctcagcctcccacaaccatgcccaccaggctaggttttttttgtttttgtttgttttttttgtttttgtagagactgggtctccctgtgttgctcaggctggtctctaattcctgggctcaagcgatccttctgccttggcttcctaaagtgctgggattatatgcgtgaaccatggtgcctgggcacatgttcttaagttttaaagggactatgtctactgcttcacatttaagaatgatgtttgttgtaggtttttgtcagatgcccttatcaggatatgcacattttaaaatcacctaattatgtatatattgctttttagaaaatttgcaccaatttacatttctaccatcagtgtatggaagggcactccttgacaatacttacccacatcacatggggtattcttgttaaaagtttcagattttggccgggcgcggtggctcacgcctgtaatcccagcactttgggaggccgagacgggcggatcacgaggtcaggagagcgagaccatcctggctaacacggtgaaaccccgtctctactaaaaaaaatacaaaaattagccgggcatggtggcgcgtgcctgtagtcccagctacacgggaggctgaggcaggagaatggtgtgaacccgggaggcggagcttgcagtgagtcgagatcgcgccactgcactccagcctgggcgacagagcgaaactccgtctcaaaaaaaaaaaaaaaaagaaagtttcagattttataggcagtaaggaacttcttgtttagatttgtttcttccttttaaaacaatattttgtgttgttaccactgttattcttagagatgggataagctttttgaaacaaagcttattttgaaaatatttcagatttagagaaaaactgcaaaaatagtgcaaagaatttcctacttcctatacccttgacctagattttccaagtgtgttaatattttatcatatttgctttatcattctttctgtcttttttctcttccctcatacacacatataatttttctcagtggtttaagttgtaaacatgatgcccctttaaaaactttagtgctgtttcttaaaaatgagagcattgttttatataaccgaagtactaatatgaaaattagaaaactactgacaacagtactataatctgtgaacatttgaattgtatcaattgttcttcatagcgaaaaaagaacaaaagctttttcttgtccaggatgtaatccaggatcatgcaatgtatttcattgtcatatctcttaatcttctttaatctggaatagtcgcttcttgttactcagttgtttcttgtctttcatgaccttgacattttaaaagaatatgggccaattatttagtaaaatgtccctcagcttgggcttgtctcttgcttcttgtgattagattcaggttttgcatttctggcaggaatgccacagaagtggtgatgtgatacatcctatcagggggcatataatgttggtttgtccccttattgatgacgttaacttgatcatttaattaaggtggtgtctggcaggattcttcagtgtaaaattactatttttcttcttgtaattaataggtatcttgtggatactttgagattagataatatcctgttttccatcaaattttcaaccactagttttagcatgtattgatcatacttgcttgaaataattattaccagagtgattgccaaatggcgatcttctaattttatcactacatttattatttggaattatacttcgcaaaagagctttctcttctcccccatttatttatttatgtcagtaaggacttttaaaaaaattatatgggttataatctgttactgtgcttatttactttgttgctcaaatattcccgattaggccagtgggagtcacatcagtctgactcctgtgtccttttgaggtacccctatcattctttgagcatttccttactttctggcaccacaaaaatatgccctaggctcctatggtccttctcctgccccacccttggaatcagccatttcttcaaggaaccctagttccttttatcagagcaccagctgtgttcatagctataggggtatcattgcttctaggccttctcagcagacagagctaggaaatatatgtatgtgagtgcacatttacacaaacacctttatatctgtctatactcctatatattaaaaactgagcttatattgttaactccaactccaagccttctccctttttatatttgttactcccttttatgagaataagaaaccaaggtcagtatattcacagaatatttacctatttgcccaatcttagaacacacacaaacaagtttcatgtcattgtataaaagcaggtagctaagtagaatatagtatttgtttataattctttttatttttagctttaggagagtagatagtgaaaatgctgtttttaaaagttagctgtggttaattcatttgtccttgtccccaaaagtgtggttatattattcatttcaaatacagagaggttcatttgtttgtattcattccattttgggttcttcgctcctattactgttggtttcttcttcattttaagtgtataaaacattaaaatggattgaaaaataactctacaaaaaggtaagattggttactagagtactgcaaatataaaacttacagcttttaattgtgtttgtttttttcagggagtcatttaatacttcatgattagaacaaatatgtgaaagttcccaccaaccagtgagaatttcttccttcagacggttttggatcttactgcacagctttctgagaagttcttttggtgccatgttttgtggcttgcatcaaaagaggagtttgtcttcatgaagattcctaacattggtaatgtgatgaataaatttgagatccttggggttgtaggtgaaggtaagttggaatttttgcgttccttgagttttgagcaatgaacagttagttattcctaccaccaaaaagttactaattagatcctgttaatttaacctatatcaattcacatgtgtgtctaagagtaaaatattaaaaataaaattactcttaaacaatttgggtctcactctccaataaaaaattaataactttttaaaaccctttaaagtttaataaatcaaagatttttttcccttttcttttaaaaagagccccagtgttacaacagtctttgccttcattctttttttttttttttttttagcaatcatgagttccttagtctgcattttttttcttggttccattttatttttatatcagctaggcttattttgaataacttaaatttcattcattcattcattcattcattcattcattcattcaagacagagtctcactgttacccagactggagtgcagtggcatgatctcggctcactgcagcctctgcctcctgggttcaagcgattctcctgcctcagcctcctgagattacaggcgtgagccactgtgcccagctaatttttgtattttcagtagagactgggtttcaccatgttggtgaaattttacttaatacctggtaaataaacaaataagtaaattctgtttctttgaaaatgggagactatgttttgtaaattctgaggcatacaattttatctctgaaatcagggtgtatcttataatcagtatcatgtcacagtttaattggcagcattctccctttcctaatagtacataaaataatgctcatgaccaatgatataccattgatttgatgaaatatgatgtcattttgtataaactgactcctaaaaaaaaatcatttcttctgatttttcctgcttagtgatttttgctctagacttaaagataactttggaaattttgataaatgattctgttaacagaagataagtgattataattatggtttcttagcatttatatctttaaagcatatgttacaaaaatttcatatttcagaattttcaaataaactctgaattcctaaaggactaaaaaagttcacctatgtgaacagcaaagctgttattaagttttaaagttggcaaatcctttcaaatacatagaaacaattaaaataaagagtttaatcattggatgcttgtttcaaggtctgaaattcaaaccatacaaaacaaataggtctttgttccttcactagtcaactcctcttccatttcttcatcgatgttatgtaaaaatttcattttcagtgtcttgcttaccatctgttctggaatagcctattttatttttcaaaagtattagaattagagaccaatgcaataaagctgctgactggagaaggctagcacatacggtgtaacaaggttagaatgctccagattctgggcctaagtttttctggatcataactagtttttctcattatagccataggtgatcatcttctttgggattggctcaaaattaccagactgttatatatatatatatatatcagaatatgttactttgttatcagaactaccattgctgtatgtttctttctttggaaagcacctcacatgtatttttggctaggatatacatataaagtatataacaatctgtcaccaggaacggtgactcatgcctataatcccagcactttgggaggctgaggtggtggatcacaaggtcaagagatccagaccatcttggccaacatggtgaaaccctgtctctactaaaaatacaaaaattagctgggtgtggtggcgggcgcctgtagtcccagctactcaggaggctgaggcaggagaatcgcttgaacctaggaggtggaggttgcagtgagtgagcttgtgccactgcactccagcctgatgagagagcgagactgtctcaaaacacacacacacacacacacacacacacacacacacaggttgcagtgagtgagcttgtgccactgcactccagcctgatgagagagcgagactgtctcaaaacacgcacacacacacacacacacacacacacacacacacacacacacacacacccctgtcaagcaaactctgcattcttgtagtttagacagtgtattttttaccccatagaataactggcataggcagttagaattggacaattgcctggcaattgtggagttaagttagatggttataatggctggttctatgctaactgtgataataggattcatccatctctaccaaagtgagggagacttgttcaggtcccatagactgtgttggagacacatttcccaattttgtatccgtgaagcccccttctcatagatgaatgcaggcttgccagtctgctaatgttaatgttcttgatgtttctgcaaagctcagctatcattcattacattttgattctcttaattagatttttcacattataattttaacctcagtttcctgagtactttgctgtcaactctgtcctacttctaaggaagaagtctattgcctagataataggataagtaaccccaaaggtagttacttgttgaaatacaccaaagacagtgggagtgcttgtcgcctttgtgcatgaactgagtctttatttatggcaaaaggtagcaaatcctactagctattaattggaatactgaggcctggactactttgccagtcaggagagacattcagctgggtgtggtggtgcatgcctataatcccagcactttgggaggctgaggtgggaggattgcttgaggccaggagtttgagaccagcctgggcaacatagtgagaccatgtctctacaaaaaaaacttaaaaaacaaaacaaaacagaaaaaaaaaaaaaaagaggggcatttcagtatcctagaggaagattttaatgtcttctagaacagataatgtatttggtgggctctgtgcttgagcttactactgggatgtcattagctcttaaggtttttttgtttgtttgtttgtttgttttcgagatggagtcttgctctgttgcccaggctggagtgcagtggcgcgatctggactactgcaacctctgcctcctgggttcaaacgattctcctgcctcagcctcctgagtagctgggattacaggcacctgcaactatacccaactaatttttgtatttttagtagagatgggtttttgccatgttggccaggctggtcctgaactcctgacctcaggtgatctgccagcctcggcctcccaaagtgctgggattataggcgtgagccactgtgcctggcctagctcttaagttttaagttccacagaatcttctgagttaattttcctttattctcaaagttcttgagaccaaatcttgtctccataaatgtgtaaccctacatttaaacgtatcgccagtgaaattttctttaaaaagaaacatttaaaaatacttgttggaagaaatgacttgtctatactcttgatttataataaatgtataataaagtatgttccatttgtatgtggctcattattgcattatcactatagaatcttgtcactttagtagtcattattataacactgagaagcaatgtcagtatagcagagctttgtagtttgtatgcgtgcccttgattgtttacttctttttattataggagcctatggagttgtacttaaatgcagacacaaggcaagtacattatttttaaaaagaaatatctgtatatgtttaactgttttgaaactaatgtagtggtctttgcgtgtgggcatgtacaggttgagcattccttatctgaaatgcttgagaccagaaatgttttggatttttttggattttggaatatttccatatatgtaatgagataccttggggatgggacccaaggctagacacaaaattcatttatgtttcatatatacttaatacatatagcttgaaggtaattttatgcaatattttaagtttttgcctaaaacaaagtttaaatacttatatgtggaattttccacttgtggcatcatatcagtactcaaagttttggattttggagcattttggatttttgaattagggatgctcaacctgtaattaaaactctggttatgaggatgttgtttaatgaagtggaattaatatgtgaatgctgccagaaagagactacttttagataagcttgatcatggttgggtagtccttagttcttagcaatcacgtgctatttttttttttcaactgacctatgccgtgcacctcataatgacatttagatcaacagtggacagcatgtatgatggtggtcccgtaagattatgatatggtattttttgtttagataaaaaacattttcagatacacaaatacttatcattgactatggtactcagtaaggtaacatgctatacaggtttgtagccttgaaacaataggctataccatgtagcctagatgtgtagtaggctataccatctaggtttgtgtaagtacactctatgatgtttgcacagtgataaaaatcacctaatgacatatttttcagaatgtattcttgtcattaagtgatgcatgactgtataagtgaaaagctgcctaatgggaaaagagaaaaggtggtgggacaggaataagaaggcagggcagtgacagatttaatttatgttcaagtacttatgagcaaagagtttttttaaaaattatttttcatgtagacccattaacttagattgcttgatgcatttgaatccagattttgaagggtaataaggtaggtgtttggatatgagctagaacttgggataatagtgtagattatgattactggctatagttgattacccttgaacagctgtgaaatgaaccttactagaaattattttactatggtaataatcacaaattattcagagaagttatttgaagtttccatagctgttattcagttgtaagcatgttttactgggagagtaactttcagatggcaagtgttgaaactgtaacaaacattagtttaaatatttttctattatggcatacctagtctgagtatttggcttcatttgcatataatttgttaagaccaaggttttaagttttttcgtgatgtttcagaatgatataatttatgtctgtggtgattttagcaatttaacccaaaacatttaaactcttgaatctgtcgtctattgaaaataatgtatgtgtgtgtatgtatgtaaatatgcacacacataaataaagatgatactcttatatttgctttttctttcctattgtacaaaatactacctgccttttgaatttaagccttcgtgacacttaatatatttttgtgtttagatcacagatctcttacttccatgcaatggcttttgtattcttcttgaaattgggtgattgaactattttatgttaataatagttatctgaagatctctttgccattaaattttcaaaaatggttcgaatactattggttcttgattaaggatgattaagaatttaaaataataaatataataaaaataaatttagcaccttgaacaccttgttaagaaatattactgtagtttgaaattaaacaaatgaaaagctccctaataaaatgctaaatgctatacttttaatgacttgcctttagttataagtttctgaagcttaaaaaaaattcctgggtggatattacttgggagaaataggttattagtttctaagttaaatttgactttttcccgaacataaaacctccttttatacaatggctctgtttatgcaacattgcaaatggaaacttcagttcttacttctaatcttgggttttaaaactcaaagatttatgagatatgtacatatcttacatatgtacatacacatatgcatacatgtattatacgtatacatatatctgatatatattacacatcatgtacagagtccaaatgttttctcctagtcattgtcatacttcaacctgtgaccttttcctctatactttcatgtaactttaagctctccttctgccttttatataaaaatagtttattatttaaatatgttgtttttatctttctatttactcatttgttaaaatggttgtttcatatacctggttctcaaaacacacactgttagtgccagcaggatgggcccagtgtgaaagtggatgagaatggacatctctactcttaggaaaccaactctaaatgtgaactctgatttttagttactgtgtgtagggaactttgaattacaaggataaataaaccatacttttcttgcctttatatggcttatggtctgtctgaagagatagaagaatagataacttaaaaaaaaaacaagtctgtgaggttgctgcaaatgagatacatctaaaacatttctctctttgctgtccttcactacatgaggtcacacaccagctctttaagtattgtagctttctccttgcatgtgtctaaaaagatatcactggatggaaaatttaaagcataaattagtgcctatctcagagtattataaaactcttttttagaatctgcagctgtttagtcattaggcttgttatagatagtatatccttttctcagctaaaatcagaccttcaaatctataccccattatccaaaaatagagaatttgatgcttctggcaagattgatgctttagggtcaaacaaatggattattatgaaactcatattataattaaaaatgtatgtaatcttcccgattgtacttatgtaaagtaatcaggccaatatcttttgcatacctttaaaaatttagtgaaatgtttataaaaatgtataagtcaggtctgtgtgattgtttatgcataaattgggtatctttttgaaaaggttgactgggggtgtatatataattaattcttagcatgttgtatatttgaacaagtatagaagaaagtcacttttttaatctgtgtactgttgcagtaattgagagatcatgctgataaataggtgtattttgcttttgtgcatagaatatgatgttgggctgatccagaccaaagatcatacttcctaatttactgaaattaatgctgctcaatttcaaaggaaaaatatagcttttactttttttttgacagctgaacaaaattaagctgtatatatttattgtatatataataataagttgttatatatacacattgacatgcatatgaaaactcttagcagtgactaagcttctttttaggactcattatgactactcacatttgaaagatgttctaggctgggcacagtggctcacgcctgtaatcccagcaccttaggaggccaaggtgggcagatcacctgaggtgaggagttcaagatcagcctggccaacgtggtgaaacctggtctctactaaaaatacaaaaattagccgggcgtgggggcgcatgcttttagtcccagctactcgggaggctgaggcaagagagtcacttgaacctgggaggcggaggttgcagtgaaccgatatcgcaccactgcactccagcctgggtgacaagagtgaaactccatctcaaaaaaaaaaaaaaaaagatattctggtttggacctttaccctgcagatatgcatagttaattatctttttatttgtatgtgtttgttttttttgttttttggttttttttgtgacgaagtctcactctcacccaggctggaacgcagtgatgtgatcttggctcactgcagcctccacctcatgggttcaagcgattcttgtgcctcagcctcccgagtatctgggactataggcgcgcaccaacatgcccggctaatttttgtattttcagtagagacggggcttcattacgttggccaggctggtcttggactcctgacctcaagtgatctgcctgcctcggcctcccgaagtgctgggatttacaggcgtgagccaccgcgcccagcctcgtgtgtctgttttaaagtgcctgtgaaataggcatgttttgtagcatgctcttcttagcaaaaacacgaaaaggtcatgcttacaacaaggcaaggataattgaatggggttgaaataaagacattcaattagaacttgaggaaagtgggcttgtacagcttgatagagagaggctggagggtgatgctcattgagcccaggacaggaaagtggtgattcatgtaatttgtttcctgtgactatggttgacttatgagaagtttttgtttgttttgaagcagtaggtgacatatgcttttgagatagctagttatacaaagctgtgaacatccaacattggggtacagcctataagtgttcaataaataataatcttacgttagagaactgaaaatgaaggatgcagtagagagctgttgcagagtagcagggacctggtatgtgtggagggatgaaagatgatcccagggacttgaatgtggtaaactagaaaagctttggtattatttatcaggctgggaaacttaataaaagatatatgagtttggggggagaaataatgagtttggctttaataaagaataaaaatggcagcagaacataaaacctagtattaacaaatactacctattgagcatctaccacatgctagacactctactagatgtctcaaccactacaacaagataactctattcttagcctcattttacacatgaggagactgagtcttagagggtctgtgtaatagggccaaaatcatgtggctgataaattgtggaactaggctttgatctgactccagaaatagctaacttgagcatgagataggagccttctcttctcttctcttttccttccttccttcctcccttccttcctttcttctttccttctttctctctctctctctctcactgtgttgcccaggttggagtgcagtggcacaatctctgctcactgcaacctccgcttcccgggttcaaacaattcttatacctcagccttccgagtatctgggattacaggcatgagccaccaccatgcgtggctaatttttgtatttttaatagagatggggtttcaccatgttggccatgctggtcttgaactcctgacctcaagtgatcagcctcccaaagtgctgggatgacaggcgtgagccattgcgcctggcctacgtttttttttttttttttattgctaaacaattttaagaagatacttgaggaaaaagatctgtctcctcttagagaagcactcatagagaaccattgtgtgtggtttctgctcttgtcctgggttttgttgctgatccaattaattgtagaacagtgcctggaacgctgaaatagtctcacccaaattctaattctttgtattttaatattttgtatttgagattttgctagactgttgataccggaaaaactacaaatgctgctgttgtctttttttttttctaataagataggatctcgctatgttgaccaggctggtctcgaactcctggcctcaagcaatcctcccatcttggcctcccaaagtactgggattacaggcgcctggccacttgtgttgtctttttatctattaaagaaataatgggtcatgtgtcattttccatgctgatctgactttttgtttttttgagatgaagttttgctcttgtcacccaggctggagtccaatggcgctatctcggctcactgcaacctccgcctcctgggttcaagtgatctcctgcctcagcctcccaagtagctgggattacaggcatgtgccaccacactgactaattttttgtatttttagtagagacagggtctcaccatgttggtcaggctggtcttgaacccctgacctcatgtgatccacaacgcctgggcctcccaaagtgctgcaattacaggcgtgagcacctggcctgacctaacttttttagggagctagaagagttttgggcctttgcaagcctcctgtttgcctttatcctcatcatccgaatctacatttagtttattgtttgtgagttttttagtaaacagagtaagggaatggtcatgttacaattagtattacctctttctactctgaaaacttttcctcattcctcctttttacagtgattcagttcctaaatcatcgtttccccgctcacttctagaggatgaattggctggaatgcttttccagtgtaccactttcaaatccttgggattatctttcatccctcttcagggactgagttcctgctactctgcaacagctctctactacatctttcatcttcagttctctaatttaagttaacattcttatttattgaatacttatagttaactttaaagtccttttatggtaatcataaaaatataattagttcaaagaagagaacatctcttctgtactataaggtgaataatttcattaggctctgataaatgtgcttaagtgatttatactagctccttaatgccacttttcttcaaaacttcagaaacaaaaatgagtgtgaatcatttttccccccacaggcctgcaatatataggcactgatgaacaaatacctatatagtggaaactcttgagtaatttaagcatagctctttatcagttgttgaaacttcttcaaagtagtgcatggatcccagcactttgggaggccaaggcaggcagatcacctgaggtccaagagttcaagaccagcctggccaacatggtgaaaccccatctctactaaaaatacaaaaaaatttgctgggcatggtggcggacacctgtaatcccagctactcaggaggccgaggcagaattgcttgaacccgggaggcggaggttgcagtgagcggagattgggccactgcactccagcctgcgcgacagagcaagactccgtctcagaaaacaacagagtagtacgtcgtgatctatttctacataaaaagtaatccaacactgatttactgtgtaattagaagctgtagttcatattttacaatttaaaggtgtatttcatatattaaagcattttaatttaaaaaaaatcaacttttttttttgtttttaaagttacttcctatacttaaaacactgtgttctaggcatgacatcataaagtaaaattcaaccagacatctaaggaaaatctgttgaatgcctatcaaatatcaggcacttagctaggcactgactacaaaaaaaaataagatgtaatttttacttttaaggaatttaacatggataaattaacaaatataaagtcatgttttcttttcttttcttatttttttttttttttttttttttttttttttttttgtgacagagtctcgctctgtcgccaggctggagtgcagtgggacaatctcagctcactgcaacctctgcctcccgggttcaagtgattctcctgcctcagcctcccgagtagctgggactacaggtgcccgctaccatgcctggctaattttttttatttttagtagagatggcgttttaccatgttggccaggatgatctcgatctcttgacctcatgatccaccctcggcctcccagagtgctgggattataggcgtgagccatcgccccagccctaaagtcatgttttctgttgtcaggaagtttaacatatagtttgggaggtgaatttgagataagatggtagttgacatgatagtgtgaaacctttcccttttttttttttccaataaatttctccattgaagcctgccttaggaaaaattcatgtcaataataaagcgggaggggaaaagcatttcccagaaccccacatgagaactaccataaagctgggaatagaattaaggagtaacattattagctgataatggactgaatgagaatggtatagtgagaacctctgttttacctctgtgtgtcagagggcccagaatccttggtgtagtaatgatggattgtagaaccttccccaaatggcacagttgaaacttgatccaggaagcccaagtcattgccgttaagactctaccatattaggatgggcaggagaacctctcctagctgtatagatccggagttggcaaactactgcctgtgggctctattttataaataaagttttgttggaatgcagccacagtcatttaagtattttttgtgcatgcttttgcaatacaatgacggttgagtagttgtgatagagactgacccacaaagcctgaaatatttattatctgactttgtatagaaagagtttgctgacttctgatattgagcaagccctaactaggagaatattgtgggaacagcgtagtggccttagtgaaccacagtcttaatttctatttgactctttgcccttggtgctctaagagcctgaggaataaggttaataaggtgggggacttcagtgaaaattacttttccgttgatctggacttgagtaaatcctttgaatggctgggcaggaagttttgtattggttacctctttcacgtgtcaactgtcacagcagagatgtggaatttgctgggtactgggcatacagagacgcatatagtctatttaccttctgtcacatcactggcctgcatagtaccctttccacccaaagacgaatacgaagaagaaaacagtcctcattgagattgtgaaaaaattcttcagctcaagagaaggacattctcataaatatgaagagatttatgagtgtaaaatactttggagaaaaatatgtgagattcaaaggaacgtaaataagaaattaagacgaaacagttaacttttgtttcaagtgcctcttccaggcgttgtgctagctgctttattttcgtgtctctttcaatcctcacattaaccataaaagttagaaggaattatcctcctcttatgtgggggaaactggtgctcgaataggttaatttcctgaaagccatacaagtcagtagatggttgagccgggaattagtcacattttaggctccccttctttcttaaaaaaattgaggtaaaagtcacataacatgaaattaaccattttaaagtatacaagtatgtgacattgagtacattcataatgttgtgcaaccaccacctctttgaagttccaaaacattttcatcacctcaaaagaaaaccctgtactcactatttaccccccattttcccttgcccctggcaaccaccaatctgctttctgtatttacctattttggatatttcatataaatggaatcatacaaatcatacaacatgtgaccgtttgtgtttggcttctttgacctatgttttcaaagtttatccacgttgtagcatgtaacagtacttcattccattttatgcctgcatgatactgtttcgtgttgtatgaatatacctcatcgtgtttatcttttcatcagtcatggacatttgagttgtttctaccttttgtctattgtgactattactgctatgaacattcatgtacaagtgttgtttgaatttctattttcaattctctggggtatataccccaaagtagagtggaaatgccatgtttaattttttgaaaaattgcttaaactgttttccacagcagctgccctcctttacattcccaccagcaatgtatgagagttccaatttctcaacatcctcaccaactcttgtttcctcctccttctcctcctcctcattgagacaaagtctcactctgtcgcccaggctggagtgcagtgtctccctgcaacctccgcctcccaggttcgagtgattcttgtgcctcagcctcccgagtaactgggattacagttgtgcaagccaccatgcctgactaatttttgtatttttattagagatggggttttgccatgttggccaggctggtctcaaactcctggcctccagcgatccacctaccttggcctcccaaagtgttgggactataggtgtgagccaccacgcctggccaccttattattactttttaattgttgccaccctagtggatgtagtgtggtatcttattgtggttttgatttccatttccccaatgatgagtgattttgagcatcttttcatgcgcttttggtcatttgtatatcttctttggagaaatgtctattccaatccattgagcattttaaaattgggttgtctttttggttgaattgtaagagttattcatataatctgaatatagattccttatcagatatatggcttgcaaatattttctctaattttgtaggttgccttttcactttcttaatagtgtgctagatgatgtacaaggtttttaattttgatgaagtccagtttattttttcctttattgctcatatttttaaaaccattgccgaatccaatgtcatgaagatttatggctgtcttttttttaatggtacagtagtatagttttagctcttatgttaggttgttgatccattttgaattgttgtttgtacagttaaaaattgttttaatgaaattttatttttatatatttaaggcgtacaagtacagttttgttacatgggtttatttgcgtagtggatgaagtctgaggtttttgtgtaaccatacccaaataatgtacattgtacccattaagtaatttctcataacgtttgtactgtttttgtatatgttgtgagatagaggtctaacttcattcttttgcttgtggatattcagttgtcccagcacctggatttgttgaagagatcattctttccccatttactggtgctagcacccttgttgaaaatcagttggccatagacatgtgggtttgtttgtggactctcacttttattcctctgggctatgtgcctgtctttatgtcagcacttcactggttcgattactataaatttgtggtaaatattgaaattcggaagtgtgagtcttccaactttgttattctttttcaatactattttgtctatcaagggctccttgcaattctgtatgaatttgaaattttttttttcatttctgggaaaaaaagctgttgaaattttgatagagattgcagtgactctgtagattgctttgggtagtactgtcatcctaactataaattcttccaatccatgggacctttccatatatttaagtgtttaacttcttttagcaatgttttgtagttttcagtgtgctagtcttttacctcattggttagatttattcttagatgttttattcattcggatgccttttttgtttttgaggcagagtcttgctctgttgcccaggctggagctttttttttttttttttttttttttttgagacagactttcggtgtgttgcccgggctggagtgaagtgttgtgatcttggctcactgcaacctctgcctcctgggttcaagcaattctcatgcctcagcctcctgagtagctggtattacagatgtgcaccaccacgcccagctaatttttatatttttagtagagacagggttttgccatgttggccaggctggtctcaaactcttggcctcacgtaatccacccaccttggcctcccaaagtgctaggattgcaagcgtaagccaccgcacctcgctgctattttaaatgaaatagctctgttaatttcttttttaagaaattttttaaagatttttttaagctattttaaatgaaattgctgttaatttctttttaagaaatttttttaagattgtttgttgccagtgtatagaaatattatcgatttttttttttttttttttggagacagaggctctgtcacccaggctggctgtagtgcagtagtgtgatctcggctcactgcaacctctgcctcccaggttcaagccattctcctggctcagtcccccatgcagctgggattacaggtgcatgccaccacacccagctaatttttgtatttttagtagagacagagtttcaccatgttggccaggctggttttgaactccagacctcaagtgatctgcctgccttggcctcccaaagtgctgggattacaggcgtgagccaccacacccggccccagtttatttttttttattgtggtaaaatatatgtaatataaaatttgccgttttaactatttctaaggccgcagtttgacattaattgtattcacggtgttacgtaaccatcactactatgtatttgcacatttttttcattaccccaaacaggaactctctgccaattaagcaataactctctaattcccctatccccagtagttgtaacttccaacctactttctgtctctgtgatttttgcctattctagatattttatataagtggaatattacagtatttgtccttttgtgtccgatttctttcacttagcatgatgtttttaaggttcattcatgtagagtatatcagaacttcattcctttatatgactgaacaatattggaacaacatataacaatattatatggttgaaccttgaaaacatcatgttcattgtatatgtatacaacgaacaaaatgtgttgtatacatgtaattagacatcatctattaccattgagtattcgtgctgttacctgtgggttttataaatgttctttatcaggttgaggaacttgccctctatttatagtcttctcatctgccatggatatgatatgtggggggagaatgtacaccacattttgtttatccatttgtttcttcgtggacacttgagttatttatacctttggttattatgaataatgctgctatgaacattcacatacaagtatctgagtccttgttttcaattcttttgaatatatacctaggagtagcattgttgggtcatatggtaattacatgtttaatattttggggcccactggtttttgtgttttgatcttgtattatgcaactttgctgaattcgtttattagttctaatatttttgtgtgtggattctttagaattttctctgtataaggtaccatctgtgaataggggtagttctacttatccatttacaatttggacaccttttatttcttctacttgtcaaattgctctggctagaacttccagtgctttgttgaatagaagtggtgaaagtgggcatctttgtcttgttcctgatcttgagaggaggggttttagtctattaccattgagtattcatgatgttagctatgggttttaaaaatgtcctttaacaggttgaggaagttgtcctctatttctagtcttctcatctgccatggatatgatatgtgggtaaaggtaggtgggcagtttaaaatgcacagtgttatcacaaagcagctacctctttcaccaagccttcctctggtagttgtgagtttttgaatacctgcagagttgtggaaaagttgattctgatactttttgcaagctcattagttgtttttgtggagggacagagtcctagatttcccagttctgccattttcagtgctaacactctccagatatgtgttttgcacatatttccttccagtctgtggcatgtcttttcattcttacaatggtatgtttaccagagcagaagtttttaattttaatgaaatcctacttagcaattttgtctttcatggacagtccttttggtgttacatctgaaacctcattgccaaactgaaggtcacctagattttctaggttatcttctggaagttttatacatttgcattttacgtttaggtgtatgatccattttgatttagtttttgtgagacttgtaaggtctgtgtctagatcctttcttttgcatttggacatctagcaccgtttgttgaaaagattgctttccccattggattgcctgtgctcctttgtcaaagatctgctgattgtaattgtgtcgagtctattttttgtttgtttgtttgttttagagatggggtcttgctttgtcatccaggctgcaatacagtgatgcagtcatggctcactacagcttcaaactcctgggctcaagtaatcctcccatctcagtctcctaagtggttgggactataggctcatgccaccatgccctgctaatttttaaattaactaattaattatttttgagatggagtctcgctctgtcacccaggctggagtgcagtggcgcaatcttggctcactgcaacctccacatcctgggttcaagcacgtcctagtctcagcctcctgagttgcaaggactacaggtacatgccaccacgcctggctaatttttatatttttagtagagatggggtttcagcatattgatcatgctggtcttgaattcctgaccccaggtgatctacccacttcagcctcccaaagtgctgggactacaggcgtgagccaccgcgcccagcctaatttttaaattttttatagggacagggtcttgctatgttgaccaggctggctcttgagtctgtttttgtgctttattctgttccattgatgtctgtgtctatttttcaccaataccatattgtcttgattactgtagttttgtgttatcttaaaggggagtagtagtatcagtcctttcactttgtcattcttcagtattgggttggctgttttgggcctttcaatacaccctttgactttagtttgtcaatattcacagaatagcttctggggatttggattgggattgcattgaatctgcagatcaagttgagaagaactgacatcttaacaatattgagtctttttttttttttttttttttaattggagtctcactctgttgcccaggctggagtgcaatggtgcgatctcggcccactgcaacctccgcctcctgggctcaagcgcttctcctgcctcagcctcccgagtagttgggattgcaggctcccaccaccacgcctggctaatttttgtatttttagtagagctggggtttcgccatgttggtcaggctggtctcaaactcctgacctcagatgatccacccgcctgggcctcccaaagtactgggattataggcgtgagccaccgcacccggccaacaatattgagtcttataatctgtgaacacaaaatctctctccatttatttagatcatctttgattttcaacagcaatgaataatttttcacatacagatcctgcaaatattttgttaggtttataccttagcactatttttggggtgctaatataaattgtattgtgttttcaatttcaaattctagttgttctttgctggtatacaggaaagtaattgacttctgtctgttaactttgcatcctgtgaccttgctgtaattgtttagtagttccaggtttttctttttcttttttttgtttttgtagattctttgggattttctacatagacagtcatgtcatctgtgaacaaaacagttttatttctttcttcccaatttgtatatcttttctttccttttcttatcttattgtatttcttatgacttccagtacagtgttgaatatgacttatgaggtggggcatccttctgatcttaaggggaaggcgtgcagtttcttactgttaagtaccaataatgttaggttttctgtagatgttcttcatctgaggaagttcctctctatgcctagattgctgggaggtttgttttttttcttaaatcggtgacggagattgagtttcaaaaaacgcttttctgtatccagtgataagaccatgtgatttttctacttagcatggtggtggtggtatattacatggcttgattttggaatgctgaagcagcctttctttctttttttttttttgagagggagtttcactcttgttgcccaggctggagtgcaatggtgcgatctcagctcaccgcaacctccgcctcctgggttcaggcgattctcctgcctcagcctcccgagtagctgggattacaggcacctgccaccatgcctggctaattttgtatttttagtaaagatggggtttctccaagttggtcaggctggtctcgaactcccgacctcaggtgatccgcccgcctcagcctcccaaagtgctgggattacaggcgtgagccaccgcgcctggccttgaagcagcctttcatacctggtgtatagttgttttcatatattggcggatttgattcccttaatatttgttgtggatttttgcatctgtattcatgagaggtattggtctgtagtttgccttttgaaaaatatatttagcttattttggtattaggatgatactgacctcatagaatgagttaggaagtattccctctgctcctgttgtctggaagagattgtagataattggtataatttcttaaatgtttgctagaattcaccagtgaaaccatgtgagaatggagctttcttttttggaatattaataattattgatcaattttcatatacacaggcctattcagattattattttatgtgtaaattttggtaatttgtatgtttcaaggaattggtccattttatctaagttgtcaaatttttaggcatagatttatttataataatctgttattttccttttaatgtccatgtgatttggtagtgatgactcttcattcaaatctgatgtgaataatttgtgtttttttttctcttggttaatttggctagaggtttatcagctttattgatttcagagaagcagcttttgtttttactgttgattgttttcagttcattgatttctactgtaattaaaaattttttttcttctccgtgttttaggcttaagttgcccttctttcttttctttcctaaggtaaagcgtagattattgattttacgtctgttttctaataacgcacttgatgctataaacttttctctaagtgctgctttcatagtattgcacaagttttgacttgtatttttatttagtccaaaatattttaaaatttctcttcagacttctttgactcatgtgttatttagtagtttgttgtttattctctaaacattttgagattttccagctatgtttttgttactgatttctatttttattccgttgtggtatgatagcatacttagtatgatagctacaaatttattaaggtatatgttatggcccagttgtggtctatcttggtaattgttccatgtaagcttgagaagaatgtgtattctgctgttactaaagtattatataaatgtcaagtagatccagttgcttgatggtattgttcaattcatagatacccatactcattttttttttttttttttttttgcctgctgtatctatcggttactgaaaggggctgttaaagtatccaactatagtagtggatttgtctatttctgtttgcagttatatcagtattttcctcatgtattttgatgctctctagtttggtacattcatattaaggattgttatgtcttcttggagaattttgcattttgtaatgctattctttatcccaatgattttccttgttctgaaatctgctttgtctaaaatttatataactacttcaacttcctcttgattagtgttatcgtggtataactttctccatccctttacttttatcctatcccttccctccctgcctctctctctctctctctctctttctcttgctttgctttgctttctatttatttattaattatttttagatacagtcttgctctgttgcccagcctggaatacagtggcacaatcatggttcactgcagcctccgcctcctaggctcaagtgatccttctacctcagccttctgtgtagctgggactacaggtgtgcactgccatgcctggctaactttttgtattttttgtagagacagggttttgccatgttgcccaggctggtctcaaactcctgggcctcaagtgatcctcccacctcagcctcgcaaagtgctgggattacaggcatgagccaccacacctggcccattcctttatattcatttttttaaatctactctgataatttcttttaactggtgtattgaggccattcacagttaaaatgatattaatatggttgtattaatatgaaccatgtttataactgattttctatttgttgtacttactttttttttttaatcccctctttttctgccttctggttttaactgaccgttttacaggattccattttctctcctgttttagtgtctattatacttgtttttactttttttttttttcggtcattgccctagagtttgcagtgtacatttacaacttatctaagtacactttcagataactctatactgcttcttgaggagtgtaggtaacttttactagaatttttgaactcctccctccagtcccttataacgttactattattcatattgcttatccatatgctatactcagtcaataatagttactattattattttgaacagttatcaattaagaataggaaaaatagattttatcttatttattccttctccaatgctcttttctttctgtagatcccagtttcttacctatataattttgctttctctctgaataactttttaaagcatttttaaagggcaggtctactggtgacaaattcactcagcatttatctgagaaactctccttcagttttgaaggatcatttcactgagtaactttgaggtagagttttttttttctttcaacattttataaatatttcactctactttcttacttgcatggtttctgacaggacatcagaggtaattcttatccttgttctctataggtaaggtgttttttttcctctgatttctttcacaattttctccttgtgtttagttttgtgtagtttgaatatgatgtacttaggtgtagatcttttggtatttattctgcttggtgttctctgagtttcctggatatgcagtttggcacccttaattttgaaagattctttgccattattctttcaaatatttcttctcccttgtctcacttttctcttcgtattccaattacatatgttacaccttttgtaattttcccataattcttggatgttctgttttgctttttaaaaatctttattttgccgggcacggtggctcacgcctgtaatcccagcactttgggaggctgaggcaggcggatcacaaggtcaaaagatcgagaccatcctggcgaacgtggtgaaaccccgtctctactaaaaatacaaaaaaaaaattagccgggcatggtggtgcacgcctgtaatcccagctactcaggaggctgaggcaggaagaattgcttgaacctgggaggcgacagaggttgcagtgagccaagatcacaccactgcactccagccttggcgacagagtgaggctccgtctcaaaaaaaaaaaaaaaaagaaaaaaaatttcttttttcctctttccattttagttttggaagtttctactgacatatcttacagcctagtgattttttgctcagccgtgtccagtttactgtcgagtccattaaaagcattcttcatttttgttacagtgattttgatttctagcattttcttttaattcttccttagagttatgtatgcttacattacccatctgttcttgcgtgctgtctacttttcctattagagcccttaacatattaatcacagttattttaaattccctatctgataatccccaagtctgtgccatatctgagtctggttctgatgcttactttgtctctttagactatgctttttcttgctttttggcctgccttgtaatttttttaaagctggatatgatatattaggcaataggaactgaataaataggcctttagtgtaaggttatatgttaatctgtctagaagctaggtcatgtttaatgatgtaggtatagatgccagaggcttcagtttcctctagtgtctttgttattttatttttcctagtctgttgtctgtgggttctcctaagaactcctttataaatagtgagtctgtgtcttgcaactctttcagttgtaattctctgttaatgtactggagctctgttgacatgatgggaagagtatggcgaagggaagaaagtgttctataatctcattcttctgtaagacctgagtctttggctacaaccttcagaagtgtttccagccaccccttcccctccttttcttctgttagatgaaacaagaaggctagagggactgtctttggctgatttcctttctccctggacaccaaggctctggtaaattttctcttggactgttgacctttgttatgaaaaacattctggccttatttcaaaatggttactttcttcctctccctacctaaaagaagaggagatttttattagatcttacccctgggtgtatttcaaattaattttccttgtgtcttacacaaaaggggaggagttttttcttgggtcttcatagtcagaacctggtgagatttcctggaggtaaaactgcaagaacttagagggcctcctaagatttagtccccaggagttctcattcacaagctagtctcagttagcctttgtcaaaattatcatttaagttttcttactagtgtatgattccagtgccttctgctccaggtactgctgatcttggatgtgattctttgtatttgcctgtttctctagatttcaggcgattggttcaccctctgacctcaattccgtaaatccaagaaatttgctgattttcaatttgttagggttttttctttttttcttttttcttttttttttgagatggagtctcgctctgtcgcccaggccggactgcggactgcagtggcgcaatctcggctcactgcaagctctgcttcccgggttcacgccattctcctgcctcagcctcccgagtagctgggactacaggcgcctgccaccgcgcccggctaattttttgtatttttagtagagacggggtttcaccttgttagccaggatggtctcgatctcctgacctcgtgatccacccgcctcggcctcccaaagtgctgggattacaggcgtgagccaccgcgcccggccagggttttttcttaatgtaaggacaggagtgatggtatccaagcactgtatgggttgatgctgaaactggaagtcctgtttacattttaaaattggaaatatcttgtccagtttataaataatattcagcaagaggttttttaactttcctgtgaaccattttcttagctgaaatgactcattcccagttattttcatccctttgaatttcaaatctctgtattttcatatgcttagtaagaactttttcagaacaaaatatttggaaaacttaagaactttatgtagttcttgcaaatggctactaactttaccctaaagaaactagaattattacacattttgatttccttttctcccctacagcattgttttttttttttaaccttctgtaaaccatgctcaagtagttctagggattattttcttcacttatttcaccccacttatttttgaagaagaactcagttttctaaggcactttgaaatctctagagactaagcacggcttaaatttgaaaaactaatgagaataaatgtggaactcttatgctgccaatggtttattttcaattaaccttgaagaatgtagtaattataaactacagatcgtggtgactttagcttaataggattagtttgagaatctgtgtgatagaggacaatttggctaaaatgtgttatttaagcaaccgagaaagtagtgtgtgtgtactttaaagccttataatttgattactggctacaaatttgcattttggtaggctttagttcttatccttggataacagttgtaactaacctcagtcatttgagacattataaatttcgttaaccttgcttcttttttagggttcattttaagttttatttttctcactgaacgtactgtgagaaacagccattaaaccaagaaacaaattagcagtatatttaaagatcgcttattagttagcagattaatgtgtttaataaatattttcctcttttctcatttgattaaaatgaatatttgtctttgagaattaaatatatttttaaaagaattaaaatgttaaatagaatgtaattttttttgtttttctctataaatgtaattttaatatactaaataaaatgtgttttaaaatgatttgccgtactgaaaggatttggttgaaaataattaatttttgctgtgtaataatcaattagctgtggcccattttacaataagatctatttgtgtagcatgctgtgaattagagacagaaaccttttactatgcttttgcttagagacctttattataaagaagtaagggccgtagagtggaaatggataaagactagcaggtcttcaggagtggcatgcttatgagttaagcaccatgccaggttccaccacccttagcagattagtgggtggtatcagtgttgctcctcccaaaatgtttttttaagaactcttcatgtattatgacagtaccctagaagaaacccacaagaatgaacacaatgtatagtaatatagtcttaacaaaatagcttccatgtgctaacaattcaactgaagatagatggtctatgttcagtaaatacatatttaagttgggacccctattgtcagggacttgacctccaattcccagataatgagggagcagcagctcattttttgtcctgatcttactacttcatgctatctgggctggcagatacccttggaaaatgccatttcattcactaaagcttcagtaccacagtgccaggattgattgcctgttcctctctccagagattctcaggaccagccccatcattcttgacatcccttactttttgtcaccaccaaaactcactggccatctgttagcacagaatacccatccttgtgctgctctgtaggttcctcagtctgatccagtttcctccaaccctcccactggcccctagaactcttgaataatttctcccatggcctccgtcttgccccagcatcacagtgtaatctcactttctgtccctggttctctgctgctgccaaatggatgcctgagggtagcccctgctctggcatcagtctcaggctgtgctgtttcttcctttgcctactacctggtaacctcactgcctgccttttagttccttgaatacagtgaggtcttcactcttaaaaatctttgcacaggctgcttccttcatctgcagcaattttctcagtgttttgacctggccgaccctatccagtctgatctgggtgtcttcgcgttgtcctctgctggggcctcctatttgttttcttcttggcacttaattaaatttgaagttgtatattcacttgctcactgagccttttttctggattctatgatatatatttttcctcatatttctgaaattgtgatgtatcttaaactggatttcttgattcctttctgaatggtaggtaaaataatggtttatcttacaattgtcttacatttaataaaatattgcacttttaattattgtttcccccggttgattgtgagttccacacgtataggaatttcattttactcaccaatgaaccagtgcctagcacagtacctggcacctaggaggctctaaataaatagtagttgaatgaatatcattatctatttgggagattttggccctaattttctcaagatgaattagtcagtgtgtaagtatgaattgttaattcagtttctgttgttgaatcattgttttcgagattcctttattctggaattgaaagagacctttagatttgtctattttgttcctccatctatgtaacttgccctattataggtatatgtacatccttgtttagaagtacttactcaccttgcatgaaaatgaattcacataaacttctacctggtgtgagcaattttctttcattagggagaaggagcgaggaaggtaccaaacagcagcagacttttgaacttgagacagttttggctgcttgaacttaacttttttcattttacttagtcccccaatgagtgcaatcatttggcatgcctacttcactttttttaagtgaactaacagcgaacaggcaacgttggtgactggagtgcctcaggcacctcctagagaaggttcaagcttagtccccagctggaggtaaggtgtggttctcagtccttttcatttccccaatcctgctcctgagtactgcagttgagtcagcctgggataatgagcagtttgcctttcattgaacactcaacagcctggttgtgaaaatgtctgctatgaccagtctttgccaatctcccatgtatgcttctgggttctgcagataatacttgtgtctcttcccccactcttgtacctgacacacatgttctacgtgatgtgaaaagaagagaagttgaacaggcaattgggagaactcgaagttgcccaaattgatgatgtcagtgtggagatgcacttgcagggaattgaaataaagaagttcaagtgtggccttgagaaacatggaagggtgagaatcccagggagcttgctgcgaacgtgtaccattggtgtcatcttcaggcctctgtttgaggtggccttcctgatgatcccgtggtctgtctatggattcagcctaagtgtggtttacacttgcaaacgagatctttccccacattaagtggactgcttactctctcgcccccggagaaaagcaccttcatcatcttcatgctggtggtgtccttggtgtctcttgccttgaacatcattgcgttattcagtgtctcatttaagagcatttaaggatcatgtgaaggatcaggagagtgatacacctggcctgcagagtccctccaatggctccatatcaactcttcctctctccaccatgtcccctcctggggacaagctagttcctggagaaagaaacaattcctcttgctgtaggcacaacaaggaagtgagcaaaaacccttctagttacagtgcatagcaagattgaatggagcaggcaggaagtaccccctctgactcccagtcttttgatttccctgctgataaacagagttcttaaacaaaagcaaaaacctagctactgggcactagccatggtaggccagcagccatcctgcagagccagtagtcatgccagcagcagcctgatgacctagagatcaagatgcatacttggaagcattatgattctgcttgattgtttaagagaaggaagtcgcagtagaaagcgcacctttgccccagtggaggtggtactcaaaaacctcagtcgtgagacttagcagacacaaagacattagactaccagggttcctgtacaatgagaaatgctaatttgcttaatatttgatagtaaactgctgtcatttttagctttattgcatgcaatgtagacctagttcatcatattacaagttctagagagtattatttattcaatacaggttttttttttttttttttttttttttttttttgagacggagtcccactctgttgcccaggctggagtgcagtggcgtgatttccgcttactgcaacttctgcctcccggttcaagtgattctcctgcctcagcctcctgagtggctgggattatagacgtgcgccaccacccctggctaatttttgtatttttggtagagacggggtttcaccatgctggccaggctggtctcgaacttttgacctcaggtgatctgcctgcctcagcctcccaaagtgctgggattacaggcgtgagccaccgtgcctggcctcaataaagttttaagaaagcaacctgtgtgtctccctcctgagagcttctggctgcaccgatctttcctagacttttaaactcttcattggcacatcttcatttaagcaaaataggctagaatcagaattttagaaatgaaattgcagtgactacattacagaaagttttagtattaacatttttaattatatgtagcaggatcacacatatacccattactttcaaatgtgccaaaaatgtagcttttttttttttttttaactgttgtacttttcatcagaagcttcttcccaccacagggcgctggagggaaggagaagacacagacaacttaaacattaaacctgcccatccagcatcttgctgtgacagtttaaacagtctcatttggaaaactcagtctcttggctaaatttccttctcataaacccttttatgagcatgaggaataatcacagttatttactaatgaaatgtgtgtgcctattggatactacaaaactcctgaaacttttgaatcagattggacgctgctgtcctcacttcctgtttcacattcattttcacatatatcttgctttttttcccttgaacttttaatcttgagataattatagttcacatgtaggtataagaaataatagattccttatatcctttgaccagtttttcccattagtaacatcttgcataattacagtatagtatcgtaactagaaaatggacattgatgtatttccattgaccttattcagatttcaccaattttatctgcactcctgtgtgtgtatgtttagttatgtgtaatggcatcacttgtgtagattcacatgtccaccacagtcaagctacagaacggttttatcacagggatcccttgtgctgcctttttatagccacagccacactcttgccttcccctctttctaacccctggcaaccactaatgtgtacttcatctctataattttgtcatttcaagaatgctattttagtggaatgatacaatatttaaccctttgagactggctttattcactcagcacaactcccttgagattcacccaagttttttgtgtgaaccaatagtttgctcttttttattgctcttttttagtatgctgtagtatagaggtgccagagtttgtttaccttttgaaggatctttagatcatttccagttttcatttccctgtgttaggtgctcaagagtgcagttgctgggttgtatggtatgtgaatgtaatgctttgtaagaaactggtgtatacttttccagactggctgtacaattttaccttcccatcagcaatgtgtgaggaatctagtttcttcacatgcttaccggcattttgtattatcactattattatttttatgttagccattctaatagttgtgtaggtgatcccattgtagtttaaatttgtatttctctaatggctaaaaatgttgaacaccgttcctgtgcttatttggcatctgtctattttcttcagtgaagtacccgtgccatttttccaattttgaattggattgttttattattgttgagtttaagttctttatatattctggatttaaatcttttgttctatatgtttgaaaatattttctcccagattatagcttgctttttcattctcttaacaatgtctttcatggaccaaaaattttaattttgttaaggtcatttatcaattttttttttcctatggactgtgcttttggtgtcaaatctgagaaatctgcctggccctagatcctaaagattttctcctttggttgtttctaaaagttttataagcttacattttacatttaagtccatgatctattttgtcaatttttgtacaaggtgtgagataaaggccaaagttcttttttcttctcccttatggatgtctagttgctccagcaccattcattgaaaagtctattctccctccattgagttccttttgcagtgaaaaatcagttgggcagatttgtgcatctctaattctggattctctgtccctcttctagtttctagatgagactgtataagattgctgttaattcttccttaagtgttaaaattctccagcaaacctatttgagcttgcagatttcttttattggaaacttgataattataattacatattcaatttctttaataattacatgactcttaaagttgtttatttcatcttggttaacttttggtagtttgattttcaaggaaattggtccatttcttctaagttgtcaaatgtaagagtgtaaagtttgtagtgttcctttatttatttttaatgactgcaggatctgtagagatcttccttgttttgttcctgatactgatgatttttgtcttctttctttttatctttaccagtcttgctagaagtttatcaatattaattgttctttttgtggaatcagccttttgcctcattgattttctgttttcaatttcatttatttctgcttttatcatgattatttccttcttgctttgggtttattttctttttctagtcttgagagaagaatttatcttactgatttgtaaccttctctctttttaaaaaatgtatacattgaatactataaatttccctctcaatactgcttaagctgcatcccacatattttgatacatgttgtattttcattttcatcaagttctatgaaattagaatttcctttgagactacttctttgacccatggattatttagaaatgttaggtttcatttctaactatttggagattttcctgttttctttctcttactgatatttaatcggattccattgtggtcagagaaaatactctgtatgatttcagctctttaaaatttgttaaggtttgttttgtggcccaagatgtgttctgtcttggtgaatattttatgggctcttgaaagaaacatgtattctgctgctgttgggtatagtattttatatatgacaatgagaccctgttgggtttcattttcttatttttttgtcttcaggaagttttaggattccatcttatttatacagttcattagtatatcagtttgtattgtgttcttagttactgatctaggtattaaaatatacatttgtatttaccacaatctattatcagtgttttaccactcaagtgaagtgtagaaatcttactctcctttagacccttttgccctccccacttaaaaaatatatatgtcttaagtatttcttctacgtacattgagcaccacatcagatgatgttataatttataatttttgtctcaaccatcaaatctgatttatgaaactcatgagcaaaaggatagtcttatattccccaccttttatttttgtagcctgttctaatatttttttcttaaattccaagcttctttggttatcttttactttcttggttgttgttgttgttgttgttgttgttgtttgagacagggtctcattttgtcacccaggctggagggtcacccagtggtgcaatcacagctcactgtagccttgtgacttcccgggctcaagcgattctcctacctcagcctcctgagtagctgggaccacaggtgtgcaccaccacacctgactaatttttgtgtttttggtatagatagggttttgccatgttgcccaggctggtctccaactcctgggctcaagcagtccacctgcattggcctcccaaagtgctgggattacaggagtgaaccaccacgcctggctggttatcttttacttcctatttagaaaactacctttaaccattctttaagggtaagtttgctagctacttctctttgttttccttcatctgcgattgtctttatttctctttcattcctgaatggtatttttgcttgatacaggatttctgattgacaattcttttcttttcttttttcttttcttttcttttctttccccttccccttccccttcccttctttttttttgagacagagtcttactctgcctccaggctggagtgcagtggcgtgatctcggctcactgcaacctctgcctcccaggttcaagcgattctcctgcctcagcctcccgagtagctgggactacagacacgcaccaccacgcccagctaatttttgtaatttttggtatagacggggtttcaccatgttggccaggatggtcttgatctcttgacctcgtgatccacccgcctcagccttccaaagtgctgggattacaggcgtgagctaccacgcccggccgacagttcttttatttagtgcttgaaaattgtgctgtttccttttagcctctgtggttactgatgagaatacactgtcattcaaattgtttttctcctataggtaaggtgctgtttttttgttttttagttttcaaaagtttcactatgatgtgtcttggctggaattactttgggtttatcttgtttggagtttgcttagctgcatgaatctgtaggttatgtcttttgctaaatttggaacttttccgttgtgatttctttgaatgtattttcagctctactctgtttgtcccatccttctgaacctccagtgacatgaatattaggtcttttgttatagtgccacatgtctctgagtctctgttcatttttcccccatctgtttcttttctgttgttaagattggattatttctattctgtctctaagttcacagattctttcctctgttttctccattctgttgtttagtccattcactgagttttaaatttcagttatttgctttatttttcaattcataaggtttttttgttgttgttgttcgtttttgtttttttgagacagggtgtcactctatcacccaggctggagtgcagttgcacagtcattgctcactgcagccttcacctccctaggctcaggtgatcctccacctcagcctcccaagtagttgggaccacagacgcgcccagctaatttttgtttattttgtagagacaggtttcaccatgttgcccaggctcgtctccaactcctggacttaagcagtcctcctgtcttgccttcccaaagtgctgggataacaggtgtgaaccaccatgcctggcctaaagttttttttttgtatcttctattaatttgttgagagttcctatattttcttatttggttcaagtatgcttgtaattactctaaagtatttgtatgatggcagcttggaaattttttctgtgatgattctaacatctctacagtcttcgctggcacctgttagtcttttttgcatgttgagatttccctactttttagtatgatgaataattttctactgaaacctggacattttggatgttatgtcattagaatctggatcttatttaatctcctgtttttcttggccttctttgacaccccttctggaaaggaggggaatggaagttgagttttctaattccacctccattgacacccactgagaggggctccttgctgctgctttgttgggtgggaattccagctccctaggcctttgctgaccactgtggctggagggccaggagtatcttgtgaccactccccacgttggcctccactgacaccagcctggcgggggattagacatgttctcttcgcagcatttgctggcatgggtagggccccagttttcactgttttgtggctggggtagagtagttattgtctaaggtcttttgtcctgctaggctgttcttttcctggtcctttagctggagaagagaaggcttttgttggggctctttgtctgtgcccatgggctcttctgggttctttattgaagtatttttattagggttgctttaaaatctctgtcagataattccagcacctgcttcatctcagtgttaatgtctcttaattgtcttctttcattcattcaggttgtgattttcatggttcctaatatgatgatttttttttttttttgtatcctggtcattttggatattgcaagactctggatcctatttaatgtgtgttttagcaggtagccacccagttgaggtataggataagggcaaatgtgtatattcaatttccctcttggtcccattgataccacctccgcaaaagctccacttttactcacgctgcctcattgtagatgggtgaggtggatgttcagctcctcatttggccccaccaacacctccccagtgaaatcggatctcagatttgcacctgccttattgcctctgctacatcttgcagacgctaccctggccggggagtcagaggtgctacggcctgatgggcaatgaaagattagctccttggtcagcctcactgatctcatcaggcagggaattctaacagtgccgcctgctttctcgggatgtgtatgtgtaaaagagtgttttcctacttgggcctgctgaaacctcagtggggtggtgctgcagtttttccattgctgcagtttttccattttctttttggcagtaccctccctgttgcctggaatagggagggtattgccagaaagattttcagttgttagcctacccttttcctggtcttttggctgaaagaacaggtttttcttggagctattttttttttatttgtctatcggtgccaggttgaaggcttttgaagcaccttattgggcatatatgggagacaataaggaaacccaggaacttgcctctcaagtgccgaagtccctatgcagtgtgccatcttctttccatcttggcttcctatgtacgtttttgtgtcacggtcaaggatttttagtcttaaggaagaggacctggaaggagtggggctgctccatcttgaccagaatgagaagtctgtgtgtgcatgtgtttaatatataatgaaaattctaaaatctgttaacaccgttttgtataatagtaacatattttaatatttaaagaataaacaataatttattcttcaaatatactatgtatcaggcacagtgattgacccttgggtctgcagataggactgagacataatccttactttcaaatagctgatagttttgtagagttcaaagacctgtggaatcaattttaatttgccccattatactcagatggaaaccactcacaattcttttagaaataaaaacagaatctagcttcatactacctggctggtagtattgtgggagtttcctcccctctcattggttgagataagcctcctttggtttatgaggtactaggcaaatgaggaagtggtctagtgcttagtgccttgttgttactctggttacaattaaaccctttgccaggagctgccatccagtgggtagtgcttccctggccccaactctccaggctatggtgcttagtaatcagacaggtggaatctccgcaagtaccacaactgtcagaagtcctgaacacccctctctgcctcatgcagaagctgtggtcccatgatcctcccactcctggaggaaccttaactctattggatgggaagttcagctctactgcctttgtgagtctgggctttataatcataagggctgttagttctctccatgggcaggagaaactagatctcagggatacaaccccatgatctctgagttcctttggaaatttggttttgatgatttgggaatgcccaaaagtagaacatttctgaactttctccttgatggtagtgggtgataatggtgatactgtttttttaactcatgtgtgttctaagcattttacttgtatcttctcatttaatcctaatagcaacctcaggaataagtgatattattatatctgattttctccggaggaaattgaggcacagagaagttaaggaacttccctaaggccactcaggtagtaggtggtagagccaggattcaaatgcaggcagtctagctcagagctgaagttcttcttacccttctttcagcgacgtgacaacctttgagttttactttgcttttctattatttgcttgaaattaagattgatgtatctaaaataagtgttctaggcttctaaaaagtgtcacacaattaaatgttactaaagtacgtttctaattagaaaagtttttgttttctttcttattaaaccacatagatttggcaagaagagtataaaaaataaccagtaataggttacatttacaactgtttggagtatagtcctttaataatcagatttttttgttcgtttttgtaagtaggaaacaatgattttgttagaaatctctgcttttggccaagtgcagtggctcacacctgtaatcccagcactgtgggaggccaaggcgggaggattgcttgagcctatgagttagagaccagcctggtcaacatagggagaccctgtctctacaaacagtacaaaaattagccttgtgtggtggcacacagatagtagcctgtagtcccagctactcagaggataaggtgggaggatcacctgagcctggggatgtcgaggctgcagtgagccatgatcgagccactgcactcccgcctgggtgacagagtgcaactctgtctcaaataataataataataaagaaaaataaaaggaaatctctgcttttttgtttggttgcttagggctcaataaaaaatttaaccagattatttctgattatgtatatctattatatatcacattttgttatacatttgtgatcatttctattgtttttacatgtctttgtgtttaaatacaggtagtagaataactagaaggatgtgactcacacgtcattatgtaaatattatccatgccagtacatttaaattctatagggacttaattgtaaagcagttataatatagccgtgttcctctgttgagaaaagattcatactgccctttaccttgctttttcagtgaaaatgtttaagttttttcgttcatttgaaatgtagaatcaaagtttcatttacatgcatattctatgtacttggtactataatcttagagtttgttctattctttgtaaacacagaatgtgaatataaattttctgccatgttttgttaggaataatgtatctctccattaatttgcatgttttcataccattgactcttaaatttccatgaacactagcccacaatgtgatttatctgaggcagattttttttcaaattcatattgatttatcttccatgccacttgaatacattttgttgatataataagattctttgctagttctagctcaagagaaaccacaggagtgaactttagaacttccgattagttcattaaatagacatttggtaacacacctactctagtgagtcctgttggttgtttggggtaaagggtgagaagggcatgatcagtgattacagagtgaccacactccagaaaggaaaggcttattatggtggcacagaaattggggtgtactctctgccctggaggtattcatggctgtcagagcatgaaaatgtaaaaaaacaggttatccgtttgaaaactcaggtggttggttcttttaacaagataatatttgtttttactttctgccatgtttaagttacatatcttctacttcttcttttttttttttttttttttgagacagagtttccctcttgtcgcccaagctggagtgcaatggtgcaatctctgctcactgcaatctccgcctcccaggttcaaatgattcttctgtctcagcctccctagtagctgggattacaggcgcccgccaccacacctggctaatttttgtatttttagtagagatggggtttcaccatgttggccaggctggtctcggacctcctgacctcaggtgatccacctgcctcagcctcccaaagtgctggattacaggcgtgagccattgcacccaaacaagttacatatcttctttctttgcccagcatgtcccttgtctcatttcttattggtcactgtaagtttcatcagaggtatttagaacagctgaactgcctaacccatccatcacatccttttggtgggggcctttctgctaggtctcaggggcacagagttaagtgaggtacctaccctcatggatcttaatcaccgtctggctgggaagtgaggccgcatggcaaagcatagattccagtgcagttgtggtgagtggtttgctggaggtgtgaatagggtcttgggatcacgaaaagaggagtacacaaaacaagctggggggatcctgcagtgcttcctgcaggagggttttgaaggagtaaaaggagtgaactagaagtagaagggctggcttcttgtcatttcagtaaagctaaaacatcacctccttaggtactgcaccagtactctattgaattgtctgttttgttaccataatcttgttctgttatttgtttccttgttatatgtctcttccctccagaatgtaacttctttgtattcccagtgcctgttacatagtaggggcttgaaaaatgtttattggttgaataaatgaatgaatgaatgaagaatgaatgcttgaggcagagtgtgagcagataaaagcaagtgtatgtgaaggcttagttgagaaactaactgcaaatgattaggtgtgacatgagcaagggagcttttccttacaaattaggaggtaaagcatggaattagaatgttatcctgaaagcctccaggctgcatgatatgtaatgcagcattcttttcctgaattcctctgattaacagctgtgaatattttaaattttcattatgtgcaaaactgatgatcttactgaggccttttagagaatattatttaaagaggattttaactagagtgcttcagtgatgttcttgacatcaagtaaccagacacaaacattttattcaggtttacagtgttctttggctaattctcttgaaacattgaattgcttgagacttacgtgccactcttgtttcaagacaacagacaaaacttttggtagttttgtctcttcctccttttgctttagtgctcaaggtgtggtgtacattggtcatcaggccaatatgatggtgataaacagttcctcttccaggcctgtgtgataatacagtttaattgagcagacttttagttacatacgtaagataaaatgctagatacttggatgtaagacaaactagacacatgttaggaataacacttaatatcttaaggaaattgaacacttgaacaaaaggatttttagcaaagcaattttgtttttgcgcagaggggtgcctcttcggccagttgtcatgagaatatacttgaacaaagggcacgagagtttttatttttgacgcgagttttgtttttgtatttttttattggccggggttgggttgtataatttaaattaaatttggttggctaaacatttgattttttgttttttagatagggtgggcacttaaaagaaagtagaggaaagggaaggggtgtttgtaatgagctagaaagttttttttttttttaaataagggaaggaatgtgagctggtattgataacgcttggtattgaggcgtgcctgggcatttaacaaaggcaaaaaggaaaaaggagaaaaaagggagggatactatgaattaaagaataaaagattgaccagattatctgaagagaaaccttattatattttacacatagctctttgaaaaataccatgggctgctgatatatatctaatagccttctctttctctgctaagagaaagtaaatctggcattttctagttttctccacaatgtataataagatatgaggagttattacaagcttaactagatgctttgaaaatcagattttaggaaaagaaaataaaaattgttactacctatgttgaatgtatttttcacttttctctgtagatatggttatggcaaaacgctgtgacttggaacctttttcagatttcagttgtcctattctgcttccttgcctgctttgtgagcacatctatcagaaagtgtggtcacaggatttctagagataacccagcgcagtgcttgaatagggagtttctgtgtttctgttctatacgtcacagtctttcacatcttagcagtgttgtagccattgcgcacctgagcaccttgtgcctaggtagcccgaagatgttatacagaaacaaattgctgtttgctttctttgaacttcagtgttttgttaagctcgtgcctgttctaaagcagccatatctctcatgaattggaaaaaattaaaccttggtgcattggctttatttgcgattttagtattctcattttcttattttataagaaaatgtaaaattaggatattgtatttgccagaattcaagacttatagattttatatacatgcatgcacaattcatcagtgtgttgatgaataaaaacaaaacagaatcaagcatttttttattgagcactaatttattaccatttttgctctactgtctctaacgtcagcagaaggtatgagtatatacgcatgggtctggcttttgttcaggctctgagtaagcagtgagcaacttgctctgtagtagctatgctattgttaactacctgtacattgtttatacatgaataattgcaaaaattaagtatactgacttcgatggtctctacataacttactgaaacaattggtcataagaaaggcacagtcagtccctcccttgataaaggaatctctagcaagctctgtcactcattcaacagagcaatagatttttctcttcatttggaccatgcatttttatgctgatcatcagtccataattttaaactttgttttttattctgtcaatattcttgaatctttatttagcagggataatacttttggaatacctgatgatgtatctttggtcaataaattggtttttgtcttctgatcttttcttttatcatgtccccaggaaagagagcaggatgaatgccactttgtagggtaaattccttgagtattaaaggagaaatgaaggacagcccattcaagtgtcaaaggaatgtgggaagaacaggcagagttagagcaggcaggtggtcaggtatatatttcttgtcattccccgcccccatcaccttagggaactgaaattcaaggtttagggggtgggtaggttgaaggtaagccaaaagtgaaggaagcttatgccccatccccctcttgtaactcagggaagaaacagtctttcaaggctgctttaacacaatgtaagcagccacagcagaagaaaatgtagcatgctgtggttaggtaaagaggactgccaggcctcctttagctggtgagtggcttctgaggaatcccaaagttacttcacactccaggtagctgggttgagagccagtgaacctgtcagtgggaaagatgtgttgaggggcaagctgatacccacgctgtagctgacagccacgctgtagctgacactgattgagctaggtcttgggtgtaaatgagattaaggagtctagatgtcttcggcaccaattagagacagatcaactggggtagatccctgggctctgggccaagagagcacacctgagtctacagcctccttgagctccaacagcagcctcaggccagtgtctggggtccacgcgtataaggaaccttgtcttggagacctgagaacctctaccttactacggtgaagttctgtaaccccacccacatccatacccacagctgccatcttggtagaagcagggagaaaatggaaaaacttaacatttacctgaacaagactataaaccagaagggactgcactaccatataatgcaagttaaagtcaagtgtgggggcttgaaaagcaaggttaaaacagttacagaaaatttaaaagctacattttcttggcacgggttaaatttagtgagctataaattactgttcctgccgcagcaagatagtctttgaggatatatttcctgcatttaaatttaaattttgtattcttcattcacagtggaacatagcttttaagtccaatgattatctgaggtttagattgcctgcagttggcatgcctaatgccatcttggtctcagttacttgatcactagaagtgaaattttcattttctcgcctcagtgttataaaataaggacaaaatgaaatagtaacacaattgcacaataactgcagtatagacgtgatggttaatactaaactgaaaggctgtctgacaggcatcactgccatgtagtcttcaaaattctcattcatttgcagacaatttggtgtgaatttggtgtagacaaggtggtttgagggtatctacatataatgtttgaagatgtgggttttaaataaaaatgagatgcatctcaaattttatatgatctataagtatggagctagactgttttgaaagttcacctttctctctttccattgaaaattgttggtattttctgccagagggattaaggaaaattgttctctgaatgtctcatttttcattttgataactatattttactttttgaacattttattaattaccgaatctataatatgaacatagggtagtaaatttatattagtcctggaactatgaggtaaattatttttaagtgattcatcttgaattacccacttatatacaataagatgtacccatttttagtgtatagttctgtgtaaactagccctcttagttcattctttggcattatcagccagcgtcccttcaggctgatactataatagttacaatggagcatattacaagtacttacaaaggatttctggatatgtgggtttgtttgcatttatcaattaagtggtccaaggcttttaatatggttttgttctcacatttgcggcactcaaatatcagccatccaaggtggccccaagtctcatagccttactagataccttgacattattattattattattattattattattattattattattatttgagacagagtctcactgttgctcaggctggagcacagttgcagcgtctcggctcactgcagcctcaaccttcctggcccaaaggatcctcctacctcagcctcccaggtagctgggactataggtgtgcaccaccacacccagctaatcttttgtagtgtgtgtgtgtgcagagacagggtttcaccatgttgcccaggctagtattgaactcctgggctcaagcgatttgcctgcctcggcctccaaaagtgctgagattataggcgtgagccaccacacccttccgaaactttctaaagcatagaaaagcagatctaatatgtctcctagggaatctgtccttaaaaaaaccgaaatgtggccagcttacgactgtaatcccagcactttgggaggccgaggcgggtggatcacaaggtcaggagtttgagacaagcctggccaacatggtgaaaccccgtctctactaaaaatacaaaaattagccgggcatggtggcgtgtgcctgtaatctcagctactcaggaggctgaggcaagagaattgcttgaacctgggaggcggaggttgcagtgagccgagattgtgccattgcactccagcctgggcaacagagtgagactccgtctcaaaaaaaaaaaaaaaagaaagaaagaaagaaagaaaaaacccaaaatgtatatatttgcattctgtgttcttggctggttggtttttccttatgtaccaaggaatgtctttttcttttaaaattatgggaggaaaaagtgttaggctatggtagaattagtaactgatatccaaagagaagaatgagccaggccaacaggatatatgttttacattggcaacacaatacagtaagatgtttggactagctgttctccttttttgctgagcacattttggaccagttgcatttatttctcaactacaagcttgcagtctagtagtagagtcagaccttgatcaagtgatcatgtaaatctgtaaaggtggaactttaatgcaagttataaagaagaggcgcttgctgagagaacaccacagggccttcagatctcatcgaggagccgtgggaaggctcctctgaggaagtgaggattgattgagccaggatctgggggatgagagagggttgagtgggcaagggagggcaaagcttgcaagaacaaagggaatagaccctaaggcagtagagaacatggcaaggagagatgtgactcagcaagcaaaggagacctagggagaggaggtggaagagctacctggcctgccatgtggagcagctgcgacggagttgtcaggttagtggagttagggagaattttaaggggaatggtggagcttgaaatcagatttcctttcccaaggaagaacctggttgctgaggggatgaacatatcagaagggctgtggcagtactgaaggtgaaagtaccaaaggcttgaccaggggtaggaggagcattcaggtacaggacagtggacccatttgaaaacaatgtaggaggcaaaacccaacagcacttagtgatagactggatggatttggtggtgcagacaagggagatgtcaacagtgatcccaaatttctggctagtgtttactgagatatatgggacaggagacaggcccaggttttgtaggggaagatgcagaaatggttaggcattctgtctgaatattttacactcatacattctcattttacatctcaataaaagattcatggagggcagatccagcgcagagatggtagaagagattttatgtcttattggaaataatgagaaaacagagttgttgtgttggaaatttatcactgacttggcttgaaggcagttgtgtgtgtgtgcgtgtgtgtgtgtgtgtgtgtgtgtgtgtgtgtgtgtgttttggagacagagtctcactctgtctgcccggtggctggagtgcagtggcgtgatcttggctcactgcaacctccgcctcctggattcaagcgattctcacgtctcagcctcccgagtagctgggactacaggcgtgtgctaccacgctgggctaatttttttgtatttttagtagagatggggttttaccatgttggccaggctgttctcgaactcctaacctcaagtgatccgcctggaaggcagtcattatctgtacaaagtctctttgtgagatcccacttcccatgtcttcctttttggctacctgctgtctcatgttcttgataaagtattagtattttcataagactatcctctttttagaaacggtacatgaagtaaatacacagtttttcttgtaatgctttctaaattataagagttttcttaaagtactcttagcgtaccatttaattctaattttgagcaggttagagtttacatcaatgtttcctgtaataatagctccatcatgtcaaccttaataggcagttttgccaggtatttatatatatatatttttttttttctattatacttttaagttctagggtacatgtgcacaatgtgcaggtttgttacatatgtatacatgtgccatgttggtgtgctgtacccattaactcgtcatttacattaggtatatctcctaatgctatccctcccccttccccccatcccatgacaggccccggtgtgtgatgttcccctccctgtgtccaagtgttctcattttgccaggtattggtatagacttggtgggactccgctaaattgtttttggcctaatgaaaaccattcctgaaatttttaggaaaaaaaaaaaggatatatgttttcagtataccttttggtatatttcactgtctttttttttttttttttgtgagacagagtctcactctgtcgcccaggctggagtacagtggcgtgatctcagctcagtgcaacctccaccttgcgggttcaagtaattcttctgcctcagcctcccaagtagctgggattacaggccctcaccaccacgccaggctaatttttgtatttttagtagagatgaggttttgccatgttggccaggctggtctcgaactcctgacctcaggtgatccgtccgcttcggcctcccaaagtgctgggattacaggcatgagccactgcgcctggccatttcacggtataatattttaatggaaccgtattacaaaagttattataaaactaatcattgttttataaaaatgagtgtagacattttagtgttgtgataattttaataatttttggagaatggatcttttaatcttctttttcaattaaaattttctttcatagcatattaatcttttcagtaaagctttacctgatctcttcaacaagtgatcattctcaaatttttttttattatcatactttaagttctggggtacatgtgcataacgcgtaggtttgttacgtaggtatacacgtgccatggcattctcacatttttaagggggaatgtttgtacggaaataccacaaaatggttaaaatgaataaactcgagcagagtttcttacccttagcacttttgacatttggggctaggactgttgtagggactgtcccgtgcattgtaggatgtttagtggcactcttggtctctactcactcgatcccagtagcgcccccagcctatgtgacaaccgaaagtgtccccagatgtcttggggggagcacagtcaccccccaagggagaactattgaactagatttagtttttaatgtcagatacagattgtattttttttaagtgtttgaaaaaagatacatgcaatagcatatgctagttacatgatttttagtgcacaaaacgatacaatttatgggcagattcattcgtagtgataaaaatgtgtgggaatgatactatcaacttcaggatagaaattacctctgggtagagggaatgggaatgaatgaagttttatttttggcattttacatttcaaaaggcaggagatccacagcaaataagccaaaatattatcaactgttaaatctgaaggggatatacatttttttctgtatatttgcatgatcttttttgaactcctgtggcatatcatataacacttgttatactttttagcttttgtcatgcatttttaacttactgtcatgcgttattacataccaggttgtagacttctatgtatataagacagcttcatttactcactcatgtcaaacacaggatacaaaagaaaaccttacataaagcagaggtccaataaacatttgttagttgactgattgaaacgctctttttctttggtatagattttttgtgtgtgtgatttggtctgaagtattgaaatttagcagtaaatctaacttttagtattgacaagctatggtagttttcaaataacaaataatataagtcaagatctctaaggaatttcctggagaaatctagcttttatcactgaatatcatggatggtattttatatttctatagtacttggcaaatgcatattagctctgacctgctatagaatgtatcctgtgcttgaatttcctcccattttataattttacttataatgtaaaaataaatacttttggactaagttattttggaaggtttctacacagtaaaaaagataaagatggaagtaatgaaatacttgcctgtacttttcagtgtataaatattataacatattattagaaaactattttgaaatgttcattggtgctaacatttctcttcagtgatgtgtgtgtgtgtgtgtgtttcagaatcactttctacaacaaaatttacatacacatggcttgcaaagacagtatagcatgattatggttgagaaatggcattcagaatcagtcttcctgggtttaaaatctcagctctgctacatcttagctgtgtgatcatgggacaaattatggaacttcattaaaactcagtatcctcatctgtaaaatgagcatgagatctcctcagaatgatgatttgagaattaagtgagataatccacgggaagcacttagggtggggcttggtgcaagagtacttaaaaacaataacttaaaatgaagcttactttttctgggaccatactggtctataaagtagtagtttcccagcctggccaacatggcgaaaccctgtctctactaaaaatacagaaattagctgggcgtggtggcgtgtgcctacaatcccaactactcagaagactgaggcaggagaatcgcttgaatctgggaggcggaggttgaagtgagccgagaccacgccactgcactccagcctgggaaacagagcaagactccgtctcaaaaaaaaaaaaaaaaaaaaaaaagtatcagtttcacttgatcttagccagaaggctgagaagcgataaagtagtaatttctgtgtttgtagggttttacttatgctcagggagcagacaggatatttgcaaataaaacgtgaacagaaatatttaaaatactttagttatgaagttatattccctgctatttggatgatgaaatgaagaatttctcccaagaaagcacttcctcagagagcaattagaaaatgaattgtagactatagatggccctccgtatcagcaggttccacatcgatgaattcaaccatctgaggatcgaaaatattcagaaaagcagacaaacaaaaacaactaaaaatacaacaataaaaaatacaaataaaaataacagtattacaactatttatttgcatggcatttacattgtactaggtagtataagtaatcaaaagataatttaaagtatataggcgaatgtgcataggttatatgcaaatactgtgccattttatgtcagggatgagcatccatggattttggtatcctcggggatcctggaaccagtggccccctctatatcctcgtagatactgaggaataactgttataaccttttgaaatggcttaatccgtgaatagtagaataaaagagtattttattctgttctgtttcatgatacctgttggatattttaacttagcaaaacatttgaaaaataatgactcctgcgacttccttatacagtatatgatcagtttaaagacttcactgttccagagcataattaagttatataactgcattttaaaatgacttagtaaattgtatggctgttaataccaattagttgctttgccagaatcttaagtaaggcacaattaatactgggaataaaacaatgacccagagctttagacagtcagcaacgcaagtgagttgatgattataagtctgtctagtatgattctctagtgattgaggcttgatttttatggggtagagatcttgagaatattgaaggaactgtaggctctccagatatttgtatttgttagtactcataacatttattttttattctctttctgattttttttttccagctggggaaatttattctgggaaatgtgaaatgccttgatatagtttgtttactcatggagacagtagtacaattcaggaacctttatctaaagttacctagtctctctgtttgtgttccaaagtacataatacaattctaattttaaggtagaattaagggtgaggcatggaattatcattaataaattactgatatatttgatcacattcttagtttattgcttaagatgtcggcttttaaatacttcatattttaaataaagacactgaaacaagtaacaaactatgcctatcttgctaactacagctggtgacattctgttgcagacgttgtgggggcaatggtatgcttttatgaataaattaaattcaaaacaagtttttcagagttattttttgtatgtttttctctttgtctacacctttattatatatcgcatctcagggtggtggtagaataagtaataaagcttggcgtgttacttcctacctctccattaaatacccacgaagatgttaaatacccatgaagttctgcagattaagaaactaaacatcgaagattgctagcaaagtccagggagaattaattttattagcaggactgggttgaaaacatagtcttgaacatcatgctgttcatcctactttgtgaacccaaatcaggccagatatccaaagggagtaggaaatgccttggacccatgctcacaggaactgaaaaataagcaaccatctcactgaggttaactataatctgacactgctagagctggagttctcactcccctactagcctgcattaacatctgcatttccagatctttgcagagactaaaatgtcctaaatatagtaagggaagaagcaaagaaggattggaaaaagcatgtaccatcctaggattcggagtccccgtggcaaagtgtggtgaaggtaaagggaagggaacaggctgtgcttggaaatgtggtctccagaatgccacgaggtaaacagctaatgaatggcatgtgctcttctggcttactcagagaaccctgcccaggcagtttagtctcagaccagccaaccccaatgagaaggatgtgtgctagcaagccaggttctaaaatcaggctggggtgcatcagttcatatttgaagttcaagttgaggccaaatgccagtcctggtggatctctttccatcttagtaaggatgaggttttttgttttgttttgttttgttttttgggagatggagtctcgctctgtcatcacgctggagtgcagtggcgtggtctcggctcactgcaacctctgcctcctgggttccagcgattctcctgcctcagcctcccaagtagctgggattataggcacgcgccaccatgccgggctaatttttgtatttgtagtagagatggggtttcaccatgttggccaggctggtcttgaactcatgacctcgtgatccgcccacctcggcctctcagagtgctgggattacaggcatgagccactgcacctggccgtaaggatgagttttaaagggtggagcagagaatacactgaaaagatatgggaagagaaaacatggctgtgaagatttacaagcaacacatggttctgaaaatgaccttttctttttttttttttttctttttattattattatactttaagttttagggtacatgtgcacaatgtgcaggttagttacatatgtatacatgtgccatgctggtgtgctgcgcccattaactcgtcatttagcattaggtatatctcctaatgctatcccttccccctccccccaccccacaacagtccccagagtgtgatgttccccttcctgtgtccatgtgttctcattgttcagttcccatctatgagtgagaacatgcggtgtttggttttttgttcttgcgatagtttgctgagaatgatggtttccagcttcatccatgtccctacaaaggacatgaactcatccttttttatggctgcatagtattccatggtgtatatgtgccacattttcttaatccagtctatcattgttggacatttgggttggttccaagtctttgctattgtgaatagtgctgcaataaacatacgtgtgcatgtgtctttatagcagcatgatttatagtcctttgggtatatgcccagtaatggatggctgggtcaaatggtatttctagttctagatccctaaggaatcgccacactaacttccacaatggttgaactagtttacagtcccaccaacagtgtaaaagtgttcctatttctccacatcctctccagcacctgttgtttcctgactttttaacaattgccaaaaatgaccttttctaacaaaccaataaagttaaggcatctgcttagtctcccaaaagaaagccaggaagatatgacctctacagagagtgaataagctaaaacaaggcaaaaaatgcagaagttggctgagataaggacaagtgaaagaagcctaaaatggataaaacaaaattgtttagcactttcgaactgattaatgttcgtttactaaatgtttattgaacacctactatgtgcctgctattctaggtgctgatgatgcaattgtgaactttgcatactaagtacaaaaacttagtacaagactaagcaattatgaaagatccaacctagaagttgtaaggtttgtggtggaaaataatagaaaaataggagtaggaacaacgtttaaggttgctataagaagactttcctaatttcattgatttccaggtattattgattcaaaaaatacacacacacacacacacacacactcctctaaatatattccaaataatttaaaatttttatttcaaagaaaaggaaaagtcctaacagtatttaggcagaaaaaaagaagtgatctatattggaacaaaatccaaataggcctcatacttcttttctactacaaataccagagactgtcaggtcattgttccccatttgatgccttatgtgatagtattataatttctttatgttagaaaatggcagcccttctttttagacccttaattttcttcttcttggaaaaatatcctagtatatagattttgttacaagaagacactttattcctacctgcattaagttgctttaataagcatacagactctggtgtctgtgatgtgaatggcattttccagggctttatggtgcacttaagcttccagtgactctgaagaataaaaggttgccttcccaagaattctgtgcctatcaagttgccatgtatacgtgaagatgttcaaaaatgcaaagacttgaaaaataggacactttgtcagaaaacctttcaaagatgtgctctggctgagctaaacatgaatgcaaatcaatcactcaaatatgtataaaccatacaagaaaaggactggtggtaaacagtgaaggaaactgaatatgtaaaaaaaaaaaaaattatagctcatgtatctataattacaaattaaattcaacagtcaaaccctcctctcaaaaataaatatatttaacaaaatggtataagaagaatcagtgtcaataacctcagattaatttaaaacagtttaaggtcacaatactttaaaaactggttctgacataagaacaaatcagtagcctatactagactaggctagagtccactagaaatctctgaaagcacatctagtatctatatgtgaggatgctaagatgtaacaactaaaaatttctggtaaagggtattgggaaaattgatttagtgtttagaaattatattaaatctggattccctcaacatgtcatatattaaaataaattacaagtgaataaagatttaaggaaagaaataattaaaatatcaagatacataaatgcagatgaatattaaccatgctcaggctaagtaaggactttgagcacaaaagtaatggacataattacaaaggcctatatcagtaaacttgactatgtaataatttatattcaacaacaacaaaactctagtgatcacaacaatctggggaaaagatttgtaacagaatttgtcaacaagttctcatccatgaatcaacaagaaaatattaaccctagtggacccgatttcacttattaaaagaaagcttctctaatctcattgaatgccagagaggtttttttaaatgattttattttgctttggcagtgggtgtagagtaaatattcttatacactgctgaagggaactgtgacatgactttttttggatgtcagtttgtcattatatattgggagcctttaacattcataccctttgaaccaattatatcacttatagaatttactctgtggaaataaagatgcagatgttgaagtatgttcattaatagacttgttaaatagccatccatgaaaaatggtggttttaaaaataacagcttgaaatgttgcttacataatatcaagtgaaataaaaacaacatacaataagatgtccaatattactactaccatttgagaaaaatttactggaagaaaatataccaaaatattaacaagggttaattttgtaaatgtcttctctatatcctttttgtaccctttgtattctttttgtgttttctgtaatgagtttatattatttttataagcagtttgaatacatgtgaaatgttaaattctttccagtatcttctcttaattgcatgtgtttttcactaaacactgaattggtttaatgtagaaaacttcatctgttcgatttcattctttaagtaaatacataaaccatatcgggggaggcagagaaagtgagttttgaggagagaggattttcatggtattcttgaaaggataaataaaagaatacacattttatttgacccccattagccatctgctttatacagtaaattgtgtttatgagatgccagagaaaaataactaatgaatttattcaaggtggtataaatgtgccagttacaaatttaaatttgtagtcatatcagtggacagttttgaactgagtaagatcttttataaaatcagacaaagttttaacgcttaggatgcaatgaaagaaatgtatgtgggagtctttcagttagaatagaatataagatggaacactacctggaacaatattcatttgagatgtgcgcagtttttctctattcctggaagctacatctttgttctgtgagaaaagcaagaggaggttcctgatatggtctgtcctttcagttatgctgtaggtagattgctagctagagccatttgaaaaggagcagggtaagaacatgatatcaatgtattatgggagagtagcatacatgaaagagtcacctttgtactacgtgggataatattccagctgataatctcctgcattacttaaaattggcagttcttccttcccaataataaaatacctggaagaaggagtttctttaagtcagaagatccattaatgtacaaataagttgtaccctatacatacaagtaagttgtctctaccctacaatcctgttccttcattaaaaacaaaaacacagtacctttaagaagtatctttttcctccataatttatagcacttgcctggtattgtgtttaattttaaagtttttgttttgatgcagggacaacgttttattaaatattaaaagatttgatctgaaagtgtccccacttaaagtaaaaaagaacaggcctgagtcattcagaaggcttttatatgacatgttggctttgaagaatttgtattaattattttgccaaaagcttttttattccttttatagaccagaattgaataaaaattgtttagtttagtggtacttagttcttagcatttccatttcctttccagcccttgttttctttcctcccaaccaaaaacaacaaaaaagattttcatattttcttttaaagcagaattctgttatttcttctgttcagaagagataagggcaggacgaaggtgatgattggtatttggtgatggaatgtttatctcactttggatttgcagtggccatcaataggggcgagctggtgaaaattagatatgcttgttagcattctgctaccagcaactactgtgtattggagaggccctttcttggtcttagaaggccaattaaaatgtgtctctggacttcagagggcagtacagatgacagtctgacactcatcctggcacttttgagtatcctcaagacattgacactaatgatttatgagttacgcatattctgtcaccatatctgctctttgctccacaccctctccctttctcctttcccttccttgacaatgtttgtggggtgataagaaagagattttggaaccaagaaatgagaggtggcgggggagaggaagatgatatatttttaacactctggcttcttgctactctgtcccagaatatacccccaggcaactggaatccccagtcggaaaaacactggagaatgactttccttctgcttcttttcccttgcaggaaacacatgaaattgtggcgatcaagaaattcaaggacagtgaaggtagatatatatatatatatatatatatctgtatatatgtatttttccttctgtataaagtttttatacatagagtgtggaagaagtgggatctagctggtcagacactgtctattcctgatattttgaagtcacaatctcagaaagtgaatatagcttatttcttatgctttgctttcaaacatttagttccttttatgtgaatcttttcaaatctcatgatattagaaaattcatctttttattttaaggttgcaagcagcattggaaatcttgctccaaaggctggttagaaggcatgttgtttatgctgtttctaaatattattaaaataaaaaaactggcttcaagtaaatacttctgtgggtccacataaatagcaagtactacatgaaagatttcagtattggttacggtgatctccagctcctagtcagagttagaaatacaaggatatattgagggattgattttatatttagaataatgcattgagagaataaaagctttttaagaagaaatactatgcttaggggccttcatcacatccagaccatttcagacagagttgtaaaattaccccatgctgggcaagaaagtttaaaataatgcatttcagtagttcattagttttaaaatctagactgttggccatccaaagatagccaaatagagaaactgataacaaaaataggtatggcctttaaggtgctctagacaacatttttttcagactttttggactgagacccacagtagaaatatatttcatatcctaacccagtgtccgcacacatatgtaacactatatgtaaatgaagcaaaaatgtcacgaacttcatcttatgaatgtgaagctctctactttctgttctttcctgttcatgtaaatgcctattgtgacatcaaatggattgatttcactactagtaagtcagagcctgctatttgaaaaactatggtctaagagtaagaagtaccaacacagcatcaatcttcatatctaattagaagtgtggaaatagcagtcatagcttaccttcatcagcacacatcccctaagtgatgtaagacaccagcctctatatttatgaacagtttcatcaccctcacctcaaagacttagcaaacattaaataacaaaaagggacttgctccaggatagatgtagtagtatttgatgtaatccatctctgatgtgctagttatatgaaacacatgcatatcagctgggaactttagcagtcattgtatgggcaggcttaaagggaaggtaaaaagtggaaggtaaaaaagaactttttgcttgttctggggggacaaaaaaatcttgcttcaaatgggatatttgtggtctagcaggaagcagtagctccaggctatcccactgtgataccattggaaatgagctctttgagcagtgactttgggtcagcaggtggctgagagacaaatggtgatttcctaaaaagaatggttgcaacagtagatcaaagcacaaccttcgcatgcatgtaaaggcttctggctgtgcattcatctttcagggcatattggcaagcatcagttaccaccaaaaataataactgtcatcaaattttgtaaaaagtacaatctaggccatgtatgccacctttttttgtttatgagacagggtctcacactgtcacccaggctggagtgcagtggcgcaatcttggctcactgcaacctccactccccgggctcaagtgattctacagccacagcctcctgagtagctgggattacaggtgtgcgccaccatgcccagctaattttttgtattttatttgtagagacagggtttcgccatgttgcccaggctggtctcaaactgctgagctcaaagtgatccgcctgccttggcctcccaaagtactgggattacaggcgtgagccaccttgtccagccccattactttctttttaagtaaataccatgttctttataatctctgtcttgtgcataccaattcttagcttcaattatatatttttacctgtgttaatgatacctttagagtggaaatctagtgtatccgttgaaattcattgagcactgagtgaagtgctgtaagagttgaggtgtggatactttcaagaagcatatgacctattaggagaattaagacctgcaaataaataacaataaaacacagtagaaaacagttattgcctgaatggagacatggaacttggatcattttgaggtgagagaaactgtttctggacgtggtattgggagttcatgaatagtctagacgtggaagacatttgatctgcccttattttattgaaccaacaaaacattaatctgctctgccctcatctctgccagacccttatcactcaccatccctcagaggcatgcagccttatcacccaccccaccttgtcaatgacacctacgtaccacctacacatacttctagagggatacttccaaaacatttctgtgctagaacccaaaaacataaccaattattcataaactttttcattccagtctggcccacttacctactgtttacatttctcccagggagatactagtactctcttttttctgtctttacccttttcctctggctggagtagtgtcttgcttaatggaaaaaagggtacatgtttggtgaacaactcttttggagtgtgaagtgtatatagatagtctcattcaggtaaggatgtctattcaacccctgggtaaaccatttaattctcaatcagtttattaaattttagccaattataataaaaaacagtgtcgtgataatattgccctcattgtcatgtagctctcattaatcccctttattagttattcttgaaatattcatttgatattatggcagtgattatctagatctaatgtttaaaagtcttagtgaagataacgaaataatcctgtaaaaatattgttaactgaaataggatctgcacttggtctgagccatgttcaaggtaatccagtgcagatgctccttgacttgtgatgaggccacatcccagtaacccatcataagtggaaaaaattgttacgtacaaaatgctttggctgggtgtggtggctcacacttgtaatcccagcactttgggaagccgaggcaggaggattgcttgagccaggagtttgagaccagcctgggcaacatggcgagaccctgtttctacaaaaaatttttaaaaaaattagccaggcatggtggtgtgtgcctgtaatcctagctactcagtaggctgatgtaggaggctcgcttgagcccagaaggttgaggctgcagtgagccgtgatcatgccactgcactccagcctaggcaacagagtgagactctgtctccaaaaaaaggctttactacacccaacttaccacacatcatagctttagcctagcctcctttaaacatgctcagaacacttatgttagcctatagttgggcaaaatcatataacaaagcctattttatagtaaggtgttgaatatctcatgtaatttattgaatactgtagtgaaagtgaaaaccagaatgattttatgggtattcaaagtatggtttctcatgaacgcatatggctttcatgccattataaagtcaaaaaatcgaagtcaaaccattgtaagtcgggaccatctattctctcactgatatcacggaatattttgtgagaatatatgttaatttctggtagctttaaaagattatgctaatgtcctactttcttgttaaattcatatatattcacaaatttataaaaaatgtttgtgaaactatattttgttagactactatttagttcaagaagtctttattatcccaggatgatagatcactatttaaaatgggaatcaaaatttcatagtaaataaaagtttattttgggactttaagtggataaaatgaaactaaaattatgaaaataagtttatagttaacacaagttaggttatagtagtaactaatatgctatttcaagaaagaatgaagtgttaacctttttgggaggaggaacagtttttacagtaaaattgtaggctaggccaatgaatagcttctatagtaaagagggtcattaagaaatatacaaaaagctttgtcagttttctcttcttcttcttcttctttttttattcctgtctatgtgtcttctttttcaggctgtgtgtgtgtgacagggtcttgctttgtatcccagggtagagtacagtagcatggtcatggctcagtgcagccttgaactcctgggctcaagcagtcttcctgtctcagcctcccaaagtagctgggactacaggtgcgcaccaccactcccagctaattttttcattttttgtagaggcaaggtctcgctatgttgctcaggctggtctcaaactcctgggatcaagagatcctcctgcctcagcctcccaaaatgctgcgattacaggcatgagccaccaagccttgccttttcgaggtttttattttctagttgttagcagatacaattctatcagacaatttatcagtgtctttgcctgtgattctctctgaaagactttgacaccctgacttggggatatagactcctattaaaaaggaagaatgtttgagtaatgaaaaattttgtctgagcttacttcattagttaattttttcttgttttgatgacttctgtttgttgacccttcataaatttggagtctgtgataatgagttctttaagataaccctaaatgatggtattataagtttggctattaagttcctgcagagaaattttatctagtaaacacctgaccaaccagaagtctccattgtattcgttctgctcattgtaatagttctgctcattatttggattttctgagaagggaaaaaatgaccatagatcataaagatactagagattatttagttaaaaggtacttttcagactatgtataaattataaatttagtccagttcttctaccctttctatgactcccatcttctacagtgagatttgatgttcagatgataatgtatcactgttgttttgtcaagacaagtacaagtgtctgctgtcctcaatttattaaataacccaagagcgctgatttagattatatagctttggaccagcaagaattcaaaatattgtctgtccagcctttactttaggaaaacctattgtctagaatttatttttgacatacatttggaccttctttttgcttctttagacttttccatctttccttaaatgtaaggtgatggagtgaggggagagcctctctgcttgtcactgggcctctgtgcatggcaaggaggctgactccagggagctatacactagtctacatttaagatgaaacttaggttgtgtctctgcttttatataaaataaaattacttgcatttcgtattctgctgaatgttttctatagagaactattttcctcttggaatggacatattcttcttaattattagaaaacatttaattgatcatctgttctgtcttctaatttattttattcttctgtttacccagacactggaaagctctatactgatctctggatcaggagtactctggtctcttattttatataatggtacaaaaccagagttcgtaatctggagtccttaaattcaagagcctgatttctgtgtgaaagaggccttgaaacaaaaagtccaacccttgattaaacaaataatttgattaactgagcttgagcattctggctagtcatgattttaccacacttccttttcatgttcaacatggacctccttcagacttcagggattcttctaggatttggtgatcattttgcatcttctgtgatttaataaatttctactgtgcttttacctgttcttcatctctaaagattggagggtcctcatctttcttggtgtatgtaacagtagcactagcattcaaactccctcagccacattgtctgtctattgatgtcccttcttcaataagagcaaccagactcaaatatggtacccccgtggttttgatcaaggatgggttgatttttctttatcagtttatctgtgtaaaggtccatttggggtggggggctctttggctatacaaaaatgtcaggtttgtgatttcacaaagtaggttacagctattcctggatttcctttctaagcccacagttctttaaaaatagagttacaatagagtttctgctcatctttagatttttctcttttcatcagttatctttgaatctcctttgctcctgtgatctttcttcttaagaattgttctctttagcaaatcgctcttgatttttaggtgtgttaacttgccttactggtaagtttagaagtaggacagtttttgggttgtttttacttaacatcctttttccaccctgccattttgtcctcactcagtggggtttctatatatctgcacataactttgtcagagttgatcctgcattcagctaaaccccctcagtggtaactgatgacaagatgggtcagcatgcacataagcagttatcacatagaagtatggactcgggaagagtccttctgaataatccagtataactcagccccagtatacagatgatggacctcaggctcaaagttgcatagcgtgtatgtgaataattgcaactaaaatgctgacccaggatctttgttgagtttttcttccacccatactatgccgccttgccgttcagctaaatggtagcatagttatacctgaacctgggtactgtgactcactttccaaaactcactgtattgtatactatgccacctttgtgcctgtgttctactcagactatgaggttgaatatgaccctccattcatgcaccctgagaaagttatcctttctagacttgatttcttcatttgtaaactggagcccagccttgataaagaatcctagcctagacaaagaatccacggggattatttcaactagatggcagtgatttttgtgctcatttcagtgggctgtgctaccaccctttgaaaatgccttactgaatgctttttgtaaggcattttgtaatgccttgcaaaatgctttcctactttgtgtacctctgagaagagaagcctgtgtaattggaatgtgccttccttctcccctcatctgataatttagttgacagttttcatcataaagtgcagggcaggccaggaaccttcaaagtacttagaaaaacaaaattataggatgtacccagtaataatgaagagtgcccattttgcttgaatttagggaattaactccactttctgcctgttcccattcattgcaatcttagtgctcaagtgtttacctcaacttttaatactatgactggcataaagtagaaaagcctttatttcctaaaaacagctgctccaatgaggttgtttgggcactacattctaggtaattttgtgtgctgctttttgatgattcatttatcttctctaaccattgttaagtggagtcaatacagattcgaataatgtatgtataacaaagcagccaagttccatgaggtttaggctcataatcaatacaattttaatgaaaagaaataatagattattagacttgaaaaaggcaataggatttttgggagatggaggcatttatttgtttcttttactgatgaaaagttaagtggcttgcctaaagttgcatggtgtactgttagttgattaaaagaccgagtccagaatctaggtctccctagttagtcctggtccactgttccttctactaaaaccatcctgatgcagccattctgaagagggtttattcattagcaaagtgaaactgccacaagttggtaataaataatagtacgatgttttttcatttgcatttccagtaccaagaattcacaaagcatcatagtttatggacgctcttaatgattttatttttatttaggtatttgtgtgcatgtacttgtgtgtgttcttgaccctgagcactgtcagtgttctgtatcctccatcatttctaatcacatactgtagaagacacctagggacagaggtgaatagggagaagagaaaattcagtttatcgtactgcctgataagcggtgcttgaggaaattgacagtgctgtaagaaaactgagaggcaaagtgcctattgtttgccctcccgttgctgtggctgaagtgaggaagagttacgcatgtatgggcagagatttccttatggccacaggtgaagcattcatgtaggaagaatgtattgatcacctctccttgtgtcaggtacagtcctggtgtatattgttgaacagaagaattgagtcctgtcctccatgagctcttgatttagcagggatggctgcatagattgcataccactaagcaaacaaatatatcaagaaaaatggtaagaagttctgtgaaagaaaagtccagaactgtgataaggaataatggggatggaggcctacttgcttttgtggtctgggaaaggctctagaggagtgatatttaaactaaaacctgaaggagcaagccctgtcaagagcctatgtagtagactgagcattgtaggcagagggagcaagtctgaaggccattaaggtggaaaaatgaagtttggggctattttgggaactgaaagatggaggtgagggagagggacatgagatggggatggaaaggcaggcacagaccaggtcatgagtaatcagtagacttgtctcttgttaaattagtcccttgttagatcatttgtttcttatttgagatctgtgtgttattctgtttcttagagatagatggattttagtttgattaccccaaccttgagtaactcagaggggatattagagaagcatgttctcgatcttgcttctttaggaaactgccggtgttcctgtgcttcagcagctgcagctaccttagcattctaacagtcacagaacaccactgttctggctcacccccaacttgcagaacacctggacctttgtcccctcccaatgctctaagctactttgggatgtccccgattgcatctcagacattcccccactgccaggtgacatccactgtcatgctcttttccctgtaagtacccagttccctgttgactgccttggtgtgatccaggtaattcgctgcttatgccacagttggcctttcctactgctggttcttgtcttctcataggcagtatctctcttggtcctaatctgtgttccagtgttctccaacagctttctggctaaagtagaatacttcatttatgtaaccagttcacaagggagtgttgactccgtgttcccagtttgttatggatactcgggtgctacaaagcccttgcttttatgtcattcccttttctttaaactcagtttgagttgggggttgggaaagggggctgggatagaaaataatctgaggaaacattcctgggtctgcatttagaatcttccctctccctttggaatccattcagcctttttcctcctgcgtgccttggttagagagcctttcttctagagggcatatcaagtaggcttccgtgcccctatctccacactccattttcctccttctcacactgaaagatgtgtctaatcctgagggtcacacagctctcaagctaggattctggcccttacccaaaagcttgtggctacatgtgttttagacttcataatttttggattttagaatggacgtgtggcatgttataatgcacagcactcagtaatcaagtagtatttctatagcacaacatatgaatgttcatattagattggataaacaaagactttatgtagtctcctgtcagttcaggtgttacctctcagtgaatttgccccaaacttagaaaaagctttcagtttttagactgtgttttggattttggacttgcagatgagggattatgaacctgtatcctggtacatacatgcaaaaacatggtagttaggatttcccgggtaaatctaaaggtataataaaaactaatttaaatagaaatattattttcatcactcccctgccaattaatctattagagttaatatgacttctgtccttcctccataaccacggagattatcatgaatgaagttgatggtatggaagagggtctattggttcagcataagttctccatcccagaacagctacaccatctgggatggacagatggacatgccacagggaggacagcaggaacctacagcagctgctgttcagagagaagattagacactctcagaattccctgcaacttggctgtgacttgaattgtggatgcttggcgcatgacctctgctccctgaggtgactcatgcagcctgaggaataaaatgtttttttaggccaaagtttcaggccatccttaaaaacatcagctactacagatgccggctgcatagaggttcttctgcacactgacagttttgattccttatggcccttttaatctctttccttccttgtatagagtgttatagttcagatgacaatggaggcatatgttgtatctataagtgtgtttttatacatacacgtagtaaaagaagtataagaaaatttttatacatacacatagtaaaaggagtataagaaaatataagcaggaagtcaagtttgtgctgatcaagtaaaccctttcttcgattttcttattcttgatcctttcaacaagaaaacgtgttatttaatattccattcttgtacttcttatgcagaagtactcaaagcagaaggtgaaattgggatgttttcagtgttcttggaattctttgaatagtagcttgaaagttttcattttagtctcttcaccattgtttacattctagaaaatgaagaagtcaaagaaacgactttacgagagcttaaaatgcttcggactctcaagcaggaaaacattgtggagttgaaggaagcatttcgtcggaggggaaagttgtacttggtgtttgagtatgttgaaaaagtaagtcattaattgccaatgtgcacatttgcccgattcttttatttaaggctgtttctgacattatttaagaaagtactgttatctaatatggcttatcaatgtactcataatctgaggactttaaaaatgaaagtgttgttaataatcattagaaattctgaaatatatttaagaattttgtacaattaaactgtatagagataatcgtaagtttaaacaatatactgatttggcttctgaagtcttaaactctatgttcaacaagtaatttttagacttgacttaactaagcctaaactgagggagaaactggtaaactgacagtgatggtacaggctggaagaggctgtataagataccacactgaatcagacctaggctggggaatgagtgggcccaggaagcagcttatgtgaactgccaatgctttggctttatttgagggaaggagctgtgccaggaggcctaaggtgaggcttgaggtggtagatgagaccgtaaaagaaaagcatgcattgtttgagctgtctacacttgccttagcttgtattaaaaaatgttcaacttgttggagacaattttaataacatgacctaagggcaaatgtatgttacagtaatcaataatgtgtgcctagaaatttcttggagaggggcctggtgcagtggctcacacctgtaatcccagcactttgggaggctgaggcaggcggatcgcttgagcctcaggagtttgagaatagcctgagcaacatagtgagaccctgtctctaaagaaaaagaaaaagagaaatttcttggagagcagctgacctacagcagttgttatggtcaaaaacttaaacagataaacactttaacagtagtagaagaaactggagtggggcaaacctttaagcaagttttcttgatgagtaaataggtggctcctgccgattcctatgctgttgtccaaagaaggttgaagtgggagaagtttatgtttgctgcaggtctatacccaggtgcttgctataccataaatgacagagtatcaacattgtcataaccaaatggaaagcagtattgccagggtaactgaccagtaatgtggctttgaatgcattcagcctttacaaattgttttttgaaataaaaaaaaaaaatacatgtaataatttccttactagaaaaactggaacggtactagcaggttgtttgtaatcttaaaccactgctttatgttccttttccagaatctgttttaagtttctttttctgtgtcaacttatacattcctctaaggtaccttccacaccaaaataaaactaaaagttttttttttttttttaaagttctattaaaaaaaaaggattgctgtattaggattccaggggaaaccagatgctctttattttttaaaaactttttagagatggtgtctcactatgttgcctaggctggagtgtagtggctattcacaggtatgattatagcacactgcagcctcaaactcctgggctcaagcaaatctttcacatcagcctcctgagtcgctaggactacaggtgcgcgccaccatgcctggctgctttttattttttcattatcataaataatcatgcagtttgtagttttcactaccaaataagaaaattttgacatctcttagtttatcctttttatttttgttctattcatggtggttgttcattattaataataatttaatataacaaatggagaagtcacttctgtgtatctgtttcctcactgggagaggcaattttgtgtgtctgagatctccctgctggtaaatggctgagctgctactagaactccagtcttctgacagtcaggcctgagattcttcccccgatcctgtggttcttaggtagaatgtgactgtcacacctgccacattagtggcagtgcgtcataattgacagtgagtctcaggagagcaaggagaaagttctctaagggataagggactggtaacagagacccaggattgcagaggcttaaaatagaagtttctttcaccctcacatataaatacaaaggtagggcagtacaggactagtgtggcagctctgctccaccacagcgaggtgtgacccttgtcctcaaggtcaggatagagttccagctgtcatatcccattggccaggacatagttgcatgaccacattagctgcaaggcagaagagaactgtactcttcgttctgggcagcacttgaaaattgtgttcctgcggagtaagggaagactggatactggaggacaatatgtctgccactgaggaatttagaatagaatgtgaaacaagagatacaatttgttttctatattacaaagccttcttattccacctgtgcatttgggaccatctatgaatttgttaattgaaaaagagaattcaaatggagaatcaaaaaatgatgcatacatacttaaaatgtttattttaattggaaacataaatactgtatgtattcatttaccacgctataaaggtagggtcaaggccttttgcctatcgctcttctgaagttctgattggtcttttttacatacatcatactcgtaatgcatctttaaggtaaagcaaatgtgcaaaaacatctgcaaaggaatctcagtgcagaatccttcaattggacatgcttatccccactagcacccattccttgccagtgttttgtagttgtctcacatttgattagatggcaataagtttagtggcttttcatttattaagcctttctaaagtattcaactttgttttcttataaacaacaactctttttttaaaaaaacattatttcatttgtttatatggtatttaattatattaaaataacaagtgcatcttttataaataggcatgggagtaaatacaactgattcttgataggtatacaacttgactggtgggaacaaaactgtgaggccaaattagagcagtgattttctgactggtcttatggccccttcacactctgaaaattattgggaaccctaagaactttttatttatgtgtattttatctattagtgtttctcatattagtcatgactgagcaatataaaaatattagttcattttaaaataacaataaacgtattgcatgttaacatagataagtttgtatgtcagttattctttcaagtgaaaaatggcattccacataaaaagcagctcattcagcttgcatctcaatcctctaagtgcttttcctcaggacaaccattggacagatggtgcatgtgcagcagaagggctttatgtgcagtctgccattttatcatgcagattccaaaaaagacatgtactcaagaattgaaatttagtcaaagtaatattttgtactgcttcatcaaagatgtccttaactaaaacgtctgttttcttttttaaaggcaaggtttaattggattaaagaatccaatgccttgattcatgctgaggtgccagcagtttacccattgttgctttgtaccattagtgtaaatgccaacacagtgaaaaaggcaaacatcacagtcttattatgaatatagttttgacttcatgggccctccgcaagatctgagaccccacagatccacatgttacactttgagaactgctgtcctagatggttgcttacaaacaataagctgtgattgtaccacgggccttgtactttacagtgagaaaggagaatggttaatctggaaattcagtagagaccggctaagtggaatttctacataataaaaaattttgcatgaattttagttataatggtctctgactccaaattaaggtttttgaatattgaattgtagggggtctgtgactctttatttcaatagtattttctggcctgtttgaatttttgtactaaatgtattgatcatttttaattttggacatttttttttctactaagaatatttcgtggatcttccaggtgtattttcaaggcttgatttttatcacaagattctgttgcagagatacagcacactgtgtttaaaaaggctctttcccccctttatacattacagtgtcatatttctactttgtattgcttttctcttctaattattctaaaataatgcctgaaaacctttagggagagtgaaaagtatacagggttattatttggggtagcattagggaatagtaaaaatggaattcctcataaaagaaagccccaattttaatgctgattcagcatgagaaagttgtagatagaaagcaaaacaattaaaaaaaaaagctctgtattggatgaattattctagatgctttgtaaaattgttaatacataatttacgggcctacctaatttgggaaataatgactctatttaatttttagaatatgctcgaattgctggaagaaatgccaaatggagttccacctgagaaagtaaaaagctacatctatcagctaatcaaggctattcactggtgccataagaatgatattgtccatcgaggtgagtatgagatttttaaaatggaaaatattaaaacatcaaataaagttaagagtatttcacatgttactgtctttaagaatattttcataagcattggcattgccatttaaattaaatatattttgaaagtgcaagacatgagaaatatttgctctccatatctccttttctatcaccaaaaggatggattacaaatttatttggatattgtggtgagatctttacatttgtataactattatagatccactcccaattgtagaaatgcctagtgatataagagaactcaacaaatgtgaactttgaaacttacttggggataggagaagagcaaaatgttgatctctatagccttggtcctgcaggtagaccaggtaatgtgaaacaactctgaatcaggctttatataggtggttcctaagtcactggcccctattggcactcatgtctcattccttcttacaccaacaatctccagtatgtatcttcacctcctaattttctctaccccttagtgaaaagtgcccgttgtctgcagttgcaggcatgatcaaccttgcataaaggtcataattatactcccataaactgttttgtcctttactgccatgaagtgggtggtttatagcaatgaaagggaaattacttgctcagcatcaactttgtctcttctcctgataatctttcttgcactggagagttttacagtagtgggacacaaattgatacaacaatgaccctaaatatttatttaaaaaattgcagtatttactttttgtctttagattagcagataaaagaatgctacattttaatttacctatacacaaatgcacaaggatatcactttaaaaatattctcacttgtgagaatagtttaaaggtcatatgaagaatgccatcgtcttttattcctagaaacagtttatatttctcttgcatttgactctcatagcagttaccttatcaagattgttggtagcatgggtagatctccacgtcaactggacatccagtgtctagggtaatgattctagtaacagtctatactgtagtttggggatattaatgaggagccgagttaggtgcatttccatcatgatactgtgatttgattatgtgcatagtgaatcattggttgcaaattaatggtagaaaccatgatttgaaatctacagatttcactacctctgccctttctccatttgcatctctaccatatgatatagatcatgggtattctactctaaaaatacaattgcgagatgcctcccaaggagagaattcaactgcattttctgtgaatttctacttaactcccaccacatcttcataacatccatggaaaaaattagaaatcttaatttgactcatccagtatggcttcagcattagacattgataattgtgaaccatgcagaaaagctaaagagacgtaaatatagaaattatgtagaagaatgtaacagaaagcatgtcttgtatgtcttctccagtaaatataatgctagctacttattctcatgtatttttaaagtatcttgtgggtgtaaacattttatatttctatctccaaaaatttgtattactagtattttatgaagtaataataggtttttgaaatgtgttggcctatatttaattattcttaaaattctttcagagatccaactaatccttttaatacttaaagaggaaaaaaatatttttgaagttgtggtctgcatgtttctgagaaagaaattcattgaaacttttatgtaccagcataaaatgtgttactttatttttgctgccacagttttctattcaaattactctagatatttctaattagatgctattacagtgatctaacagtgtcaatcaggagaacatagaacatttttactaattttttttttatcttgacactccagatataaaaccagaaaatctcttaatcagccacaatgatgtcctaaaactgtgtgactttggtaagttaaaaagaaattaagtcctggtacttacagaattaatttattgtaacacataggtagcttttaaaggaatattaaaagtaattgttatgttttgacttaaattggtagaggaacattcttttgagtcacatgttgaaaaattgattgctggaggagtactgctctcttcagagtattgtctatttttaaaattttatcatggtttttgtttaatcagaactaattcaaagcaaatacacccatatgcccaatatctaatgacttcacaaaaattttttttgaatgttgatagttgttccaggtttaatcatgaacactaaaatatccctctgtaaatacacataagtattttgtatatgcaattgttatatatctataaagtcaaaagacatttttagaacattttcatttgttccctctaaatgttcaatgaatggggttagtcatgtataatattacagcttttgattgaatgtatagggaaatttttttagttgtactctctcctagtagaaaattgtctgtgtctcccatgtagataactctgtattaagctctattaaacatttaaattaaaataattcagaaaaaattttagattgtatgttagggtcatgggtcactttttaaaataatagttttgcctaacctgtatgctgaaaaatgaacacttgattttttaaatgtcttttttcatatatttaaatataatcacaaatacaatgtaaacctccacatataactaagaatccatctccttataaggaaaaattagattagattagtgcataggagatgaattacacaagcaagaaatagaggcattgtcaaaatttgcttcgtagaatgacccattttgtccagtgtagcaaatggaagcatgtgtagctcttgtcactcagtattttcaaagattttgaatattattaacctgtttgtctgagaaaaaatgttttacaggacttaattttcttcatattttatgataaggaatgatatgtaaaagagtctgtgtcctaaatttataaagaatgtacttaggaaaaaggaaatattgaatactggatctgaaagattttaattgtggcatttttagcattttgttagcattatgattttcaggaacaacatctgtttctgatttcctgtccgtgattgtgattactacccaaaacagagacttaagttactgaaaatataaagcaagttataaatataaaagaatgcccatagaatggttagtagtaggaagagtactcctggtctggcatttctcagagaaaagactgttgtaaatggtcaggaagttcctcctggcagcaccacatgcggtatcctgtgtcctgtgtatccctagcaaggacttcctaattgcttcccctcccagagtacgcactccttggtctgacttgaagaaccccattcaaaaatacaaatatttcttcaaagcgtgtcttatgaagaaacattgattatctgaagttaggggttttgttttacgctgggattgtttttattttttaccgtttcattttaagaaacagtattttccatgtctcaaaactgacgtacaccttgatttttactcttaattttaatgttctgattctctataactattcacagtgaacctatgttgtgtttggtgagttagatgggtgattaacttatcctcctgccttattttgtggctatgcagtagccctaaaaccttttcaaagggtgggggtaaaagtagtggtagagtctgtaattggtaactaagatacccctaatattctcagtcattaggagatgatagtaattttggcctgctttgtttccatcactgtttatgtaaaggctagaattgctcagcaacagtacatatgcaaatactgtgtaagtgccacatagcaaaattaatgaccgtctacaatatgctagtttgactttgattttgatttctagcttttgtggggactttatttcatttttttcctaaggtttgcatttattgggagagctgatttaaaagtatgctctgaataattataaaagcatgggatgacttcgaaaacccggttttctttagcatagtgaagagactggttttgtagtgaatacattgtatgtctttcaattgacatggaacactctactaactttttaagataacaaggatattattaataaatagcccatgcgagaacagtcattacattcttttgatgttgtttaaagtattactagcgctgaaatattttgcccacatgaattattatttctttttcaaagttacaactttggactttgctatctttcaggttttgctcgtaatctgtcagaaggcaataatgctaattacacagagtacgttgccaccagatggtatcggtccccagaactcttacttgggtgagttaccgtcccaaaatagaatgacatttccacatctgctgattctattgtcatttgctttgagttcatctatggaaaataagaacttcagttaattaaatgtgtcagttacatattgcagtataacaaactacctaaaacttaatggtatgaaacaagcacctttttgtttgctcagaattctgggtgtgggggaatcaccagtttgagttcagctggatggttcttctactggtctctcttggagtcactcacgaagttatagtcagctggtaggtcttctgggagctggttagtttaggggtctcagctggatcagaccatctctgatccctggaaacttatcctccagtaagctattccaagtttctaagtgtgatagttggagaattctgtgctattaagagggtaagccccaaagcaacagcagctttcaagcctttttttgtatggcttttgcctcgttggccaaagcatgttacatgaccaacccctgattcatggtatggagaaataaattccatctcttgatggggcaagtggcagagccatattataaaatggtatatgtatggaaatggaagaaattaattgtagccatctttgctaataaacttccacattaagaatgtgaatatccacacagtttgacattctggcttatctatttgttcatttattaattcttcaagtacttatcaagtatctcttatgtccaaccactttgccaggcacatagagtaaatattgaaccagactgagcacagtggctcacgcctgtaatcccagcactttgggaggccaaagccagcagatcgcttgagctcaggagttcaagaccagcccgggcaacatggtgaaaccccgtctctacaaaaaaatacaaaaattagccaggcatggtgatacctgcctgtagtcccatctacttgggaggctaaggcaggagagtcacttgagtccaggaggcagaggtcgcagtgggctgatatcccaccactgcactccaacctgggcgtcagagcaagactccatcacacacacacaaaaaaaccccaaaaaacaaaaaaatggaccaattgccatttttgttctgaacagtgtaaatcctgtttgatgataaatggctattcaaactagcactgcattgatgattttctcagtaacatctctacattgatctactttgtggccaccctttaactttcaatgctctttcattcatctgttaacaccagaaaaaggtcttctgataaggttcttttctttttagtacattttaactttaaagcctaagaaggagcctgtagttctcattaataattctctacctaccctagttgtaggattattttccttagattgtatttccttctttgggaccacccaaaaacagataatttatactccacaaataaaattagatatagtgataatgatgacaagtgcgcaaattgtaggtctcatttctttaatttagcatgccatacgtgtatctgggggacatgaggaatttaatttttaaaaatgttttttatataatagcaatataagtttctggattttttttctgaagagcatgatgacgacatgtttaagttactcactgagggtttattttgatattaactacttattttccagtgtctaccaaccgtctagtagtaattcttgattcattgctgacctaaagcctgtaagaatcattgacattagtttttgaaagctttactattttttttaaatcaaaagcttgctttatcctgaaaaacaaagatgcttagtcactttattatctcttccattgtgtaggcagagtttagagtttttatgctaatttttaatcttagaattaggattgattttctttgtgtttgtctatatttcttccgtgtaccttttggactcattgggatgcatagtccattttcttttgggagaattgaatttactggacactttaccaatggagaaatgagtatgaagtagatcattcttagaaccccatctgaggactcaagtgtagtagaagggcttgttataatatggtggtgtctgtaacatggccccaaaaagtttattttgaggacagccttattgtgaatcttcagagagtatctgctgcttaataatacctgtagaaaaactggagttatgtttagagatgtgtgctagctgctaaaagtatggggacaatgtaactaaattagtgctgaaatgaatattgctaattaagtgattgtcaagtactagttgaagagccatatttgtaaaaatccttttgaaatcaggtatttggttatacattaagaatttaagttttatatattctcaaggctttgtccttgacattcagaatcattccagctgcataaattattcaaatcagatgacagaagaaaaatagcttgtagtgagtatgtgaaaattttccataagtttctccatctagcactatggaacaaattttctctttctcaaacagatacgaaagaaagatcagtatcttgccctgcccaacaaacttaccaaaaagatctaaatgaagtttccttgtgtagttcttaggttgatatgggaaggaaatgagataaatgaaatattgacttattattgcaatgatttgttatcctagaaatttgttctgtataatgttaacagtcctttgatttaaaagttttgtttcactactgtatcattttagcattccaaaatttctttccatattctttttcagatattttcttttggctttcccttcttaaagcttggattatttatgttggaaatgtgtgtgagcgtgcacgcgtgtgtgtgtggtttcttaatttgctgtaaatttaacactctagatataaagctgttttgaggatacctagattttcatatacaacctccatttattaataacagcaacactcctaaagccctctggtaaactcacaccctagaagaagctataaacccctaaataaactggaaaatgttttgagggaaatagctaccataaagctctatatacataggttacatatattatattcaaataaataatatagtagatcttagcacaatcttagtcatcagaaactgtgatgctgagcgatggaaggttaaataatattcagtgttaaggaaacacataaatcagtacatagtaaattttaatagactgaactcataaaatggataagatgtatctttttgacatttagagagctaaaggataattatttgtcttagaaaatacaattatttggaagcatttcattccccaagtgaggtgttacttgccagatatgtatactgtattagggtttattaagccgttcacatttaagatacatatctatttatgtgaataaatttcaaattagtgtatactaactaaattgttattaaattgatggctttattagcataggtttattcacttgtgttctgatgatttgcttttcagccttcttttcacatggaactttttaatttcataaatatacaagtgtgctgcacataaatttgttcacaataatttggaaattatcaaaacattatattttttcagttgccaaaataatctcttcctttatttttcagcgctccctatggaaagtccgtggacatgtggtcggtgggctgtattcttggggagcttagcgatggacagcctttatttcctggagaaagtgaaattgaccaactttttactattcagaaggtgctaggaccacttccatctgagcagatgaagcttttctacagtaatcctcgcttccatgggctccgggtaagaggttttgctgaaacccaaaatggaatcaatactgcagtatttgagtcattgttcattgcacaatggaatgctaaactatcctttgaatactatttcttttcccattacagtgtttataatccctattataatattttatttccgaattttttaatagtacttgtggatttaaaaagtggttagaattcaaattctaatcttttttctaatttttaagttccagtttttcaaaatcttttttagtgtatacatttttacacactaaactttggttatcttatattgtttctttatccaaaatattaagcatcccccaaatataccaaatgtatgaatgttgaacaaacatatttgtagtgatttgaggaaagccctgaaaacttggattccccagatttgaaggttcttgttttagtagatgtttctggtccactgacggtgaaacatcaaatcttcttttcaaattagtgtattgtcttgggtccgtgcatggtggctcactcctgtaatcccagcactttaggaggccaagttgggcagaacacttaaggccaggagttcgagaccagcctggccaactttgtgaaaccccatctctacaaaaaaatacaaaaattagccaggcatggaggtgcacacctgtagtcccagctactcgggaggcagaggcaggagaattgcttgaacccaagaggcagaggttgcagtgagccgacatcatgccactgcactccagcctgggtgacagagtgagattctgtctcaaaaaaaaaaacaaaaacaaaaaaaaaacaacaactagtgtattgtcttgggcagcctttcctagacttgacaactttgtacaaaacttttctgagaatatgtgaaatagcgtcttagaaagtataaactttccccaaatgaggaggagtcaccttattagagtgcccagtgagttataggctacttcttccacctaccccaaaaacaactttttaagttttcagccagttttttttttttattatactttaagttctagggtacatgtgcacaacatgcaagtttgttacatatgtatacatgtgccatgttggtgtgctgcacccattaacttgtcatttacattaggtatatctcctaatgctattttcccccctcccccaaccccatgacaggccccagtgtgtgatgttccccatcctgtgtccaagtgttctcattgttcatttcccacctatgagtgagaacatgcagtatttggttttctgtccttgggatagtttgctgagaatgatggtttccagctttatccatgtccctacaaaggacatgaactcatccttttttatggctgcatagtattccatggtgtatatgtgccacatttttttaatccagtctatcattgatggacatttgggttgggtccaagtctttgctattgtgaatagtgccgcagtaaacatatgtgtgcatgtgtctttatagcagcatgatttataatcctttatatacctggtaatgggatggctgggtcaaatggtatttctagttctagatccttgaggaatcaccacactgacttccacaatggttgaactagtttacagtcccaccaacagtgtaaaagtgttcctatttctccacatcctctccagcacctgttgtttcctgactttttaatgatcaccattctaactggtgtgagatggtatctcattgtggttttgatttccatttctctgatggccagtgatgatgagcattttttcatgtgtctgttggctgcataaatgtcttcttttgagaagtgtctgttcatatccttcacccactttttgatggagtagtttgattttttcttgtaaatttgtttaagttctttgtagattctggatattagccctttgtcagatgggtagattgcaaaaattttctcccattctgtaggttgcctgttcactctgatggtattttcttttgctgtgcagaagctctttagtttaattagatcccatttgtcaattttggcttttgttgccattgcttttggtgttttagtcatgaagtccttgcccatgcctgtgtcctgaatggtattgcctaggttttcttctagggtttatggttttaggtctaacattaagtgtttaatccatcttcagccacttttttgggccagcatggcaattgctggtcattgtgggagctataaaataatctccccaccatttctttcctttctctgaaatgcgtagttctcaaaccatgttaccttgccatttacaaagcactttgtttttttcttttgattttctggcccccagttaatttccctttagagaccaccactgctcaaacctgagtgcccaaccgtccagatccttctaggctcagtgaatgtgggcgaaatgaatggacagaggcatgccagtatcttttttatctcctgctttttgtctgtctttcacatctgtctgagttacctcaggcaagtttgttgtttctccttttatttttgcttttgtaagccagaaatttgccagctatgaccagtaattggggtgccaacagcatatgtggttcagcaggttagctcaacatttttgaacatttgtcatactaggtgttggaaatatgacaataaataggacttgtccccagtctagaagaaagaaaaatctattatactcagaaataaagttagtcataattaatgaattgcattttcactgaaaatcaatctaaactccttgccgtagcctatgagaccttgcctgacctcatctcgtacctatctccattccccccattctccagattctcagcacacttgccttttttgttctttggcttccataaacattccagggtttttccagtttcatcaacttgggacccatggctgcttctcctggcaaggtgcttccctcgtgtggtcccttctcattctgtcaatctcaaagagtgcctctttctctggccacccaacgtaccaccctcacctccatcctagtctttctctcccacagcatcctttttctatcatagaacttaccacagtatggaattattttgtctgtttctttacttgttaattgttaactatctagtcctctcacactggaatatgtttctcaagggcagaaatcaactgttttatcacatcacagatgtgtttccagcatttaacacagtatctaccatatccagtgagtattcactacatatctgagaagtgattaaccagtctgtggcatcagcattgaaactcaactgtatttcttttctctccatctctcatgcttcttttacccttttacctttacctaacctttgaccaccacccccaaatagatcccccgatctttctcttttcactttagccttctcacatttctcaaaccacacaattctcttttttgtttagaaacctctacaaggttactgataaagtttaaactctttagggtagctttaaaaaccccttcttagttctccagcttcatttctgcctccccgctagcccagtttgtgctctttggccacattgaacctctcaccatttccttgacatattgcttttatagtctgcatttccatctctataatgctcccaacactcacctgtctttcttctcctcctccttcctcccctagactcaggccaaatgtcctccctccgtgaagaccttctagactattcgaggggaaactggtgaccctataacactctggttatacctcttttgtagcacccattgcattctcctttaagtagctgtttgcaaatatgtatcctcactggactgaggaaatgaactgttatgttcaccattatatttgcagcacacctagaatagtgcctgctaggctgaatagtgttgaatgattaaatatttgacctcaggattttaacattaactgctggaacattaagcctggtttgctggctgacttgttcttggcctggttaatggggctgtatgccggattctctgaagagagtatgaacagatctgacatgctgcttggccttaataacttacaaactagctgaagaattaagactttcatccatgaaataattagaaaacaatacaatttataagaaagcgtggtatataataaagtactgcattgtttacctcattgtacggttttctaatgtatctccatatggtttagaccatgagagtgtcaaatattctggaaagttagaaatcatcattggggattcattagagaatgctttatgaagcatttgacatttgaaatggatattgaagaacgaggagcatttggattagataggccacacaaaggattatctctttctcatttgtctgtggtcctgtttgttcatagtcttcttccctaaacaatactgtctataaaattctagacagcgtgtgataatgctgcttacaaacatccttcagggaaattgctgcctccatcacactttgacttttataaaccttaatactttacattttagtctgaaagtgtttgtggtgttttaactaaattagtttaatctctttggaggcttgacaatatcttttgagggagaaattttctttcatgatgttatttgaaaatgtctatgacagatagctaagcacatgggacatgtaaactgcatctgctgtgcaccatggactcaccagtaaccagtccagtgtgatgtgcatttgaagttagttgtgtagagacaggaaaatctacaagatgttgctatagtggtttgcattattgggataaagtaacaattgatgccccatagtatagggcctaggctctggagttagattgctgtggttcaaggcctggttccgtatttactattttgaatgatgccaggaagttatttcaccatcctgtgcctctgtttcttcttgtgtaaaatgatgataaccaaaagactgcctgattggattggtgtaaagatgaaatattatttgtaaaatgtctagaccagaacctcacgcatagtgctcagcaaagaggcattctcattggattgtattggattggccaagtgattcagaaagagacaagactgattgagatatactttaaacttctatgcatgagttttggctatttgttgaattatttcatattagaatggtaggtctcactcaaacgcatgtaaattaattctttgaagttaggagtttgcttggtcattttttattataatatttctaatacctttcgactttcagcattaattttcttatcaatgaaatttcactcctagaaaaaataagggggtatctggtagcataagatagacctcatacacaaaatattaacatgtactggtatagggtcttttatcacagcatggtaggtgtctttctatttgggctgatatttaatgctccagtaacatcgaagggagcctctgtacttcccttaggagaggcacctaggtttagaaagagtgtgggtttggatcacaagactgggtgcaaatactagttctactgctgtttaattatgtaacttgccttgaaccagttatttgaactttctgattgtcaccttcttcatctctaaaataagaataatatatccaaaatgcctcgcataacatcacttccctcagaaatcagttttaggttattgcctgtgcatctgtattgagttcatgttattccttctactcctctatctggaaggtgctgtcctacttttctctgtcttcacatttttcatatttttcaaaacccaattcagatattacctatgggttctttcttccacagccataaaccatcttggtctttcctttctctgagcttcaattagaatttatggttgcacagtttaacattgattgctttcccaaccagacagcagattcctcaagagcagggtttgggtcttacctgtattttttgtctcctgctatccagagcatggtgtggagatgatgtcataatcactccttaaatatcttgtttgaaattttactgtataattagtcctcccatttacttatttagcatgtttagggatttcggtacttagaaatgcttgtatgttggtatagaggaaataatgtatggaagcagactagccctgacatttggaagggagtacatggcattgggctctgccagtcatattacccaatactttaacatccactagatattgcagaatgtgagttggcagaggaaagaacaaaaagcacatctaaataaacttgaccccttcccctcattttatttaaaaatgcatttgttaatctaggaacctgtttgtcttcggttccaactttaaaaaaggaagaatttgaaaacaggtcattgtaagagcatattaaaagcgatgacagaatgtgtgtctgaattcactctctacttctgtgaccttttaggtactggccacttactttctctctatttttacttctatgttttcaaaagtaaatggtatgttgttgttaaaaagctataaggattctatctaatgtcttatcatatcctttctgctagaccctcaattactatcagtaattaagaatcatgtgtataagcagacaaattatgtatacactgtattaaaactgaattgtttataatcagatgatattctattttactgcataattagttcaaatttttatattttagtttgtttcacatgccttagtattgtctgcctagatttaagtatcatctttcacctgtgagttttcctattatttgacacccagtcgtagtaatccatataaaaatacatagacggccgggtgtggtggctcacgcctgtaatcccagcactttgggaggctgaggcgggcagatcacaaggtcaggagttcgatgccagcctggccaatgtagtgaaaccccagctctactaaaaatacaaaaaattagccaggcgtggtggcaggtgcctgtaatcccagctactcaggaggctgaagcaggagaatcgcatgaacccgggaggcagaggttgcagtgagcccagatcgcaccattgcattccagcctgggcaacagcatgaaactctgtctcaaaaacaaacaaaaaaaaatacatagacaacaaaagtaatatacaagtatgaatttgactgggattggcatttttgcttatctgctcccttctgcaacactcacaagcacgtgcacacacatgtccttccccaaatgttaacattccctttgtgtatgtctcacagtttccagctgttaaccatcctcagtccttggaaagaagataccttggaattttgaatagtgttctacttgacctaatgaaggtaaggccaattgatattatctctataaaatgtcttttggtttgtggattcttttgtgtctacatgtgaccatagcctgcttttatgaatgaaattttaggagatgtggaatggcaaataatggggaactatgtcatattaaaaggcatgtaacttatttaaaattacaatgggatctggtattgtcacagtccatctagacagaatcatgagacccctaaatgacattcttaaaatggacagaataataaaaatctgttagcatgcaagagctgttcaagcataaggttttaaaacaaatcttaaaatcaatgttgaaagaagaaattcaacaattttttctgacatggtatttgaagcctcccatcgcctacacagatttgatcagtgaatctaatttttctctttttctaacttggtctcttctctcccagactctttctggctctactttagacgtatcaggatcattgctaatgctgtggcctgagtgttcttccttatgctaccctccctgtccagaagtcttcctgctctatactctaaaagcattctcaaatttctttattcaagtttatttttttttctccagtagacagtcggctccttgagtgggaactgtttttcatatttctccagctttcactgcagccagaagtgcataagcaagtgttggttgtttgatagtagaccttcaaagaacacttattaatggatcaattttattttatgcccagtcagtcaactgtcaaaatcagtagaggttacactgtgcatagagcctttaaaaggcatacttagcacagtcggaaatttctgagtggcattctcagaactttgccgtgctttaaactatgttaatctgtgttccagggaacatagtgtacataggtgtgggggtggaggtgggggaggagggtgtgacgtttcggaaaggccacataccatacaaccttttgtagagatgcacaatattcattaatccataaaggctttcagaaatatcacaataaagaggcatttctgtcttacccaatattttccaaatttaattaaatactgaatactgttttttataaaactctaaagctctagtgttcttctgaatacagattgagaaatgctactggcaaaaaagaacccttaaagccttttgtttaattagtcataaattatcacttaaatcaggtaggttttgtcaatacactttttcacacagtcagtcctcatggattgggacctcaataatttggtaacttctaaaatgtgaatagaataaagtaggaacatggaattaaatacaatttcatgttttctgcctttcatctttctttagttaaaaataattgaatgtttttgttaaatcattaccaaatataattgccaagcatcagtgtggtaccagattaaaagctagcacaaataaaagtagaaagattacccgaatcatcctgtgcttctgccagtttagaagttaaacattcaaattcctatttatttaatatctttaccatcagatttctttaagtaaatatttttattgacatgtcctttcagaaggtgcgcaaattgtatctatatgtcagttactttttataatgtaaacatattagtgtaactctacccagatgtagatagagaaaattactaacaccctggaagccttcttatgcccccttccaggctttatgccaccccacccccctcagaaaccagttccgacttctgtcaccaaagattagtattgccttattatcaaatgttatataaatagaatcattccttttgttttttagctttttttgaaaatgaatttgaaaaatgaaaaataccaattatcccttctttgaatatttcaaagagaaatattctctttgccattctctaaagctgccgtgttaattttgtccacatctaagtacctaaaatggccatctcatcctgtcagccaatttagtgggggtacaggtcaccaaaattaattcaagcccctaataaccttaagactagctgtagtaattatattggctctattttagtcttaaaaaacgttttccctccaagtactgaacttaaaagtttatgaaacttttaaaaaaatgtaaaagaagaaactttaaaaccaaaaaattagagttgaggctctttgctgctacagaatgatttttttttttttttttttttttttgagacagagtttcactcttgtgcagactggagtgcaatggtgtgatctcagctcactgcaacctccacctcccaggttcaggcaattctcctacctcagcctcctgagtagctgggattacgggcatgagccaccacgcccagctaattttgtatttttagtagagacgggttttcaccgtgctggtcaggctggtctcgaactcctgacgtcagatgatcctcctgcctcggcctcccaaagtgctgggattacaggcgtgagccaccacacctggccccgaattatttcttaggatcttatgtcaagtgggaagaaagctaaattcaggcaattatgtgtatactactatgtgggtaaaataaaaggaacaggtagagatatgtatagggaatatctatggaaggatgcctaagaaactggtaacctaggctgcctccagaaaagggaactgggtatctgggggataagagaaagattaagaatgtatattctttcaagtgaatatctacttaattaaaagtgtactttaaattttttaattatattgtaaaagtgattttgattaatgataagtgcaggatacaaaactgtgtatattttgtaaaagaaaatatgtatataggatattcaaaaaagggctgggatcatatatacaaagaggaaaatgatgatgagattataggtgatttagatagtctttttttttttatttcctgaactgtgtttacttgatattctgcaatgactgtgtatttcttttataaggaaaaaaataaggtttttattagaacttaaatttgactttgtaatgttcttaacgatcctaaattttatttcctaagaatttactgaagttggacccagctgacagatacttgacagaacagtgtttgaatcaccctacatttcaaacccagagacttctggatcgttctccttcaaggtcagcaaaaagaaaaccttaccatgtggaaagcagcacattgtctaataggtaaatattcccttttaaggaaatacagatgcagtgttggtcttacaagtaggtggaggaggtggctgcttaaatgatgcaattagagaaaagaaggaaagccctctttattcaaaaatatcttccttatgcttattgcatgattcagaaccacaattaaggagttgtgtgggtcttaaagactttcttatctttaactagtatatgatggaaacctatgcattccctgggaaaggtagcattgggttagcaactaagggggtttacagcctcaagagctagaatattctgtgtgaatgaaacccatcagtgatacccggaggaagaaagctgggtgaaggcaaggggattcctggagagagaagaggatgccaaacacagatggtggatggaaatgtacctagtgtaatctttgtgactggaccaaataggtctggctctacagagaggtcttgtgtttttgttgctcttgtcttctaatcattgagttgagaaattaatttttcataagaataagaatatggaaatagtaaagtcagtgattaaaattgttgctctttaaatattatttttcagcataattttttcaaagcctgtttcctgaaaaacacacacacaggatttgggccatacaatcaggttgtctttcagacctgacattcctcaattctgttggttgcatgtccaagaggacagtgtcctagtcatggtctccctgttttccttcatctcccaagaggctgatcttgtcatctggggtcgttggattatggaagataggaaatagtttctctcatctactattacaagataaatagaaaacaatgattctttatttttattttttagtttttttagagacagggcctttgctctgtcgcctaggctggagagcagtggcatgattataactcactgcagccttgaactcccaggctcaagcctccctcccacctcatcctcctgagtagctgggactataggagcatgccatcatgcctggctaattttttaaattttctgtagagatggggtctcactgtgttgctcatgatggtctcaaactcctggcctcaaacaggcctcctgcctcagtctccccatgtgctggagttacaggcatgagccatagcatctggctgaaaacaataattcctaatatgaaggttttttaatataaattttcttcccacctgcaaccccaaattttccatccatatagaaccattgttcttttttgagacagtgtcttgctcgattgctcaggctggaatgcagtggtgcaatcatggcccactgcagcctctgccttcctggcaagcgatcctcccaccttagcctcctgagtagctgggacaacaggcatgtgccaccatggctggctaattttttatcttttgtagagaattcctgggctcaagcgattcgcctgcctcagccttcctaagtgctgggactacaggggtgagccaccacacctggccaatcagttgttcttaatagatcagatttttaaaagctcaagatctggtactatttaggtctgggagagcatccataaactgatgatgaccatttatcgtatgttttctctgcttaactgtgatagtataattgtgttttagagctgtttactcttcttgaaaatgactggtttcagtttgtttcccctcacatcttatagacctttcttagctggctttctttgtttgttgccatgaaatttttaggacactaagtcaaggaatagtagtcatcatttggttgctcctttgcatttagggggtgcaaattagtcctgtgtcttctttggggttactctcagttcaggtgcttttatctcctttttaccttaattgtctcttagctcctttagtttacaccgaaaaattatcccaatgatataaagtccagtagactgataataagtttttgatttgtgctatagtgattagtgatataacccatactgtgaaaagaggctgtgtatttgtcttctagtgactcacttgagagacagagttcttggaattaaccagtggggacctgaggctctcctcgggaacctctttagggatctgttaaggaggatgtgcttggtgatgatgttttcagcagatacagaagatatgatttgtttgggtccttgaggagtcctcccaagtccccttttgaaatagaggagaatagaaattataagtgaatttaaaatctctggaagaatcattttcaggtcttgacactgtattgaatatattaaagaaaaagtcttacatgatttttctaggaatgatcttaccacattttacatatatctgagggcttttgctccacactggtctatggtccatacttattccatggatgcttttttggttagagacattaattctagcttgaatctcaacacaaacgatggctccctaagacttctcaggaccattttagagatgctcacagcaccatatcacattggttgccacgtacaaactcccctgccttgtctctggagacacaaacatgctgttgcataccttgtcttctaaattttttctctctaggagaggcagtggactcttgtgttacttagcccctggctatctccctcaggctctcctgaggttctgcccaccatggacacggtgcaatggtgcatcagctgccccatactgccactctcctggtccttcaccagccttctccatcaaagtgtagctttgcaccttcgacatttgcttttaaaacttactttaactaaatcgttatctatccatccatccatccatccattctgcaaccatttaagaagagtttgtatgtaaaatttttttaactagttggcagtttaacacagattccttacagttgtgtgtcgaagagatctatggaattttcaaagctgttttttattgttgcactttggcagagctccgatgcaaagggagtatgatgccctttccacataggcgttatgtgcaaagctcagtggtttccaactaatcctaagacacaaacactcagaatggcagtttaggctctttgtacacttatggaaaacctaaagctttgacacgttttaccttaactggataacctctcttttcatgttagaattgtctcttacgttgctctgaatgtgttctttctaagatccacatgtacgtttctgcttaacgtcgctaacagtgtttctaagagttccaaaggctcaagcagctgcctttgctgttctctgtccctttatggtctttgtgagctgaggacgtttcccaatatctgtacatgttatctgtctacgattactatttctaggcctgaaggggaatggggatgaaatagggttctgagagtccagggagagctggacctgggtaggaagagccaccctgtagaagctgtcatctagaaggacacagccacgatctgagtcagggtgcagatgcctgcagggaaggagcagggaagacatcccccagcccctctctcctcttgtcttgtgatgccttccactgctaagcccaaccagaagctagctggctaggaagcgtgggtgacaatctgcagcattgggttcctgaggcccagggccgggctcatgggggtggaggacggattggaggttgggcaaatggagaataaccaacacacttagatctatttgtggatgagacagtctatcactatttaggtttgaaaagtcgctgagatatttcagttaccaagatataagttggcaaacaactcaatggtttaaaacctgatgcctttaggatatagggactttattgatctggggatagactctgttaatataatttaacagaaagtgaaacttagcatttttttctttgtaattcctttctaggtctgggctttgccattttagtgctcatatttaggagtccttttatttaatgctgtaattctaatgacctaactggaagagattagtgagtacattcaagagatgaggccccccacactgtcacaggcttgctcgatatcagatttttttttcttttttgacactctcaggtagctttctggcagagattactgactgaaaggtagactaggaaatgggtccttatgttatttaatggctgagcatgcaggttctcatggggaaaattggaagtcagagcttcacagactaccattctacatgaacaaaaaaaagtgacttccaattagtgtgtcatgggaacaaaactctcccaaatcaaaccatctgtagcaatagcaatatttgcagcaaaattttttgaatgcatagtaaaaccagaattgtgtaaatcattattcatttttaaacattctagtctgtcccaaactacaattagatcctttcaatagttacagtagcacaaactggccttgctatggtgtcagtttcagctttcaaatagaggacaagattttcctctggatttatattttgtattttaaaccaagtgtgaaatgaagctttaagtcctaaaggagggctcagtcggtctaggataatgaaatgttaaataaaaaagagaataattgtgtcttttggagagaaacgaactctttcagatctctgtaatccggtatagtacaggattcctgtttactgtacaaagagatatctgaagagccccaagtaattgccacttctccaagacataaacattgatcatcatgttttccaacaaacctcactggacagtttacatttctttttagagggtcattttcttttattaagtacattgctagaattctcattctttgattatgcaggcagaagagacattggtgtctgtgtatgtgctgtgagtatgtatctctgaggcaggctacaagttttacaaataaaaatgaagttcaagaaacatagtaacctttaagtctaaatgttgtcttctgacattcaagcagacaaaagagttataaagagtttatagctcagctctcttcttagcagtcattctatcacaaacactcatatgagtaccaatataatgagagtatgttttaccagattatcatttagaaactgttttgacagcaagttagctgagcatttagcagtgccagaataatttcatcaaggccagtgctttgttacagagtgagttggtctaagaaacttaattgctgttgataggttacttgttattcgaaggcacatgcttgagagaattaatgtttttagtcttccaggtgttttgagtatttgttctttctttttaacaatactttttgtgtgtcagctattgagggaaactgatatacttcttttgtttttaacatagaaaccaagccggcaaaagtactgctttgcagtctcaccacagatctaacagcaaggacatccagaacctgagtgtaggcctgccccgggctgacgaaggtctccctgccaatgaaagcttcctaaatggaaaccttgctggagctagtcttagtccactgcacaccaaaacctaccaagcaagcagccagcctgggtctaccagcaaagatctcaccaacaacaacataccacaccttcttagcccaaaagaagccaagtcaaaaacagagtttgattttaatattgacccaaagccttcagaaggcccagggacaaagtacctcaagtcaaacagcagatctcagcagaaccgccactcattcatggaaagctctcaaagcaaagctgggacactgcagcccaatgaaaagcagagtcggcatagctatattgacacaattccccagtcctctaggagtccctcctacaggaccaaggccaaaagccatggggcactgagtgactccaagtctgtgagcaacctttctgaagccagggcccaaattgcggagcccagtaccagtaggtacttcccatctagctgcttagacttgaattctcccaccagcccaacccccaccagacacagtgacacgagaactttgctcagcccttctggaagaaataaccgaaatgagggaacgctggactcacgtcgaaccacaaccagacattctaagacgatggaggaattgaagctgccggagcacatggacagtagccattcccattcactgtctgcacctcacgaatctttttcttatggactgggctacaccagccccttttcttcccagcaacgtcctcataggcattctatgtatgtgacccgtgacaaagtgagagccaagggcttggatggaagcttgagcatagggcaagggatggcagctagagccaacagcctgcaactcttgtcaccccaggtacagttgagcaccttgactgaatctggtggcccttcaggggaaggtggtacgagggatgtgatgagggtccatctactattttccctactacaggaggttgtgcttttcttgataggatgcatttagggaagcaatacttggcctaatctctgtttttttgttttttgttttttaaatctatttagatcaaccgttgagtactcaagaaaagtcaaattttgtttttagtgatctttttttttttcttaaatgttcttttctggaatattttgttgagagaatcctattttgatttattacagaattcatcagctgtatcagttaggttttagtttttcttaaaatacagtgtgaattcatgggtattttctctgatctctccaaaccacatttgcttaaatcaaaagcttttgctagtaccttactcaatattttaactgaatttaaaagttttaaatttgtccagaactacagataaatttaacttcataccaggataaatgttagttttcagtcttttggattgtttttaaatcttaaaacagcatttttagcataatgcttcctccatcttattcatcgtcaaactctagaactgacctaacctgcttaaaagaagtagcattccttcacttgaacctgggaggcagaggctgcagtgagccaagatcacaccactgcactccagcctgggcaatagaacgagactctgtctcaaaaacaaaaacagaaacaaaaacaaaaaaaacaagaagtagcattcttacagtagagcatgttttaaaaataatgttatcatgatttcatctataaagtactgtgcccagtgcctggcacaaagtaagtgtctaacaaattttagttattcttgctgcttctgtgattgtggaggctgatatttggacattgaacaccttttctatgctgggtgttcccaggcactcaaaagagtctgagagagctcttgcacttgagaaacttacctgctcttggggaagataaactgatacatgataacaatgaaataagtagccaggtgcagtggctcacgcctgtaatcccagcactttgggaggccgaggcaggcagatcacgaggtcaggagatcgagactatcctggccaacatggtgaaaccccgtctctactaaaatacaaaaattggctgggcgtggtggcgtgtgcctgtaattccagctactcaggaggccgaggcactagaatcgcttgaacccaggaggtggaggttgcagtgagccgagatcgtgccactgcacttcagcctggtgacagagcaagactgtcacacacacacacacacacacacacacacacacacaaacacacaatgaaataagtaagacctaagtcaatatggcactggctataaataggaactgagaatagagagaggtcattgtgagcagaagcagttagaaatggctttacaggcaactgaaggtctttctctgggctaggatgtatagacaagctttgaattggctgaagagtgaaggtatgttcaggtacgtcctgagctaggcaacatgaaaagctctagctagaaagatgaaaagaataggttccctgtcgtcttaagtgtgtgggctggcaggggacacttgtcaacagataagttgttccactactgtgaggttacattctggctactgtgctagaggcatgccagtgtggcaagggagcgagacagtccaagttgtgagttgtgggagctcctagaacaggtggcacctgagcagagacttccagaaaggttgggaagaaagtgacagtgacctcaggaaagagggaagaaaagagcattggaaggagaaggaaggtaacagatgttacatagcatggtatgctttgggcattgcaacttgttccactttgctggagtgaaaaatgcaaaatttggagtggcttttgcaataattcaagcacgaggtgaagagaatatgtttgggattaagtcagtgccagtgggaaacggagtggatcttctactcctcagaagtagaaacaataggatttgtgatttgaaggattgaatataggaaaaaggaagacttcatggtttcttttctaggacctcctttttggagtgaaagagagtagttttgaagtcacctaattcaaccccttcatttcacagatgagcatgtcgaagctcagagaagttgggtgagttgctccaagtttacccaaccagctcaggatggagctgggattatgaggcaagctccaggtgctgaggccagctgcttgccactggtgtcttgcggacatgttgaatttgaagtgaccttggcctctaagcagaagtgtgctctaagaggctaaaaagatggtctggcacccaggtgaaaggagaaagcaagaggtgcccatttgcagaggctggaagtggagtcagaggaatggtcagaggagccctgaggagatgctgtcgggagaaagaacctccagagcctagaaagatctggcagcttcctgcagaggagacatggaagggaaaattgggtaaaatgtgctagcattcagcatggtataaaatggagaagaaatcggaaaaacaaatagctttttaacttagaaaaagtaattgctctctgagaattccaggaaaagaatttttgtgaacatggtggtcataaacgaattataaacagttactgtgggctaagcacagatctgttacagactgtgaaggccagttcaggaggtacagtgcccagctgcaagaaagtacaagtttaaaagcacaaagataccagaaggctggaaaagtaacttaagctgtgagtgaatcctaggaatcactcccatgcaaagtatcgggccaccttgaaaagcacagagactcttactgagtttatattagatgttaataatttgttttcttaaaataatttttgtagaggcctttgtaaacagtacaggtggtaaaagtcaaatgagacattttcataaaatagaaagaaggaaggctatgttggatgaattcctgcccagaatcctcagagtacatttggagaatgagagggagaaaaataatcatattttaaatcttaaataaaatgtttttgatatgtcacataggcttaaggtaatgcccttttctgtgcataatatacagatatacgatgcagcgaactccttctaatgacttggtaattttcttccttaatctttttttctgatgatagaaaatgctgtgttttttcccctcggtgaacaccattgtggaccgagtactgttcttagcttgtgactcacttccttgagagagaaagatagtggtatgtctttggagatgagcactatcatgatttggcttcagaaaatacatgaaacataagtgctgttatcctagagaagattaagacaagaatttaagcacataaactatagtagttaagaggattttaacacaaaaaattattaaaaggacttactctattccttgatatattcaaaaatcatttattttcatctgactttgccatataagtcctgcatgaaatatacttttggaactgcacagttcattttggagaactcagacttaaaatctgctagagaaatttcagataaactaatagaattcctaatcagagggccgctcagaaccatgactgtctagatattagaatggtaattttttttgtttttaataattaattgaactattttcagactaatttgttctctgcttgccttaactttaatgagaattttactttccatctgtgtgaaatttgacttatattacattcatcagattattcacttttatgggactatttgtattttagccaactaacattttttattttagctggttatggtcctagttctaccaaataaaggccatgatgagttccatccctaggaacaggatgctcttataaatccttttaaattttacttccagcctggagaacagctccctccagagatgactgtggcaagatcttcggtcaaagagacctccagagaaggcacctcttccttccatacacgccagaagtctgaggtatgtcacaataaaatatgcctgtaaacatttgttcaacatcattactgcctagcttttaaaatgtattaatacccagtctcccacaaataagttgaagtggcttataaagtaagtagttttccttgtggcataattctgagttttctttcaaaaagatcattaagtcaattatagattgattaggtacggttctaaatttgggccaggtggctcacacatgtaatcccagcactttgggaggctgaggtgggaggattgcttgtgtccaggagttcaagaccagcctgggcaacatagcaagaccccatctctacaaaaagtttaaaaaattagctgggtgtagcagcgtgtgcctgtagtcccagctactcgggaggctgaggcaggaggattgcttgaactggggcagtcaaggctacagtaagccatgatcctactactgcactacagcctgggcaatagagtgagaccctgtctcaagaaaaaagtcataggcaatattgtcatcaatgtgtggcttaacttttataaatttctttcctgcctcagggtggagtgtatcatgacccacactctgatgatggcacagcccccaaagaaaatagacacctatacaatgatcctgtgccaaggagagttggtagcttttacagaggtaagcccacccccggcattcaacaggttcccctctcctccctctctcactttatgtgcacactgctttcaccgactcaggccagcggccttctcacctacactgtcgccttccagcggttctccctgcctctgctcctgctaagtcaggccctcctggcttatgaattggcctccttaggtagcctcttaactggtctccctatctccaaggtacccatcaatatagagactagagtgatccttctgaagctgtgttctgaccataccactcattttgttctgtcaagccataacatacttattgatgttacctgtgtgtctggcactgttctggcttagaacttgttggtgaacaagatagtcaaagatcttcaccatcacggaactcacttcctcgggaggagagatggacactaaacataataattatatagagcagtaaaagatattaagtgctacaaggggggaaaaaatagagcaaggcatcccattgcccaccccaccccaccctactcctaatcccctatcactcacctgttgagagtcttttggtggcttcccattggcatcaggacaaaatctgaattctctaggatgtcattccagacttcccatgatctggcccttgccatgctctccagccactttctcccccaccccccaggtctctctcgtacccagcctatgggactgcacaggctgtgccctcctctggcctgtaatgtactcttcctcctgctggaacagcttgtttctgtccctttctttaaggtcctcttcagtataatatcttcccacagtttgttccagatggactgaaacattttcttctccgttctgtctgtcgtaccttgcctgtaactctgatgtaacactgaccacattgcactgattctttgtctgagttctctctcacaaggttgtgagacattcagttctcttcgtgttctcttctttttattctcattgactagtacactgcctcgcacagtttcataaatatttgtcaattgaattaaagaaaaatttcaagtgtacttgcacgggctaaaatgtactttgttatttagcagacaactaaaacagatgcttttggggttgtacaaacttaggagacattgaatgacaaaggcaatcccttttagtaactatgcagtaatagattgtaaagcccttgggcattccaacaccctggtggagaaaatggacagcaagcccacagggccaagagcaaggccttgggtcaggaggcctgtaaagccttcaagagtcaccacagctttctaaagcctcctatgcccatgttgcctaacttcccactatttctgttgttttaagaggatagttggaaaggggcaggatttggggcgggggcatggagaactgcttagtcattttaattaggaaccccagctaaataaatgcacagaagtgttatttaggactaaatgtatatttaatgattaggctactctgttccttcccttccagccccacctttggaaaagcataaggtattgattgaatatgccatttttcctgataccatgattacgctttagtattttatgggactggccgggcgcagtggctcacgcctgtaatcctagcactttgggaggccaaggcaggaggatcacgaggtcaggaaatcgagaccatcctggctaacatggcaaaaccccgtctctactaaaaaaaataaaaaataaaatagccgggtgtggtggtgggtgcctgtagtcccagctacttgggaggctgaggcagaagaatggcgtgaacccgggaggcggagcttgcagtgagccaaaaccgcgccactgcaccccagcctaggcgacagagcaagactccgtctcaaaacaaaaaaaaaaaaaaaaagaattttatgggactaagcttttaattaagatttaatttaattaaaatattgtaacatacatgtgcaaaagccttttcttctatcaccaaagcattacctccaaaatgtagcataggtgtgttatttctatagatgtctggagaatatacattaatataaaatgctaatggagatttaagttagttagtctttgacctctggaaacacggttttattttgattgcaaaaaaaaataaattggttaattcagagaaatacttcatatgtctctacctcattagtagagagggtagtgagagcttggcaggtggaatgttttaattttaaaaatttcagatatagaaggaaaatatttaactagatgaaacatctgaagacatctgtcatttcaatgatactactaagtcctagaggaagatttggtggtatcattgaaataacagatgtttccagaatgcttcctgttttcattcctattggtcaagagtcaagtgaaattgtgtcatttatctttatatacagtctgtatattccttttgtggtaaaatttccagtatatttttattataaccattcttagaaattgacagaaaaagttaataactatccccccaaaagcagaaaagtatttattcacatacattatattttatctttttcttttcatttagaatttagagaaaaataatatttttgtagaaatagctaaatttctgtgtaattttgtttaaaaacgagtgatactacctcccaagtgtcaaggcttaaactgtagtttgtctgtttcagcacacatattaattacttcaaactaagaatagattttacattgttggtctatgataagaaagctttaacttcaaagaatgccaaaacggtggcagggaatggtggtaggggctacaagattcacacttgaaaataccctggccgggcgcggtggttcatgtctgtaatcccagcactttgggaggctgaagtgagcagatcacttgagctcgagagttcgagaccagcctgggcaacgtggtgaaaccttgtctctacaaaaaattagccaggtgtggtggtgtgcacctgtggtcccagctacccaggaggctaaggtgggaggatcacctgagcctgggaggtggagtttgcagtgaaccatgattgtgccactgcactccagcatgagtaacagtctcttatttaaaaaaaaaaaaaaagagagagagaaaaaaaatataatgttcttcactttatcagctggcaggtcagtttactgttttcaatacacattacttggtgttaactaacccttgcaaattagtgtcataagcagtggatggagggacaaggttccctggaatgccttcaccctcagaaaacacaaaagttatgtgaagagctgatgaggatttttatatgtttgtttgttgttttatttgtgttagagaaaatgcagtaggataacgtgaaaactgctttgaccaaaagagaacatcagccgtctgtggtggttcatgtctgtaatctcatcactttgggaggctcaggcaggaggattgcttgagcctgggaggtcaaggctgcactgagccgagatcacgccactgcactccagcctgggtgacagagcgagactctgtctaaaaaaaaaaaaaaaaaaaaagaaaagtccatcagtgacttactttttctttattcagtgccatctccacgtccagacaattctttccatgaaaataatgtgtcaactagagtttcttctctaccatcagagagcagttctggaaccaaccactcaaaaagacaaccagcattcgatccatggtgagcattttggtttgtttttactcttcctttttttaattgtagatttaagagttgaaataaattctggatgagctttttagtgtcctttctcctgctaggcctttttttctctagataaattattgaataaggaaaatgtgatttttcattattggtaacttttttccagtttggcatttagattaaatatcatgtaagggaaaaaaaatctcctggattattaaatacctgatacgctttccactgtgttgttctgatatgaatgatgacttttgcggtctccttttgttgacattgagccaggtacactttgcttagcatttgatgtgcatcgtctcagtcagttctcatagtcacactgtgcttccatgctagtggcagggacactgaagcttggaaaagtcgaggaactggcccggtgttggacagccagtaacatggagaagggagccagggttcaaacttaaatgggctccgactccagagctcatggttgttacctctgtgctacctgtctgtcattcagggtaaaaagaaataggggaacagtcctttatgctaccataaaagcataatggtaatgaaaggcacaaatgatgtggcaacttttcttattcttttatcttttttgtgtcgcatctaataaatatttagggagagaattacagttttatcaagatccattagcaaatctgtctgaggagtaaggactttaagaaaaataataatgtagacttcttctcaactaccctgaaagactgcccaggttctctaccaagagcataaaatgggacatcactgtaagacactggatttggaacaagaccagtctgtcagagagtccctctctggtgtttgttgccagaagtaacagaagggccttatgtcagtactcctgactccatgtgatgtcacaatttggaccctgttgataaagttacatcaaggtttcagtgttgttgtgccctatagtgaaaattacttaattattcttaaaacaatataaaaaatgacttcttaaaagctataaatacacttttgctgtataagcacaatttacatccattgcctatttataaaatgacagtcttaatgttcgtgactaagagtttagactctggaaataggatatcttggttgatggcaacttgtctatcaatcagaggactgtgtctatttgtctcttggtttcctcatgtgtaaaatagggctaagaatggcacctccctcatagggttcatgtgataattaaatgaggcaatgcattaaaagcacctagaataatgcctggctccgtaagcattcattaatgttagtgactgcagttactatcgttgtcatctaacttcaacatcaggtgtttcccctccattttgatgataaactttggtgttctttctccatgtgactgttttaagctccctagtatatagaaaagatctgcgaattaacgtgagaacacaagtataacttctttacttaccagtgttgaccattttctggtgtggctttgataagtcatgacaaaattgtctaaatggtgagaatacagaagtgcagaaggaattggattctcttgattattacataatgaagtggtgatgatttaaaagagtaacaattacagattaccttagtcctgtgaaaattaggtcagatcaaaattaaatccaaatttgagatagacagtgttagtaatgtattatttctgtcttttgataatcagtttaagtagaacttgttttacgcgtggatatgtacagaaacctaaaaagagttgttttaaaaagaatgagaggctcaattgggatgttgaactttagttgagtcttcatcaggtcatccttattctagtattgctgttatgagacttgagagttccagaattgccagtgatgaactggctctattcttttgtttctgttaactcttcgtgataatgctgctatgacgtatttccttccttcatcgcatctcacttagtctgtcattagttcaacttgactcatcttgattttttttcttgaacaagctctcgaattggttcatcagattcttcatatttgagagaaatgcacatttggtaacttacaaaaaacatcaaagagccttgttatggtaatatagtgaattgctattctttgttgcgaggggatggagacagggtctggctctgttgcccaggctgtaatgcagtggtgcaatcttggctaactgcaacctctgcttcctgggctcaagctatcctcctacctcagcctcctgagtagcccagactgtgggtacatgccaccatgtctggctaatttttgtatcttttgtaaacatggggtctcactatgctgctcaggctggactccagctcctgagctcaagtgactgactgcctcagcctcccaaagtcctgggattacaggcatgagccactgtgcctggccgtgaattgctattcctaaataatctcttacctaaggtcagtctgtttttccttggtagttgtacttcagatttacttcaggaagagaatatttgtacagtgtacccctttcttgcaatggaaaagtcaagctactatgttatattttaaagcaataaatagatattgcagtatgatatccagagctgttattctggccatctcagttatgtagaacccacttaagaatcaggagatagccaaaatatctcagaacaagcaaaatagagttaatatggtgggattaatcatctttactaataggataacacccctaccctcatttggagtctgttcttcatttatgctcagttctagcaggcagcactgaggttgtcagggcaagaaatagttcaaggtaatactacagtatgcagagggaaaaggatccaagcaatagctatggagagaagcaggttggaaaatcatacatatcatagatctctatggagtgtgtgtttataaaacaggcagcttcactttgctttgaaagacaaaatgtataaatatgtttagaaagactgctgtcaattgggttaaaaattgatgtttaaagagtaaaccaaattacttagaaatcccactagttggccaggcacggtggctcactcctgtaatcccagcacttagggaggccaaggcgggcagatcacctgaggttgggagttcgagaccagcttgaccaacatgggaaaaccccgtctctactaaaaatacaaaattagctgggcatggtggcgcatgctggtaatcccagctactcgggaggctgaggcaggagaatcatttgaacccaggaggtggaggttgcggtgagccgacattacgccattgcactcgagcctgggcaacaagagcgaaactccgtctaaaaaaaaaaaaaagaaagaaatcccactagttaaatgaagaattgctgtaacttgcacaattccagccttctttttctcgtaaggttatgaatatattgatatccattagtgcttgtcatcataactttcagagttactcccgtagaattattcactgactctctcttctcacacattagctaaccacgcttatcacatcgccaggggaggggcaggtggcagagaaagtgtcacagagtaatgctcctcaccacttcagctcaccttccatgctgctctcagagggattatactgaagtcccataagcctgaccatgatgctcccccgccccattccctagctgtcaaacctgtcccctacccccaacaagagtctgtgagcagcttgagtgagatcagattcgttcttttatttttctctgtttcttcaacacctaacacagggcctgacatgtataaagtacttgctgaatgttggttgagtgattcattggattttaattccttcctttctttaggtgaatctttggaattgtgtctcctcttggacccttatggaaatagctgtcatgttagataacgttagagtcccatgcctgtgtgcctgcttaccacttgtctcattgccctcctcccgtactgttttggtcccaactgctgctctggagaaggtgccaggtgactggatgaatagtccttctcaaagcttctgtctctgagattgatgtgaaccccctatttacccttcttttgtgctgctcctctttaccccactcagcacgaagctgctgtcttccaggtggaatcacaggggccagaatgcgcaaatgagggaaatgaccaaccacacccttacccatatggctcagttccagctgtcaatgtataactcattctgcattcctttatacaacacagcttttcaagtgcctttgttccagccagcctctttccatctgtctctgagtcactctgtcagccttttctcccttccctttctgtgttaattctttgggtatgtatgtttctgcatagcttctcgcttgttttgtttttcctctctgacatccttctttctgtctttggtgatgcaaacacacgcttcgctcctagttttcacccaccagttcaagggtaatttatttctttttttcatttggcctctgggatctttctctgcctggatctttgaaaatgtcccaatcattcctctatccccacctgggctgtggtttatccagtgcctcttgaaaagcccctgtagagggtctttggcccatcttccctgtgtcctggggacccaacgatgcaacatgcaaactgcaaacattgagctttccttttattaccctccccttctcactttcatcttattcaccgtttcatcctgcatagattctcctcttaccatgcaagatcctacttcctcctaggactggtgtctcaagccttcatttcctcttgtgccagcattaacattcttacagtaatgcccattcacattctgagatggcagtcatgatgaatatgtcttccttaaagatttgctggattggcagaaagcacttttaccctcaacacacctgtggtattttgtgagactttcattctgcttggtaaaaacttctacccattaatctgaatattctgttgtgcttctaggttgtgtttttgcagatagtattgtggaacgacatagctttttcataaacgtataattctttaacctctagaagttacagaacgttaaaaatagtattgccatttctactagatgctctctgaggctcctttccatccagagtcatgcttttgtgattccagaaaaccccactcttctgcagtgttccttaccaatggcaagtgactgaatgctgtgtcttggagtttagcttacgacagtctgtctttaagccccatgcaagagggtttcatctccttaattgcaaaagaacttgtcacaagaaacttttaccaaattcccagggcctaggcccagtctgtcattgggtttagaatgtttttcgcaacaatacaacactacatttaaagactcttttggctggccgcggtggctcacacctgtaattccagcactttgggaggctgaggtgggcagatcacttgaggtcaggagttcgagaccagcctgggtaacatggtaaaaccctgtctctactgaaagtaaaaaaattatccaggcctggtggtgcatgcctataatttcagctacttgggaggctgaggcaggagaatcacttgaacccggtaggtggaggttgcagtgagccaaaatcgcaccattttactccagcctgggcaacagagcaagacactgtctcaaaaataaataaataaaaataaagactcttaagttttcaacacttacccatttcatcatgtctgaagttttctggctttcaaaattataaatgtatcattctgagttcagaatacctggtggtgtcagtggtatcaagcttaatgtcagtattttcagttagaagcttttccccccgccccgtgaaagcttttttttttttttttttaaagaaacagggtcttgccgtgttgcccacactggtctaaaactcctgacctcaagcgatcctgtcccagcctcccaaagtgctaggattacaggtgtgagccactgcacctgtccctacatttttttcttaactatttttatttagttttaataaatacataaaaggtttaataagtaggatatttccagtttctggcaaatttttactttcattcaagatgtttttatagctgtattgatctttatgttcagtatcttgacaagtcgctaataataaacttgtcgagctggtttttaaaaggtaaatagaaaaatgaaggtaggtgttgaaaatgttttgctctttcccttgtagagttacagaaaagccatcctttaagctgtgtacttttcataatctcaaactctgaggtcttcaacagcatggaaatagtcttgcagcaacagttacaggtcatataatgctcaaattgctcttttgagtgagcctgtgccagaggataatcactaaccatggttgattaaatttagttcctcctgtgcttttttagaggctctttacccaagtgtttgattcttcccggctataggaacctagtgtcatgcattttcagtccttattatatttgtcacacaatggcaagaaaatgattgaaaaatcaatatgataaaaatgtcttctcatttaggaaaagtcctgaaaatattagtcattcagagcaactcaaggaaaaagagaagcaaggatttttcaggtcaatgaaaaagaaaaagaagaaatctcaaacagtaagtagatgaccagtttctatatataataacatgtttctgcattattcaatggatactttacactttgcacttggcaatcaaagttgattgttttcttattgagacttgacatttttgcactgtattatgtctctttctgaaattctttacaactatcctctcaacagagccttttctacattcaacagaatctccaggaatagaagaaatttaatttggatgacagagaacactttaagcctttctcaatatacttcttatctatgtgggcttatattaatgtaaaaactttgaagacacaggatttgtttctctctggggatttaaagatatgcataaacttaggaaatgggttttggtttacttttaaatgttgaaatttgtaaataaccatcattccttattctctcctggctggttacagaattcctacgttgccaggtgtgtttctgagttatatagtcacaaagatcgtatctgggattttagggcttgcgttagaaggaaaatatgtttgccttttgatcgcgctgtgggttggaatgcaccttatctcctgggagccctttgcctgaacaaagagctggctccatgggaccgttcacatcacttcactgaaccacccaagcaaggatcctgctggtttagtgacatgagaaccttggggaaacccggcctgtaggacagcagcaggagtagttcttcccctagatgaggctgcatcccccttttctttatgacaacttcaaggctaaacaaggtagagttagccgtttttatttatttatttattttagagacagggtctcaccctgttgcccaggctggagtgcagtggcatgatctcagctccctgcaacctctacctcctgggctcaagtgatctcccacctcagcctcccaaataactgggtgcacgccatcacacccagctaattttttgtatttcttgtagagacagggtttcaccatgttgcccaggctggtctcgaactcctgagctcaagcaatctgcccacttaggcctcccaaagtgctaggcatgagccactgtgcctggcctagttagccattttgaatggttttggttctagttttacttcatacgtaatttattcttatttatttgaagaggaaaaagacacaatcaaaatggcctgttcagatggacttcactgatttcatctataagtttagtagattagacccagtgtttctgaggccctttctattatgaaaattatagaattatgactcaatgggaagtagattaggtagatgttcatagcaatgtgtataaataacctgaagtaagcatttttatctcacagatgttctagaaatgttaacaaataccttcctagataatctttctagatcattctttcacttgcttgcttgttaaatttatgtatttccttataaaataaatatgagttcattatagaaaatttgagaaaaagaaaaagatcgttttaaatcttaataccctaccacaactagtattaggattttggtatattttcctccagctgtttagcctatgcatatgtttgtggcaagaaggtggggtttttttttgtttgtttgttttttaagttttaaattagagcaatccttttagtacgattttgtattctggcttttaacagtttatctatctatatctacatgcacagaatatgtatgttactacaaatactttattatcttcaatcctaatggctgcataatatttctgaagtagtcattaaaaaaactgcccatatttttaactgaagcttacttttaaagtgtcaaatcaaaatgccactcagtcagatactactataattgttacttaaactgggtgaacaaatagacctgatttaacataggaatacttaaaatgtttaaagtgttaataaaacttttatcattgtctgtagaacatgtttctctatcatgagcgttaaactttggctacctcctgaccactgttatttttattttgtggtttttgttctaaaccacaggtctcctggcattgtggggtgattaagtggtagaaagtaggaaagattaaggaattgaaggtgtttttgtatatagatttagattttgatgtttactgtagagcaacattaaacctaaagtccctggctcactgtggcacaagtagagtatacatgttggctgactttattattcagaatttagttaaattttagatattttagtaatatagattagagtaaaaaggaaaataaccattctctaacatcctctcgacttaaactttttattaggttttcataagtttcctttttgatattaaagtaactgtagaatatctctgcataggccataatgccttaagctttaccaacccaaaagttgtttgtatctctgcatcttttaattaaatgaaacataaaatttaagggctttgggatttccaaagagcgctcagtacagccttccaaacctcagagtcctacgcctgacattgggttaactctgcctactttgaatgagcatttaaactgttaatagtttttcactttctagaactcagcaaaaagaaactacatagaataagcttcaaaagatttaaggcattgtggcctttgcataagattccaaaagaatgaaaatctgatgcccagtgtacatagagacgcatgacatgttaaagctgaggtggatcctaaatctagttgaatttttttattcactggtataggaactgagcccaagcaagttgtgggcttgcttcaaagcccaaaaatcacataatcaactgggagaaccagaactgcgttctcctaaataccaagtccaggctcaattcataccatggacccgcctctgtggggagcctctaggagctctcctctggcctcttcagcgatgcaagttaaactcttcctcgaggttcctgtcattggaacaagaaaatttgtgggatgttttactcaaatccctttttacatatacccttaaaagattacctaaatacttgaataccttcatagacattctagttctctgacaattgagatatccaaaacagggaaaagtggtgacaaaaaaaaataattctgtattgtaaaggtgcctgcttcgactcaagcaaatctggaagctgccttgggaaatctggctttggttacatatccagagttacataagtcctcagagcatatggtgactttgccaacttggtaattgtatcctagttagttagtatctcaacttgtgatgatgcttccatttaaatattgaaatttctgtttcttctctttgaaaaccagtatctgaattgtgctagatgttttccattgggtaaatatttctagcagtacagaacaaggcctcttactcaacattagtatcccaccacagtgatcaatacctcttcctagtgatgttttcaggcttaaaagttgaccaaattcgaaagggtttccagtatgttgggattttttttctcctaataggcaaattacatggtagattttttacttgctgaagtcctctctagcaattaggagaagattgaagtttatcagtagctctttaacacagttctttataaccatatttctgatagtaagtaaaaattatttaacgttttataagcttaatgtgagtaggtgtgtctaggtctcttggcattcctactagaggtattgatcatgatctcacattatatacttagaagaagtttgtgcttgtcttgaatttgcattattgacatcttcacatccaggtgagaattggcacagaagctctagatgcacagcaccgagattctttcagtgactgttaatatttagcaatttgagggcttccaagggctagtagtttcaataagagcacttttttttttttttgcaattagtttatttgtatcttatattgcagacagattccaccaacggggagaatccaagcatcaagaaatccctctttcctctttttaattcaaagaatcatttaaagcatagttcttctttgaaaaagcttcctgtagtcactccacccatggtacccgtttttatgtatggtagccctgaaaactgctccagtaaacttgttttactgatgacaacagcatgtcttattttcatgaggtcatattctctttatgctagttaagtacgtgagccagttccataaattcactgggatataaattcattgccattcttctgaatcagttaagaaagttgaagcacaaagtctattaagcaaacaaactagtgaaaggctagtttgtcatgtctgattagccagttatgggcagataacatttataaaagcctgtattttatgtaaggaattctgttaacatttacagttaacaaatatctttgcatttgactcacagagtttgttaacacttgattggcaatttgtctttttgaagccaagttgaattgaccaaattgaatgagctaacaggctccatgaaaaaacagcttgtttccttgtctggcttgagcttttgctggtcagtttaaaaccagggcttttgcttggcatttgacattactcttctgtgttcaccaaaactggtgaatagagcaattgcattcatctggaatttgtggcacagatttccagcatttctctagtacataatgatagatccagatatatcagacagtggtttgggaatatgatccaaaccatactttctcactttgctatccttgaaagcctaccagacttctttggcactaccatatacagtgtttggatcattttcccagcaggaaaaaatttctgttttattgaactggttcacaacctaactgcaatatggaatgaggatacgacagcaattcctggtacagccctatttaactgctctctcttacagcgactaaaactaacagcatgggaatgctttaagggttgaggtttaacaaagctgcatgacatctgccaatttttcctaatgcagggaaaattattaagagggcagaagaatttaactagcatcacttgcattgtgaacattgggagagattggggttctatttttactgggttatttgagttttggtttggtttgctttttagtttggttctcctcttgggtgtggttgcatatcttaattaggcttctcagtgtgcttattgaatgcttgtccatattttgctctaggtacccaattccgacagccctgatcttctgacgttgcagaaatccattcattctgctagcactccaagcagcagaccaaaggagtggcgccccgagaagatctcagatctgcagacccaagtgagtggatcctgcaccactgctagactctccaactctccagtaactgtcctgaggagcggggagggcatgctagagaaaacttagcctctcaatgttacagtaaggctgagcacctcctcaaaatagaccctcagttatagccagatgcatctcgtgagccaggatgaatcttgcttcagtgacccatgttctactgggaaagatgcaagcttctgttagccttcacctagctggaggcaactgaagatgtagtcccagcccataaatacagcccaggaaagagctgagctgtgttaaagaaccataattcatggtaaaaaatgaggcatgccataacatttcaggcaggatgaacacagatggtgggaagattaaggtttcattaaaaataatagcatacaaattgaaagacaggtatgataagttttcttgaaagaatatttcaactcctgaaatccatactgtttttgacaggaaacaggcaaacagttgcattaggaactacatattagactgtattatatagtcacatttatcttccgtaatggaggaataagcagaaactgaatcagtaaatttttcaggtatctgaggtttatctcctttaaacaactattttggttggaaattttgtaatgtatcttttcagtatcccataatgagcattttgttttttgatattgagtattttataaatcctttattcttctgcactataatttctgacaatcctcccgagcttttgaggctataggattacttgtgtctgtgatttcttgtgtcacagatttctgtgattgggagagcggactactgtttttttttttttttttgagacagggcctcaatcccattgcccaggctagggtgcaatggcacaaactcggttcactgcatccttaacctccctgtgctcaggcaatcctcccacctcagcctcccaagtagctgtgactataggtgtgcaccaccacacctggctaatttttcgaatttttggtagagacggggttttgccatgttgcccaggctggtctcgaactcctgggctcaagcaagccacctgcctctgcctcccaaagtgctgggattacagggatgagccaccatgcccagcctctgtttactctttttaactgtaagctgttgcatagaactgctggcagaagttccccatattcccattctatttgccccagccatttatattttctgcttctaacataatataagctggggatggtggaagcatagagaaccagatatccaagtttattggatatgtatgcaaactaaagagacaagcctctgagtgagggcctgcttctctattcccaatttcaaaacaaaacaaaaagaatagagagctttagaactttctttgtgaaaccatttcttttaccaagaagccctctctctctctctctctctctctctctctctctctctctctctctctctctctctctctctcccccctctctccccccccctccccccccttctctctttctttctggcagggtcttactcaatcactcaggctggagtgcagtggcaagattatggctcactgcagccttgacctcctgggctcaagccattctcccatctcagcctccagagtaactggaactacaggcacacgccaccatacatggccagttttttaatttttttatagagacggggtctcgccttgttgcccaggctagaagctcttttcaaataactttatagctcttgctgaatgcagcttattgtaattgcttgatagttacatgtggtcaaggctataaaaatcaccaggagtctcatcgtgttataccaatttaattatttttaaaaagccacttttgagcacttagagtgtacagtgtgctctgctacttcctgtagggagcacaaagctttcttgggaagactttgaaatgatgatggagaatactttcccctgaaacaatatctacttgagtcagttctgaagccatttaccttgggtttcagtgcctagttccttcaaatcttgtaatgttccttgagttcgtcaacattttattcaaactttactgagcccttaaatgcatgtcccttataccatgacatttacagcaaaggtactctgagaattggccccagaggggtcccaaggctagggttgtagcccaagtggccaaatccagcagtcatgattggctgtgaatttccaagtgctttccatgtctcttccgagatcgaggaagaggagattgagccatctttcatcgttcaggagcatgaggctcaggaattgtccagtgagcagacggctctgaggctcctcccctctgccctgaagtcagtctccctccttgatgcagcacctggggatgtctagctgcacagtagacagacaggcagggcggaccactgtgagcccatgttaggaattgaaggcctcctgtgaattaattctttagatagttctgatggggttttgcatatttctttgtgctttgcattttcaatgcccaaatgttaccctccccctttcaaaaaaaaagcaaaaaaaaaaaaaaaaaagtgcagcaagggaacatttgaattttgcaatatcgagagagggaaattggggagataagaacgaaaagggctatacgacttgtagttgagtacattgctaactaaaacattccatattttcagcttctcttgctgctagatatggctgtgtacctaagttctagctggtaaaatataagtggaagcattttgtggagcctttgggaagtcttctcaaaacagagaaacatacaccttttgctttctccttcctgctggttgaagcatgagatcccctgattagagataggatgcaaccaggtagatgagcctgggcctttgattggctgccgtaccagctctatatgtcttatctagatttctaggcttttccattaaataataatacagtcttgtttgaaaaaacccgaagaacagatatggctggaccggctcctccttgcacatgcttgcccttcctggccacacccagtcacctcacctctaagcccccttccctccccagccttatggtcgctctaacttgaatcctgtgtgcattctcatcctttctttcagagccagccattaaaatcactgcgcaagttgttacatctctcttcggcctcaaatcacccggcttcctcagatccccgcttccagcccttaacagctcaacaaaccaaaaattccttctcagaaattcggattcaccccctgagccaggcctctggcgggagcagcaacatccggcaggaacccgcaccgaagggcaggccagccctccagctgccaggtcagatggatcctggttggcatgtgtcctctgtgaccaggagtgccacagagggcccttcctactctgaacagctgggtgccaaaagtgggccaaatgggcacccctataacagaacaaatcgctcacgaatgccaaatctgaatgatttaaaagagacagccttgtaatttgtgctggtaggggggaggggtggacagacaagccagtggggaggggtgggaaagggtgggctgggcttggggcatgggccgggccaagtggtgagccaatattttcagctttatgaaggtgtgtgcaatattgcatgtgttggggccgttgagctcctcgcggccacaaatgctagtcagggatcttagagccacaggagttccttagggatcgccactccccacaggtcttgtgtgagaatagatagagtgtgccattgaggaagaagaaattcttgccagtttctcccctttacattccagctttagtgcaatctctgttgaacttgggaatgccaggatgtgtcctggcactgcaagggataggaaagtcgtgttgaccgatgcccttactacatatttttttctgcctagagtaaatgtggggtttattgtaatccaagagtatccctttgaagggttagcagatgaactgtatgtcttaaattgttttctaaacttccatatttgataggatttgtaacatttatttataattaatattgtactgttaaaatcatatcttttatgttataatgtaaagttattttgagctgtttgaaacattgtgaagcagtgggacagctacagtagtttctataaaaactaaacagtaacatttatatattgcatcaggagtattttattctatatataatatatatatatggtaaatatctgttttataaatatattcatttaaagaaagtatcgttatgacactatctgccatatttttatacatttgtgatatgaagtgagtattatacttctactaaagggagttgaattgtggctacacgtgactgtaacagtatgaaccttgctcaactttgaggccccagcagtagcctctagacatgatccttggtagcagacgagatgcagcatctctttccaaacctgcaggggaagaaagtcagataggccagtgagaattccagcaggcctggtttccgtcctcacacacttggctcctgtttgtgtccagggacgttacttgcacacaggggagaatagattgaggcgttactcgtgggtctttgtagagagaatgtgctcttccacttagcattagtgtagagcgtagaccaaagatttgccagtgaacattccttgttgtgagatcataagaggtacctgtctgcagatcttgcaaaccatctctatgctcctgaatattgtccactgtcccggagactcttggctgatggggtgtgagatatatgtgtggcatttctatttctgaatgccttttttgctattgctctctccaataccatatttaaaaggctcctggagcaattccagatagataaaaaattactctatccatttttttcttcctggggctgtccacttatgacaagattttcatgcacacctgttacgcacacaacccccatcagaacaggacctatcttcccctcatctgatctctttcagctcccaagttactcccaagtatcatcaaaccctttggccatcaagtgttatcctcccatgcctctgggtcatccttgagggaagtcacctcagcaccatcatctatcagtagtagtagatttttggaattagtctctgagcaataatacttttaaaggtccctcccacccctcaaagagataacttctcagtatttattacttgtcctcaaattctgagtgtcagcccctgcatcaagtcagctatgatcaaaatgtgctgttactgttaaccctcccccgagattttgagaatcatagctctgatgattatgaagattataaagactaaggtcctagtttccctgaagcttaaattgtgcacatattgcatttttatataaatactataatgtgtattgattatatagataggtcattttaaggtgctttttatttaattttaatgagtgtaataggcactaaaatgaaactcgactgggtactattactgaaaaaatttgactcaaaccaatagttttgcatgctctttagttctttttctgtcttacttctttcaccagttcagtactgtttgggtagctctgaattctggcttttccaggcagctgcttgatgatacaaatgaggtggaccatcagcagttttgcctggacactaatgactctaaaagggtgtgtatttaactcttctttttcatactagatctctaccttgtattccccccttgcaaaccagaaactacactttttttctctggaaagacttctcactgtgctatgcgcttaggaactgcacggtcccgttgccatgctgtggcattcgaggctcgtcacctaggggctggtttcccatgttgtcatccttgctaacactgggatctcagatgtttgcagaacatttctattcatgacggttcttcaaagaagggctagaatatttgccttctacctagagcaaagtaaacctaattgttgaagagtcaatacgtactttttgtactttcccagatttgagccagaaaatacctacagatatctacaaatgttttcaaccagtgttttcgaggtagctctttaatcctcttctcagcttttgtctgttctgacttttcatccaataagctgtaagtgaactacaatctgcatttccagcatgcaattctcttcctgctcacggagggggatgcaaaagttttctctcacacctaatgggccctctcttagcttttaactgttgttttcccctgttgatgaaaaattactgacatcacaaagattgccatccatggtagaaaggacttgatttaaagtcagaaaaatttgccttttctttaggaaggggaattcatgacatccatgtcctattatcggccgtaacttcctaaagaagaaaaagggtgaatgaaagcttatgttacttttatgaaagtatcactgatctcctttggaaaagaaactctgcttcactgtttttctacctttatttctctgccatcctcgtttttcctctctgaagttctaaataccctttaactgaaccttgttggtcttgctctaaaatttagcctctttctagagcccaagaccaaaagggagtgcttcatgctgaggggctcaagtgagctgactctacaactgtggttctcaactaggggcagatttacccccaagggtacatttggcaatgtctggggacatttggttgtcatagctgggggggaggtgatggtatgctactggcatcaagtggttagaggccacagatgctactaaacaccctgccatgcacaggacagccccccaaacaaacagtggtccagccccaagcactactagtgctgaggttgagaaaccctgccctacaccatcccaagcccaccagtctgcagagcttggctctggccttgttctgtccaggctacagtactgcaggtgtgatttcttcaacatcacattctcttaagagtcttcaaccactatgcctgaatccttggaatcctattgttcgtttccattgtcttgggcctgctaaaaggtgcatactttggaaggagaccagagttactttataggtgttggagaacttaaattctaggttagcatccttagaaaatctttcatagagccatgaggcttatatttagaagcaagcaacagcctggcagattggcatgatttttaccaactgctcaaaggcatccgtggctttcagctgtgtctcccgaaagaaaatgtctttgttttttattcaagtcatttaatagctctttacaaatattagcatatggcagaccaattagaagcaaaaaagtccgtattggtggttgtgatgtggctgttatagaagtatttgtgctgtatgctttggttaaatctgttttaaaacatgctttaagattcaccttacgcagttgtactttaattctaagctcagagctatgctgtcagtctctagtcacgccatgtattataaagtatgttgtggttgtagagttagccagtttagcatgttcctaatctgagaattagtggactatactaggaaatgctatcccattttccctttccagcccctcttagttaagatcatagtatcctcacttcttaaactagtctttagagtaaataaggaaaaaagccatttattttcttctagccatgtattattgagaatgactcatagtacaactttttttcaaaggccagaggattactttgcaagtgtgtagaaagatctgtctatttctgttcacctgggacctggtggtgactgaactctttcagcaagggcaatggctcaatgtgattcggtgctggagctcagctgggactcagtaaatctgcacgttctctgctggtcagaacatgtttcctggagagcattgcttttctatctagaagttcgttacctcctgcatgatagtgggatattgagatgtgggttctaagatccacagactcatacttttgtgaactttggaatgtggtagggtacactgaaccaagtcagaaaatagtgaaatatttccttgcctccttcagttcatcactaagaaagtgtgtaggcagagaaaacttacttatggtttgaagaaccacaattgtttttgaaaggggacatagaaaagacagtacaaaggttgtaagtgtcctgtcgctaattcccagggccagaatctcacaagaagatcctctcaaagacttaaaagcctggcttacaaaaataaccagaaaccaaacttgtaagcagttacaatttcttccttttgcttcttgaccagctgagatacagaatatcttgaggtctggttcagctgatgaaaaattctgtctcagaaacgatgagtaagaaaccatacaagaaaaagaagtccctcatctatctgcatacacgcaatgtgggagaagtggggtggctaggaaactctgggcctgctgcccccttcgattctttttttttttctttgtgaattgaatgtacgatacaaatggtaggccttcatgtgagccagttactacatgaatcttcatttcccacagtggtttgttcattcatcagcgttaggcttggtcctggctccacctttctcctctccgggcactgaccccacctttccgtgtatttactgtaggctattaaatatgatcatgacccgccttgcattttcattcatcacctgtttatgcccaaatttaaaggaagtttgtctcattttgccagaaaaaaattgtaatagtcggcacgctggatttgtagggccagcaaaattgcggcagtgaaactagtttcacttctaaagcccttcatttcccacaaggttaagctctcgaaaccccatttgatccttggttcctatttcgatcctcctttggaatctgaaaatcggtctccatgttgtatgcagattagaagttgccttgtttgttactcttccaacacagggtatcagggagaaagaggccttatctgttcctccatcccccctgttttgacagactgctaagaattcctcaggacttcctttggttggggattttactttcccaaaagtctgatctgatttctttcaggggtagacaagcttgtcctagtgctctgcttcaggtcttatcagaagaaacccaggaatagaaaaggtagatgccttgacttttgtccctgttgtggggactaaagtgttttttgccagaattgtcaaaagctccggttcaaactctgtagagtttcatggaaaaacaaaacaaaacaaaaaagatgcttatcgtcccggagaatgtgtaagtaagttctccagcacggcttaggttttccaaaatggaaagcaaagcttgcagacaacctgttttctctagagacacacaatgattctggccctcagtctgtttccctccccttgtttactctttggtcaccgatcgagtcaggctagaggggtaatacggtgattaaaagaagtaaattctcactgtaaacttggattgattaacagaaacaattaaaccaaacaaaatcattgccccaaatttctatctccaagaattgctttgtgccattttgaattcaggtagttattctgtatatacttagctaactattcagagcttcttcaatctctagtaagcttgaaggtggtgtctgggaagacacagggcagggtgacatttagactctgttcattcttaaaaatagggataagccagaatgatgtgacatctagtatgtggtagatgaagaatcagtggaaattcttaattgcacagactttataatccattatataaagtgtaattccatactttttactgtggcaagggtgtgatgtgattgttaatctttttaatttttgaatccaaactgaatttaaagtgttgaatacttaaatcctcacaagtgaattatgaaccatttgtaaagtgtttctataactctttgtatcatgtgttggtacatcttatcaagttttttctggcatgtaattccattctaaacttatgtaaaatttctattgttgctgtaaatattacacaaatatctattccgtgataaccttcattatcagcatgaaatggttaatttttactgagcacaatgtatttttgaatggatcttcccaaatgtctttaataaaatgcagattttgcactgactgatgtgactgccaggccgtcccaatcttgagcactgtggtccttcgtgtttgaactgcgaacagctccattttagttccttcttgggaagaaagaatgcattcgaattcaaatgagggatgatgggcctttgaggttgtaatcagtttgagacagaaattaatgtaaaactaggcaaatcctgtaacttaatgatgttgatctttgttttcctatttataaagcttttttccccttacggcattttgaaaactttggtttgttttatacttgagtgttgtcacctttgcacgtcgctagacactcacgtggtagtttgaggaggatgggaagagaggccaatcttgtgctaagtgctatggagaaagcaaagatgcacagcttaataagggttttttgattctagaggagaggtgggcaagcttttcctgtaaagggccagatggtaaatattgggggctctgtggcccatcagttccctgtcaacattactcagctctgcctttgtattgcagaggctgcatggataatatgtaaatcagtaagtgtggctgtggtcccgtaaaactttacttatagaaacaggccatagtttactaacccgttttaggccctcagtttcatcatttagggtaacaccaaccgagtacatgttcaatcaggagggaaagaacttagcttttgtgataacttatagatgaaatattccccagttttctttctctttctaaacaaagggtaggagctgaaagtcagtgctctccattcttaaaagtcctctgtcaaccacctcttcactctatctccttaagtgacatggaaacttgtggcctgtgctttcaactataatcttaccaagactgaatgaaagtatttggtgcttatactttttaatgttcatagcacttactatggccaggcacaatgcccaagtgttttgctttattattattattattattattattattattattattattattattttcacaacaacccagcgaaacaggtactattattatcccctttttgtaaatgaggaaacagatttccatacttgacattaacctgcccaaggtcacccagtttggaagtggcagggccaggatttgaagccgaatatgttcattgtaaagcccatatacccttaaaagtcactgcacgtccacgtatggtaatgtggtcacaatcagtattgtttctctttagtaattcagatttattcaagtaactccaaggttcaaattttcaaaaacagtttccaacacaggttatattaaaaactttgcctgaagtttactctaggtgcagaaataaagacaacttagtcaagtgaaggaaagggtaacagacttagaaatggctatctacactgatggaataagtatactaattagagcaggtaacaagtccccacgatgtataacatattcttctctaaaagctcacaacaatttatgtgccaccttccatcccctttcccagcagatggtaattgatgcaatttgagaatagaacacttcattgaaacaagtcactggaggtcctctggggatgcagcttaaaagcccaggatcaggccaggtgtggtggctcacgcctgtaatcccagcactgtgggagactgagacgggcagatcacctgaagtcaggagttcgagaccagcctggccaatatagagaaaccccgtctgtactaaaaatacaaaaattaggtctgggcggtggctcacgcccgtaatcctagcactttgggaggccaaggtgggtggatcacgaggtcaggagttcgagaccagcctggccaacatggtgaaaccccgtctctactaaaaatacaaaaattgggtgtggtggtacatgcctgtaatcccagctgcttaggaggctgaggcaggagaatcacttgaacccaaaaggcagaggttgcagtgagccgagatcacgccactgcactccagcctggcaacagagcgagactctgtctcaaaaaaaaaaaaaaaaaaatacaaaaattagccgggaatggtggtgaatgtctataatcccagccactcgggaggctgaggcaggagaatcacttgaacccaaaaggcagaggttgcagtgagccaagatcgcaccactgcactcccacctggacgacagagcgagacgccatctcaaaaataaataaataaataaatccctaggatatagagtccgcttgcctgggtggagtcttggctccatctcctacatctcatgtgacttgaagcaaggcacttcactatgcctcagtttccttatctttaaatggaggtaatcacagtacctacctcagtgttgttgtgaagatttaatgagataataacctgcagagcacttgagagtctcaagaaatatgagctcttataacattattgctattgtaaaacattgctattacttctgtcccaatttggcagtttcaggaaattgagaaggaatgtcactgaatctttaatgccagttacacagagctcagtaggtgtccgcacagccctttagatgcacgtagcctatttgatcttcgtatcagccctgtaaggttgggcttaagaatgacccagcatggaagtactcttgggaccacaggggaagcaacagtccttgtaagctgtttgtcagtgggccttagcaaccaagccccaagtggacagaaagatggggttctgtgagcatccattccaagggtcactttaggggtgcaatcttctgggctctgagaatggattcacagcagcatctctatctggaaatacctttgctttgtccaagtaacctcctcccacacagagtacccgaatcagctcagattttttttccttaatattggcaacacttaatgctacttctttgttcgtaacatttcatttaattatttaaaaatctgcaaatgttgtgtatattttaccgcaatttttaaacaaactccagtgtagaccgtgctctagcatttctaaaaataaaagtaaatatgttaaaataaggtaagagtgagtttttcctacactatgtataatttttaattgaaagtttcccccacaaaagaaatgatacttggaagcatagtttgtgtgtttgacagcaagattctattaggcttcagatttccctcaataaaagttttagtttttatacattctgtcatgaattgaatgaagtaaataatatgctgttgtaagcaaattatctgcagataaatgtcttatgaatcgtatatcttactgtttattaaattctgaagtattgagcagtttccaatgtgaaatcccagctggcttctttgcaatgatggacaagttagttataattcatatggaaattcaaggaacccagaatagccaaaacaatcccgaagagcaaagttggaggactcacatgccccaatttcaaaacttactacaaagctacaataatgaagaaagtgaggtaatagaatttggagtccagaaataaaccctctcacatttatggtcaattgttttttgacaagggtgccaagatcattcaatgggggaaagaatagtcttttcagcaaatagtggtgggacaactggatatccacatgcaaaagaatgacgttggactcctatttcacaccatatacaaaaattaactcaaaatggaacaaagatctaactgtaagaggtagaactataaaactcatagaagaaaacataggggtaaatcttcatgaccttggatttggcagtggtttctcagatatgacaccaaaggcacaagcaaagagaaaaataaattggacttcatcaaatatttaaaattttgtgcttaagaggactctatcgagagggttaaaaagatccacagaatgggagaaaatatttgcaaatcatatccaataagggaattagaatatacaaagaattcttaaactcagtaagttgtaagccgatttaaaatgggcagaggatctgaaaaacctttatccaaagatgtacaaatggccagtaaacacatgaaaagatgctcaacatcattagtcactagggaaatgcaaatcaaaaccacagttgagatgcaacttcacacattatgggtatagtcaaagatggacagtaacaagtgttgctgaggatgtggagaaagtggaagcctcctacattgctggtggaaatgtaaaatgatgcagccacttgggataatagttcctccaaagattaaacaagagtgactgtgtgtcccagcagttttactcctaagtatatacccaagataaatgaaaacacacatccgcacaaaaacttatacacaaatgttcatagcagcattattcataatagctaaagagtggaaacccaaatatccatcaatggatgaatggataaataacaatgtgctcttgacatgatactgaacaatgatgttcagcaataaaaaggagtgacaagtgacatagtgatacacatgttataacgtggatgaactttaaaacactatgctaagtgaaagaagccagtcacgaaataccacatactatatgatttcatttatgtagaacgtccagaaggccaatctacagagacagtcgattcgtggttgcagagggcttggggtggccgatgggttggggagtgttggctgatgggtgcaggatttctctttggggtgataaactttctaaaattgatctagtgataatggttgcacaactctgaatataccaaaagtcatcaaattgtacactttaaatggatacaaattgtatgtgaacttaatctcaataaagccgtgacaaaagtttccaacatgaactcttatttggaaagcctttctccctgcctcactgtttcctcctctcctttttccctgaactgcactctctcgactcctgtgtttgatgtgccttaactcttaggatactgccattttgtctgacagtccatgtcgtgaccaaagttaattcacctttccaaataagggtctctgttcaggcatttctatccaaaatagatttgtcctgtgtcctaaggccagggataagtccccccaccccccccccccacccccaacaccctgtgtgatgtgtttatatttgagagaagattgggcggggaaaagcattttccgaagttcaagcatacagcatagggactagaaagatgctgggttggatataaaataattgagcccccaaagcatcaagaaggatgtttggggcttttagaaggctgcctgttcacagaaaaggtgaatgtgttgtccagcactgtattagcgcgagtctagtcacttgccttggcatttgaaaatgaaaagtaactcggaaatgagctgctagcaaagactaccctgtgtctggggccagaacagtctttagagcagcctcgtcctctgattccaccacctgctctccatatccctctcctgcccctcccccgtgttaacagcctctcccaggaaggggcctggaaactcaggctgcgctctaagtggccaatgaggcctcccaatctaaggcgccgcctccaggaacggaaagccaggcccattccttcccagagagcttttcaggagcaggcgcagtttgcgtattgcaaggcagagggtggagggtgagaagctttcagggaaaaagctacatggtcctttttatgatgtgagtccttcccacttcctgcgaagcatgtagccagctaatgagcctcctctgagtagccagtggtagctcctgggccagctgttctcgaactatgtttggtttgctaggaaatggtagccctaggtaaagggcaattgtactgtgttgtggtcatttggggtccctacatatactgagatgtgcagcctgtcctgtatgatcacctaaatggtgaccacagacacggggaatttgctggaatggattgcataatggagctgtgtgtattgggcgctctggtccctccccaatccctgtgttcatgagggtggaagcccagatccgccttgaaggtaagaactgtgagcagaggaaactcccctaccttgggcttttggtcatttgtcacgtatagcctctcagggcaccgggattctcacccaccgcactcatccctgccacccagtcacccttgagaccctcagctgcctccccagggctctgaagtcctctttggcgatgatttagtggaaacttaactaggaggagctgctcccttctgcattcaaagccaggctttaggaaactgtatgtttctgtcttgaatgtggtaaagcaaatgaattttcaaattatcagggctgctttgtgttcccctgagactgcacctttcacagtatcactgagacaaaaaatgagcagaaaattacccctgctacttaggcttttgtaagaaaattcgtttcggggacattttctttgttctgactttctctggccctgagtggggaataagttcatttttatttcattgaaatcagaaagctatatcttaaaaaaaaaaaaattatctacccagcactgcagttacaattgctttgcgaaatatagccctgtccatctcggtggtgtgtgagggggtcccctacggcccgctctgtgccagtcaccccctggcaggcgccgagctgaggcaggcatcaggcacacttgctgacgcactccagcagctccatccggatggcaatgcggacgtgccagcccagcgggatgaggcggatgaagcgggagatgatggggggccgcagcaggttctgaaccgtggaggtgcggtccgagttgccatagaagacctagagagatagaggaaatcctgtcaccatcacatcggggagggaaaaggaagaagggttcctttctggagctagccccaacttttaactatagaaatgattaggaagtagttaaagcagtttgcgggtgccccccaaaatctgaccttgagtgattgtcatcacacctacatgcttgggacatctggaactgcaccatccaatagggtggccactagccaatatgtctgtttacacttcaattaattaaaattagataaaaattcagttcctcagtcacatgagccacatttcaagtggccgccatattggacagtgcagatgtgaacatttccatcacagaaagttctattggagggtgctgctagaaaatgccacttgactcatcgcttttgagtttttatcctttgcattttgacattttgaaaaggcccacatcacacttacatgttccaaaggtatccaaagtagggctcaagtgaaaacccgtgcttggctcaggagttgtaagccaaaacttaaatgtgtattcctactttgatacaagtgatgagtacctttccaacttggaaaatgtttttttaaaaagacataaaaacttggccaggcgcagtggctcacgcctgtaatcccagcactttgggaggcggaggcgggcggatcgtttgaggtcaggagtttgagaccagcctggccaacacacagtgagaccccgtctctactaaaaatacaaaaaaattagccaggcgcagtggcaggtgcctgtaaatcccagctactctggaggcggaggcaggagaattacttgaacccgggaggcggaggttacagtgagctgagatcacaccgttgcactccagcctgggcaacagagtgagactccatctcaaaacaaaacaaaaagacataaaaactcgaaggaagattctggaaaggggagggtggtgccagagtaaagagaaagggggtttgcttagtgtttttaaggatgtaacataaaaacatgctgtgggtgtttgacgccatttccaaagaaatcattctttgccctcttaccaaagtcatggtgctctgcctgatgccactaggacatttcatctccttctgggattatctcctgaaaatatctggctgttgcatttggccccatccatccacaaaacgggaagggcctggtctgccatgttcttgcctttctccgcagtggcaccgccccacaccaccctctctattgcagtttgtctttgagcctattcaagtcaggagccaggtgaagagaggggagggtggaacaggctccaccagattgcacaagtgcaggggtgaagtgcctctttgcaaagaaccttcaaggccttcagaagcacagggcttgaaaaacttctcatgtcttttgaagaggccagctaataagaataaaaatgaaattaaatgtccaagtatcaagatggtttttcctcttgtgttcaaactccttggaacaacccatgaacgtcttggccgtacaaattgtcatcagagacttacaaagccttctgaatctcagctgtacatgtctacttaacctgattaaatgttgaaattagcctggggaactccttactcttaggcaaaaggatgtttaccatttccaaagagctagggagtttttaattcatttttattcatagcaaatatatatatatatatatagtcaggagtctactgcgtttagtcaatggtgaagaagacttctgtctcaatccacaaagattaataggatgtagagttgcccaaaggtttaagttcgtctgtgtttgtgctggtgaagtccttttaaccatttggctaatgggtaacttgctaggttctcaaaaggctcccctctgtcagtctcaaacaataggagaggccacatctatataaatggatgattctctacccacatcaataacatcagaccatacccgtgaagcaaagtgcattcaatgatccagtgagttgaaatagtccaaatggtcagtcttaagagttcaggcaactgcatgctgatatggaaactcagacaaattttttttttgagcttaagaatagcattcatttgcaaacaaactgtgctgggcaccaaagcaagcccaggaaagagagcacagcacattgtgggggaaagcgcagatgatccactgtgctgtggagtcggtgctctgacagagggcagtgacaggagctcggggacaggaggggaagtcccagagggtgcgagctgaagttggtttgggataagcccaacttacccggttgtttccagtctggtccttgtagtaaatccagttcaggcgctcatcggtcctgtactgcacgctgtacttggtcatccactcatcgatgtcacagcgcccctgggtgaggatccctgaaatcactttgatctccttcagatctatctgtaaccactggctactgtcctggaacttggagagccaggcacacctgccgagaacataccgagtcaccgagagactccccctgtgcatgtctgcaaaaagcccgcaggtgctggctctcgaggggatgccagcatccaaagagccccctgccaagctcgggcagtctgggctgcagtctgagccttgtctcctaggaatggccagcttccgttatacttaacttgcatctcattctccctctccctgcatctccacctcccaagaaaagatttccagattcgactaatttgtcaaagaaatgcctcagagtgtggctgaaattgcctttgggagtggttgaacatgtctgtctgcaaaacacgcaggtgcatggctgttagaccaccagcccctgccctctgcttgagactcccagggtgaacctttctgcgcatttcactctcttcacacctatttgtgtttccctcggttggtgacattcctgcctcgtgcagagcactgacccatgtggatctagaagggctttgacaagtgtcaagccagataaccgttgaagcaactaagttgtttttttagctacattcctcataaatcgtggaaacctatagtagttccccccgccacctccttttttccttttagtgtgtattttaattagctttgtaggacttaagccctgggccaccttctcttccttttccagacttattccttgggtggctcctgacttttcacttctatcccacaccttttctaaaccccaaatccagagagttcagttgccagctagaggacttctgtatgcctctcagcatctcagatgaaacacgtcccaatgtgagcccctaagtgcccccaccccaccctgctttcagaccccacgtctctgagttaaccccatccttgcatgtgtccatgccggccacctgagaaccatcctgggcccctcctctccacctccagtgcccaatctatctattggctccatctccaagtgcctcaaattcttctacttctgtcggtctccaccgccaccactctagcccgtgtccccctctttcttcccacacctcaactactctccctggattgctctggccccacaggaaccagagaacttttcttaaaacacaaatgtgcttgcgatactcttcgacttaaaatatttatccggcagagtctgctaattatcacccgatactcccttcccatcctcatttggtaatagaacccctgagtttcatctgggcaaatggccatctggctaagatggcatttcctagtctcccttgcaactagatggggccccctaaccaaactctggtcaatgggatgtgggcagaagtggccaatagaatatgtttgtgttcttaaaggcaagtcatgcgcactctgctgctcttttgtttctccccactaactagacggtggatgtgatggcagaagacagagacaccattctggaccccaagatagacgcttcatgttaaggacgacagaacaacaaggtagagtctgggccccgcatgccatcaagctgccataacgaccctagactactgaatgaaacttttttttttcctttctgagacagagtcttgctctgtcgcccaggctggtgtgcagtggcacacaatctcggctcactgcaacctccgcctcccaggttcaagtgattctcctgcctcagcctcctaagtagctgggattatagccacctgccaccatgcccggctaatttttgtatttttagtagagatgaggtttcaccatgttggctaagctggtcttgaactcctgacctcaggtaatctgccccccctcggcctcccaaagtgctaggattacaggcgtaagccactgtgcctggctgatgaatggaacttttaagtgagcaagaaacacacttctacattaagtcactgtactttggtgctctttgttacaacagcatgaacatgtatgctaactaatacgcactcagggtcctcccattatccctacagtacggaccacagtcattaacgtggcttctaaggtcctgcaccatctgacctccgcttgcctctccaccttgtctcacttgtgcttcaggcttgctgccctgcttatgttccccatccacaccctggaggtatcatcccgactcagggcttttgcacctgctgtaccccacgcctcttcccctccctcacctggccaacttcaagccacaggtcaaatatgttttccttagaaagccttccctggctgcatggatgaggtctttcttccttcatctctcccccagcactcataagtacattctgtgtcatttgtttattagagaggcctatattttttttcatttttgagacagggtctcactctgtcgcccaggctgtagtgcagtggtgtgatctcggctcactgtaacctccgcttcccaggttcaagcaattctcctgcctcagcctcctgagtagctgggattacaggcacgtgccaccacgccagttaattttttgtatttttagtagagacggggtttcactgtgttggccacgctggtagagaggcctatttttttttaaaagcacatgaaaaaaaatccccgggccctgcttacccaaagccttgactgttgagccgggccttgtttgcagtccacgaagaataccagcccacatactgctccgggttagagcaggtgatctggtccggtgtgacctcccctgactcgaaacccagaggcttgtgatatgggcattctgggaaaggaaaaagaattcacattcacacatatctcaatactcaacaagcaccaggtgactgaaataacaaaacaaacccatctgctttgcgcttcggagacggagaaggctttacctgtctctgtggttcacaatgggtacagctgtgtcttcaacggttcactactcacgcaagaaaggaatgaaggatgaagtaaaggaattgccatagagactcaacagcctttgtaaaagcagagggaagtggctctatggcaacttcacaaggggtgtgtggaattttgagaaatacttcacctcctccaccaacttagagatctaaaaaccaagaggtgcacagtgaaataccatatttaaatgccatacatctttatttcccccattaacacagatttagccatcctgcctcatgacgtcaggtctcttgttgtccttgggcagcagatcatgccaattatagggacaaaaccacagtgagacgcaagaagggcgatgacatattgagatatagagaatgacttcctacttgtaaattgcagttttctcaccagtctaatgaaaaaaaaaatgggtgaaatgtgcttgggggactgttgagtgagaaacagctaaaaggaactgctttttcccagtggtagtacccaaaggtggttcttctgtgttgattgtctcccccttcctctcgtctgtatgtcccctcacagtaaaaacggtgttgaggctgggcacggtgactcatgcctgtaatcccagctactcgggaggctgaggcaggagaatcgcttgaacccgggaggcagaggtttcagtgagccgaggtggtgcctgcagtggcaggcacagtgtcgagttacctggtcagaggctgccaattttcaacccagtattcattcattctccccttcttctccttttttttttcttttgagacagggtctcgccctgtcctaggctgcagtgcggtgctgctatgtcagcccactgcaacctctgcctcctgggctcaagcgatcctgccacctcagccttctgagtagctgggaccacaggtgcacaccaccacacccagctaatttttgtattttttgtagagacaggattttgccatgttccccaggctggtcttgaactcctgggctcaagggatccacctgcctcggcctcccaaggcactagggattacaggtgtgagccatcacacccagcctccccttctttttgactaaagagctctccttttattgggagcagcaatgtagccagctgaataaagggcctttcccagcctcctttgcagttagaagtgcccaggtgacataacttctgaccagtgagacataaagactgcctgctgggatttctggtcaggttttgcttgccccttcttttttcctgttgcctagatcacatctgatagttggtgtgacagtaaccatcttgcaccatgtgggtaaggccgagagaactgcagaggctgagtgcagtggctcatgcctgtaatcccagtgctttgggaggatcacttgagcccaggagttcaagaccagcctggggcaacatagggagaccccatctcgtggctcacgtctatagtcccagctaccggggaggctgagggaggaggattgcttgagcctaggagtctgtggctgcagtgagccatgatcacaccactgcattccagcctgggtgatagacactgtctcaaaaaaaaaaaaaaaaaagaaaactacagagaccttagccttgataaccttaagtattataactccctacccctaattttttttaccatgtgagttaaaactcctaaatcaataagccagtatttagggggtcttgtgcttataaccaaacccagttcctaactgaatttctacagaaaacaaatggcaaatatattttccttttttggttagagacctggtctcgctgtgtcgcacaggctggagtgctgtggcgcagtcatagctctctgcaactctaactcctgggctcaagtgatcctcccacctcattctcctagttttctgatgatgaatgataaactgcaattaaggcaaatcatagtattttctccagaatttttcaaaagccagtaaagttgaatgaaacatgcttgcagagacggccatgccctgtccccagaggctaaaaacaggccagcttcagacctctggccggggaggcttaacttcctttctgccccaatgcacgaaaggaataggcctgatctcactagtatctgcagctctgtgggtctgagggtgagggcacagaatttgtagtttattgagtactcaagtactcaagaatgcagtttccaggactccaccccagagcaattgcatttttaacaagccaacttttgaaagtgcaccttgaaaaccttggcctgccagggaagacattctttctgtgggctggggatcccgaggactgagtgcctgcggactcgagggctcctcccccacccgcgacacccctccagctgggaagacaagcccgagcgatcagggggaggggcacaaggccaggtggcagggatttttcatgggcaaaattctaaccttgggtgtctctgaggcccctccactttgagcatttgatgactgaacctcctttttgttttccacccccacccgccgccgccgccccgctcagggctactagctctgagagagtaggcagaggggaagggaaaaagccagtgccacctctcccagtcaccttattcttggcactttgctcttcttcatctgtttccccttcacatctcttttgccatttcttcccaaatagctcatctaacactccagagcggtctgtagccctgcaggggtacctggccagggccaatggccttgacagcctgggagggcctgtccaggcagcagagaatgtgtggctcactctgcgatctaaagacccgtgtgtccagacgtggatgctgtacttactccccagggaaggtgacgctctcactgtcaccttggcttcagctggtgtctgggagccgatgcctgcctcccgggccccaagcttcattccactgccctctgaatattttccaggagaatacttctgctgtggtgacccaaagaagcctcacactccgtgcgtcccaaaccgagcccttcatcgtccaatctccagtcctgctccctatccagtactccaggtccgaggcacttccatgtgcccgacactccaggtccgaggcactgatgctttcagctgcccaacccagcaatccggtaagcagagactctagaccggtggggctcagcctgggctgtacctcggaattgcccgaggagctgtagaaatgcagatgttcaggccacacccccagggattctgacatcattggcctgggcatggggacaaagctgcaggtgattgtaatgggcagtcaaggtcaagcaggcctgcgtccagccaatgacacctggggtaggggcccaccctctcagcgtgtgcgcaggccagttgcttaacctctctgggtctcagtctcctcatctgtgaaatgggggcatgatgtagtacctgtcttcataaaattgctgtaagattgagtgaaactatttggagattgtagagttcgtagagcacagcgtcttgccaaaaagcagcaggtgcatgacattggtggaggtgaatttgtgagactacgttgataaccttcttgaattttgcatgtttttctggcaaagactcaatagggaggaaatccattgcccctctatcctactctgttctgtccccattaccctccccgtccccccaccaccgcaccccccgccacaccctccagagaatgaggccagcttcatgtgactaatgaatggtttcggctgtccttgccccaggcaggagcaagtgtgtgtgtgtgtgtgtgtgtgtgtgtgtgtgtgtgtgtgtgtgagagagagagagagagagagagacagagagacacagagagagacagagagggatgtgagagagaaacttgtcgacagcatcccttaagcttatggacctggaagatctaggcctcaccaggaattagcgcattgcccaagagaaggaggtcacagccccagctaaagtagcagggatgtggtgagggcctgagcgcagcagagagggacctgattcccctgaggggctggactgggatgggcttgggagccctaagctctgggcacgctcagaaaacttgggaaggtccctcggactgagtatggctcagagggagaggagccacccatgagacgtctgccttccaatggggctgtggccagcctgccctcgcaagctcgtggggggttcatgtagtctaaatagggagaaaagaccttcaaaaatcctgtctgcacactcctcacaggccattacaatggggcactccggctggatttcttctaacgtggaaaaatagaaaatgtgacatttcccacactgtgtgtgtcctgaagaagagcacactccagttctcttattgtgatttttcctgacttcttcttcccctttcctcttccttctgtgggcctggttgagctcttttcaggtccacatgtggcctgcagcccttccctgaggccatcccctcccgtccacacccctccgcctggccccccatgcctcagccttcagatctctgcccgccctgagctggctgaggggccccaggtgctacctccccagcacccttcacacctgtcacgcacccctcctcctcaggcatacttcactgccatctcccctcgcctgcctccctccccattctccccctagctgagcagaatgcccacaggtgctgggcactctctaggtattgactggacagatggatggagagatgaatgaacacacaccatcgccccatcttgggtggccactggggacaagcataggaaatggcatttcgaaacaggcagcagaggcctcagggaagaagtagacactgactgcgacctctggcctaatcaaaagaaaccataaattgagtagatgctagaaggcaacataaatagtgttgtgaaagaattaaggggatccaaggctgggtgcagtggctcacgcctgtaatcccagcactttgggaggccgaggcgggaggatcacttgaggtcaggagttcgagaccagcctggccaacacggtgaaaccccatctctactaaaaatacaaaaattagccgagcgcagtggttggcacctgtaatcccagctacttgggaggctgaaacaggagaatcgcttgaacccaggaggcagagcttgcagtgagccaagatcgtgccactgcactccagcttgggcaacagagccagactacatttcaaaaaaaaaaactaaggggatccttatcagacacacacagaatatgaccttcccaagttttccacccagtgtcactttgctgttgcagctattagacctgtttctatactcatttcacccttagggaaaagcctacatcttctgtggctcaaatggctcttctgagccatgatgtgatcatgagatagataaaggcatatttgcaatatgttaccagcccaaggctgtgtatatttcatattctagcctttttactttagtggctactttctgagtttgtaggcaggcttataaagaatgcagatctaaagaaacacagaattcagggactttcttaacacaagattccagacagatgtgaatagtgttatgcatagatattagacttgaatatatgtgacaatatagtagagtacagaagaaaatatgtagaataatatttctggaagaatggatcataagctcaagcatcatatagaatagaaaatctagaatcaaaaggaaccattagcaaaccagtagatttcttatacttttgataatttccctaccctattttttgctctcagagtgccggggtaatcttggctcaacggtggaagagacagagcttttagtatttttaatagcattaaagtgaagattaggaggccagaatgcatgtggccttctgctccgtggggggcccgggcattagccagagtgcacctgctagcgctcctggcagctctgagtgaccccgctgtccttctgtgctttccagggttctctttcttcgtgagacacgttatgagggaagccctgattcacagggcccaggtaaaccaagctgcgctcctgacataccatgagaatgcggcactgacgggcaagtgacttctgcaagcctgcggctggtcccaatgccctgaatcacctctctcatggaagaaccaattaacaccaatgaatcaaccattaa

SEQ ID NO: 20 - DNA, 18043 bp, Homo sapiens
tcaaaagtggcgggtgtggcgcggggctggtagcggccggagccgtgcgagttctctaccctgcttcgcgagcgggcgagagaacgcgagtcccaggatccccggcacccagttctcttccactgcattcccccggcgcgtgtgggaccgaggtggacatggatccgcaggtgagtaggggcggcgcaggtgtcctgccctggggatggggacgaaggctgaccgctccgatgctgtcgcgcccccggctcccggtcggcctttgtcatgtctaccgggagagcgaaggtccgtgcgcccccgcacaagtggaaaggggcggaggcaggagtggagacggcttagagcacccggggaggtcggaaggcacgtctgtctgccctcccctagcttcaagtttctggagcccctcccttaactttcatgtctccgagatttctcatttcgaattctcaggctcgtctgacacatttccacttctttattcctactcagggtgtgattgcagtgtgtaagaagggagagttctgatatgacttcttccttttggggacatggtgtctgaggccacatccttgctgaggtccttttgtgttaatcgcctctccttatcactgctgcttcggagtgtaggaaagggagaaggagagtagggtaatctgggccaaaagacttctcattctctctctcctttcccaaattgtgcagattcctgcccaatgaaactgattgatttagttctttctcttaaatggtgccctgctgcaccccacaaccatatgcagcttcctgtctccagtgaagagagatgaatgtgtgtgacagctggagtgtacttatctctggtgccaggaaaggtctgcctgaatcctttgtttactagtatttcacgttcaggtttccctgaagttaggattcagccttaagagagattctttctctcgtgacaaccagagagcagagtagtattatgtgacagtaagaagtagtaaaagccttctcagatctattaatcaagtatttattgagcacctactacatgctaggcgtggttgtaggtacttaggatgcagcagtgaacaagggacaaatcgttgccatcgtggagctgccattctatggggatacagacaataaatgtaataaatgaattatataactgccagaaggccgtaagtgctgtggagaaaaggagaaattcaaggttgaggacataggggaggccaactggcgggttagagtattaaatagggtggtctcagtaacccccatggaaaagatgagttgaataaagacttgaaggaagtgagggagacagacaagcagatagtgagggaagaacatttcaggcagagggaatctgctagagcagagtccctaaagagttgtaaggagggaagtgtggctggaatgaagtgagcaaggggaaaagttgtgggaaaggaagtcaggtaatgggtagtggggttgctgatcacagtttgtccttgtgggggtcgttgtgaggacttttactctgagtgagatggggaatcattggatgattttaagcagagagataagatttgttgggtccaccagattttcgtaaccatagcaccattgcctttttttttttttttttttttttgagacaggttctctttctctgttcccaggctggagtgcagtggcatgatcatggctcactggagccttaacttcctgggctcaagtgatcctcccacctcagcctcctgagtagctgggactacaggcagctgccaccatgcctggctgattttttgtatttttaatagagacagggttttgccatgttgcccaggctggtctggaactaactcctgggctcaagcaattcgcctgcctcggcctccgagagtgctgggattacaggcatgagccaccgtgccctgcaacatttttttttttttttttgagaagtagtcacgctctgtcgccagcctggagtgcagtggcgcggtctcggctcactgcaacctccgcctcccgggttcaggcgattctcctgcctcagcctcccgagtagctgggactacaggcgcctgccaccacgcccggctaattttttgtatttttagtatagacagggtttcaccgcgttagcccggatggtctcaatttcctgacctcatgatcctcccacctcggcctcccaaagtgctcggattacaggcatgagccactgcacctggccaacattttttattgtcgtgactaggtggggggttgctactggcatctagtgggtagagggcagggatgctgctaggcatctgacagtgtacaggactgcattggacattgtcaaatgtcaccttggggataaaatcacccccagttgagaaccactggtttatgataatctaggtgccagatgatggtgtcttaggtcagggtgatagcagtggaagaaacagtaaaaagtgattggattctggatatattttgaaggtacaatcagccatgctttgctgacagattagatgtggtatgtaggagaaagagaggactctgggtttttggcttgagcaactgaaagatggagttatatcaattgagatggagaaagctgcaaaaggagcaagttcaaagcagggttggacatcaagaggtcagttattagacttccaaatggagattttttttgatacggagtctctcactctgttgcccaggctggagtgcagtggtgtgatctcagctcactgcaacttctacctcccagcttcaagcaatcctcccacctcaatctcccgagtagctgggattacaggcacgtgccagcacacctggctaatttttgtatttttagtagagacagggttttgccatgttggccaggctggtctcgaactcctgaactcaagtgatccgcccgcctcggcctcccaaagtgctgggattacaggcatgaggcaccactcccagccttaaatagcgatgttgacgatgcagttcagtataggtgcaggatcgaggtctgagctggacatataaatttggaaactgtcagcatatcaatgatatttaaaggcatgggagtggatagtgagtatagatagagaatgctgttaaaatctggagagatgaggaggacctgccagtgaggtaagaaagagtggtctcctggaagctaactgaagaaagcctattaaggaaaagggagtaatcagttgtatcagatgctgtttgatgggtcaagaaaatgaagataaagaattgacttagcaacatgaagttacttgtgatcttgaggatagcaatttcgatggaatggtgggaatgaaagcctgattgcaatgggcttaggagagaaattggccacgatgaatacactagaggtaatactttagagttttgctgcgaaaggcggcaaggaaaaaggatagtacctgttagggaaagcagagttcagattcttttagtttcgaagaaataatagagtttgtggtatgccaattggagtgatgccatagagtacaaagctgatggtgcagaggtgagaagggaggattgctggaggaatgttcctgaaactgggaggatttggcgagtccaggatttggtgaggagggatgggaatgtgatgcatatatgaaagggttgccttaggagcagggccatccacctctgatcttgtggtgaggtggatgtaggcagggttgcatgaatatctgttcttatagaaggttaagtgcttatgcttctcactgtggaaagttggagggcatcattctagctttatattaatagatgggaaaaatatatatactgtggtctttggagttgtcctgaataaacaaacctttaaacacattttctgaaccggcataaattccaaggaggtaggtctgtagcagatccactacggtagtgtagagaggaggaagggcacaggttatttttaaaaattagtgtttgactttggaatacttaaagaaaaatttggtttccatactatatttgattacactaaattaaaataagctttctttgtgcacacttctgtaggtggcaggaaaaatgctacctctttttttccctttttatttttatagaagccaatggtatggatatatcacagtttaagtattgccccactgatgaacattcaatttcattccttcaaaaactgtagagtcctaccatgtagcagacattgtactaggccctctggttatatagttatgaacaaaacagatgaattcttatggtgctcacagtcttatgtaggggttatgataataaaaacaaaagaaaacagtgtatcaggttgtttcatgatttttaaaaataatgatgctctgtgaacttccttgagtaaatctcactgtatcacgggtagctcaaactcactttcccaaaattgaacttagcatccatgaaaccaatcctgctgggtccagtggcatgtgcttgttgtcctaggcacttaagaggctaaggcaggaggagcacttgaactcaaagttcaaagccagcttgggcaaccctgtctcaaaaacaaataaacaaaaaacaactcttcaggtactcagatctctgtgttatttcttttctttttctttttctttcttttcttttctttttttttttttttttttgagacaggatctcaatatgtcgcccaggctggagtgctggagtgcagtggcatgatcacggctcactgcagccttgatctgggcccaagccatcctcccacctcagcctcccttgtagctgggaccacaggcaaatgtcatctggttcgctaaggtggatgtctgcctagcttagccctcaagcttctagaatagcccctttcaactaggttccatgagaattaatttcttttttttttttttgagaccggagtctcgctctgtcacccaggctggagtgcagtggcacaatcttggctcactgcaagctccgcctcccgggttcacgccattctcctgcctcagcctccccaggagctgggactacaggcgcctgccaccacgcccggctaattttttgtattttttagtagagacgggatttcaccgtgttagctaggatggtcttgatctcctgaccttgtgatctgcccgcctcggcctcccaaagtgctgggattataggcataagccaccgcgcctggccaagttcttttttttttttttttttttgagacgtagtctcgctctgtcacccaggctggagtgcagtgttgtgatctcggctcaccgcaacctccaccaatcgttcaagcgattctcctccttggcctcccaagtagctggattacaggcacatgccaccatgcctgggtaatttttgtagaaacagggtttcaccatgttggtcaggctggtcttgaactcctgacctcaagtaatctgcccgcctcagcctcccaaaatgctggaattacaggcataagccaccgtgctcgcccagaattaagttctaatgccctttttttttttttttttttgagacggagtcttactctattgcccaggttggagtgcagtggcgtgatctcggctcaccgcaacctctgcctcccaggttcaggcgattctcctgactcagcctcccgagtagctgggattgcaggcatgtgccaccacacccagctaatttttgtatttttagtagagacgggatttcaccatgttggtcaggctagtctcaaactcctgaccttgtgatctgcccacctctgcctcccaaagtgctgggattacaggcataagccactgcacccggtccaggtgaaacatttcaaacatggctcagtaaatattgcctgattctcccaagcagtcttcaacactcacatatcttccactctctcccttgtttatgattctcagctccagccaaaagggccagttggtttcttagccatgctatgtacatatttgaatttttgccttccaggaagagcatccattcctctctgcttgtttgagtcccacccttaaagttagtcaagtccagcttttcccctagaggttattcccacttttaggttatgtcctcacttctgttcatgctgtctggcacataattcagcttttggcacaagtggtgctcagtgcttggtggtggtgttgacaattgaggctgggggccaagacaggaagttcttgggacatttgggctcctgggtattgtcttaagggtctcttttcccaacagaggtcccccctattggaagtaaaggggaacatagaactgaagagacctctgattaaggccccttcccagctgcctctctcaggaagcagactcaagaggaggcctgaccagatggaagatggcctggagcctgagaaggtgagctgggcatggagagctgtgcatgtgtgtggggggtgtgtgtgtgtgaaagaaaggagagagagagtataaaccattagggagggtgactatggaccttgtctttatctttccccagaaacggacaagaggcctgggtgcaacgaccaaaattaccacatcccacccaagagttccatccctcactacagtgccacagacacaaggccagaccacaggtgggctctcaggatggatagactccaaggacatggaagtccagtgctcttcaactcacttgtttcttttctttcaattttattttattttttttgagacagagtctcgctctatcgcccaggctggagtgcagtggctcaatctcactcactgcaacctcctcctcccaggttcaaacgattctcctacctcagcctcccgagtagctgggattacaggtgcccacaccatgcccagctaatttttgtatttttttcagtagagatggggtttcgccatgttggccaggctggtcttgaactcctgacctcaggtgatccacccgcctctgccttccaaagtgctgggattataggtgtgaggcaccgcacccagcctattttgaataggtaataacatttcatttggttcaaaattccaaaggcacaaaggttgttgtatagtgaagtttgcttcctatttctgtcctccagccacccaattctgctacccagggcaactgtgtgttcttccagggaaattctattggtattcaagcaagtaagactatactcccccaccttttttacataaatggtggcatactttagacatggtcctgcttttacttatcttaatccaaattgctttttggcatatggagtacagttggccctctgtatccgtgggttctgcttctgcagattcaaccaaccatcggttgaaaatattcaaggagagtgggcacagtggctcatgcctgtaatcccagcactttggggggccaaggtgtgtagattacctgaggtccggagttccagaccagcctggccaatatggttgaaaccctgtctctactaaaaatataaaattagccagacgtgatggcccgtgcctgtaatcccagctactctggaggctgaggcaggagaattgcttagaacccaggaggtggaggttgcagtgagccgagattgtgccagcctggcgacagagcgagactcggtctcaaaaaaaaaaatgagaaaatattcatggaaaataaaaaataaaaccaaaaaatacagtataacagttatggtcatgtgtcacttggcaatgcagatacattatcagaaatgcattattgtggaaacatcatagaatgtacttactgaaacctagatgatctagcctgctacacacctaggctatctgcgatagcctattgttcttgggcaacaagcctgtgtggcgtgttactatactgaagcatggtaggtaacataacacagtggtaaccatttgtgtatataaacatacctaaacatagaaaaggtacagttaaaatataatataaatgataaaaaatggcacacctgtacagggtactaaccattaaatggagcatgtttgaatggaagttgctctgggtgagttagtgagtgagtggtgagtgaatgtgaaggcctagggccttactgtacactgctgtagactttagaaacatggtacagttaggctacatcaaatttataaaaaatagttcttttataataaattaaccttagtttactataactattttactttataaacttaacattttttttcccacttgccaaggctgatgtaacattttaatctttttttaacttttttttttcgaccagttgtcaaatgatcctttattgaaatattttcctttgtgcttaactagctgggcattccacagcaccactgttgatgtcatctatgatgtcatgagggtggtggccatcaacattacagcccatagactgggcagtccccggaatctctttaatggttccagagagttctctggctaaggatcggtgccgcatctgtcgagcaatgttgacgatctcatcaaaagtgatattcccattgtgtttaatgtttttctgtttctttctgtctcttggtggtttcttgagggctttgatgatcggggcagaggcagaaggcaccacctcaatctgggcctgtctgttctcaatggtcagtttcactgtaatcctcaggcccttccagtcacccgttgccttggcaatgtcatcaccaaccttttttggagacagacccagggggccgatcttgggggccagggcagaagtggcaccgacttcacctctggtgcacctcaggtatacgaccttgatctcgttggggtcgaacttcggtggcatggtggaggcagctggtgtcggatgaacccagattcaggatgaccgaagaaagttgcaccttggcctcctccgagccgaaagccgagagcttctctctcttttttttttgagatggagtctcgctctgtcgcccaggctggagtgcagtggcacaatctcggctcactgcaagctccgcctcccgggttcccgccattttcctgcctcagccttccgcgtagctgggactacaggcgccctccaccacacttggctaattttgtttttttgtatttttaatagagacagggtttcaccatgttagccaggatggtctcgatctcctgacctcgtgatctgcctgcctcagcttcccaaagtgttgggattacaggcgtgagccactgcgcccggctaactttttgactcttgtaataacaactgaaaacacaaacattgtatagctttacagaaatattttattcctttatatccttattcctcatgctttttttctatctaaattttgttttgggcggggagcatatattcagggcaatatgaatctctgtctcctggcttgaaaataaaatttttgttttttgttttttgtttttgagacagagtctcgctctttcgcccaggctggagtgcaatggcgtgatctcggctcagtgtaacctccgcctcctgggttcaagtgattctcctgcctcagcctcccgagtagctgggactataggtgtgtgccatcatacccagctaattttttgtatttttagtagagatggggtttcaccgtattagtcaggatggtctcgatctcctgacctcgtgatccgcccgcctcagcctcccaaagtgctgggattacagacatgagttactgcgccccgcctgaaattctttttttaatttaaaattttatttatttgtattttttccaagaaataagcttaaatttgaaaaattttaaatattattttgcttttcaaactttttgttaaaaacgaagaaatatacacattagcctaggcctacatagggtcaggatcatcaacatcactggctttcacctccacatcttgtctcactggaagatcttcaggggcagtaacacacatggagatgtgacttcctgtgataacaatgctttcttctggattgcctttttttttttttttgagacggagtctcgcactgtcgcccaggctagagtgcagtggcatgatctcggctcactgcaagctccgtctcctgggttcacaccattctcctgcctcagcctccggagtagctgggactacaggtgcccgccaccacgcctggttaattttgtttttgtatttttaggagagacggggtttcaccgtgttagccaggatggtctcaatctcctgaccccttgatctgcccacctcggcctcccaaagtgctgggattacaggcgtgagccacagtgcctggcctggaatgccttttgaatgacatgcctgaggctgttttatagttaactgtttttgcaaatagaaggagtataccctaaaataacaataaaaagtacagtacggtaaatatataaactagtaacatagtcattatcattattaggtattatgtactatatgtaattatatgtgttatacttttatacaactggcagtgcattaggttcgtttatatcagaatcaccacaaacaggtgaggaatgctatgacattaccatggctataatgtcactaggcaataggaatttttagctccattataatgttacggggctactgttgtatatgcagtctgtcattgaccgaaatgtcattatgggcacatgactgtattaacatagcatttacattgtgttagatattataagtaatctaaagatgatttaaagtatatgcggctggatgtggtggctcacgcctgtaatcccagcactttgggaggctgaggcaggcagatcacctgaggtcaggagtttgagaccagcctggccaacatgctgaaaacctgtctctactaaaaatacaaaaaaaaaaaaattagccaggcgtggtggcgcttgcctgtaatcccagctactcaggaggctgaggcagaagaattgcttgaaccctggaggtggaggttgtagtgagctgagatcgcgccattgcattccagcctgggtgagaagagtgcaactccatctcaaaaaaaaaacaaaatggaggccaaggcaggcagatcaccagaggtcaggagtttgaggccagcctaatcaacatggtgaaaccccgtctttactaaaaatacaaaattagttgggcgtggtggcgcatacctataatcccagctactcgggaggctgaggcgggagaatcgcttgaaccctggaggtagagtttgctgtgagctgagatcatgccattgcacttcagcctggacaacaagtgaaactctgtctcagtcaatcaataaataaagtatatgggagcgtgtgcatagactatatttaatactatatacctatttatgtaagggacttgggcatccttggattttggtattcttggggggtgctggaatcaaccccttttggatactgagggatgactgtaatttctggttctaggggaggtatcattaggagctggccagacttagggataagggaaggaagttatcctatttctaattctgagaaaagcacttcttctgcccctgtcctagcaagtgtacatgccatcttaagaatgatcattctacctttgctctctcccatctcctgggcagctcaaaaagtttccaagaagacaggaccccggtgttccacagctattgccacaggtaactgtgctcaagagctgggtctgagaagggatttggggtatgtgtaaagggagaatgatggaggtggagggacactggtcctgtaattcctaagtcacctcctcaattctgtagggttgaagaaccagaagccagttcctgctgttcctgtccagaagtctggcagtaagtgacaaacataaccactgggtgagaggctgggatagggaagagaagatggtgagtgaccagaaaaatccatttggtctctaaggggaaggagatgtagcatcaggtgtggatcccataaaggctagaagggaggagggatagagagcctagacttcactgacctttgtcctttctgtgttcatcttagcatcaggtgttcctcccatggcaggagggaagaaacccagcaaacgtccagcctgggacttaaagggtcagttatgtgacctaaatgcagaactaaaacggtgccgtgagaggactcaaacgttggaccaagagaaccagcagcttcaggaccagctcagagatgcccagcagcaggtcaaggccctggggacagagcgcacaacactggaggggcatttagccaaggtacaggcccaggctgagcagggccaacaggagctgaagaacttgcgtgcttgtgtcctggagctggaagagcggctgagcacgcaggagggcttggtgcaagagcttcagaaaaaacaggtggaattgcaggaagaacggaggggactgatgtcccaactagaggagaaggaggtaagggccagattttcaccagatgtcagccccgctttcctggcagaggtcatgcctcccctcccttccaggtacccctcaagtctgggctgagaactcctgagcacctatctttagcagtataggtgctgctgaagatacctctctcttgacctgtctgcaccccagcccactcctgactgtcttgctttctgccacgcttcttcctacccttgactgtttgcaaagctctcatttagatctgtgtctttcttagtcctccatccctctttctttgggttcccatcctgatcacaaattcctgtggtactctctttccctcctcccatgtccacttgactccttcctggtgagcaccaactagattaagttatttgcagtctcttaaatgactcaactttcacttctgggcattctgcatatgtgcttccctctttctggaatgttctttgtatactacatccttccttggttcactcctgtacttctgggtgtcaccctagatatcatcttccttgtgctcctctttgtgcttggacatacccatagcactccctgtcttagtaccatgattccttattttctcatctttctttgtttaccagactttgaggtccttttgagcagggacctcacttccacccactccatacgccccacagtttgttcttcttcttggttgcatcttaccctctgtgtatgttgtgttctcttctgggcagaggaggctgcagacatcagaagcagccctgtcaagcagccaagcagaggtggcatctctgcggcaggagactgtggcccaggcagccttactgactgagcgggaagaacgtcttcatgggctagaaatggagcgccggcgactgcacaaccagctgcaggaactcaagggcaacatccgtgtattctgccgggtccgccctgtcctgccgggggagcccactccaccccctggcctcctcctgtttccctctggccctggtgggccctctgatcctccaacccgccttagcctctcccggtctgacgagcggcgtgggaccctgagtggggcaccagctcccccaactcgccatgatttttcctttgaccgggtattcccaccaggaagtggacaggatgaagtgtttgaagagattgccatgcttgtccagtcagccctggatggctatccagtatgcatctttgcctatggccagacaggcagtggcaagaccttcacaatggagggtgggcctgggggagacccccagttggaggggctgatccctcgggccctgcggcacctcttctctgtggctcaggagctgagtggtcagggctggacctacagctttgtagcaagctacgtagagatctacaatgagactgtccgggacctgctggccactggaacccggaagggtcaagggggcgagtgtgagattcgccgtgcagggccagggagtgaggagctcactgtcaccaatgctcgatatgtccctgtctcctgtgagaaagaagtgaggacccatgggcactggaactgggaaatggggaggagtgggcagggtgccacgagatggaggtagagggagaaaggagcaagagagaattgaaggatgaagtgcaagttatcaggctgggttaccacatccggttttggcctgtgggctgtcggtagatctgccttaacctgggagtggcgagggagtgatgcatctgccaaaacgaggagggtcactacatctcatgtctcatcttcttgctcagctcatcctagccatgctggcctcctggctgttcctcaaccagctagtcgtgctccccatctcagggcctttgcctggatgctctttcctggagatcttggctatcctgtcaaaacttgtgttccccaccccgcctttatacactccctattctatgtattccttaccattttcagacatactgtgcatcttattttgtttcttgacaggctagaaagcttcaagagggtgggggtgggctcttattcatttccatacatattactatgtactgacttctgcctgcctttttgccccttctgctcccatccccaggtggacgccctgcttcatctggcccgccagaatcgggctgtggcccgcacagcccagaatgaacggtcatcacgcagccacagtgtattccagctacagatttctggggagcactccagccgaggcctgcagtgtggggcccccctcagtcttgtggacctggccgggagtgagcgacttgaccccggcttagccctcggccccggggagcgggaacgccttcgggaaacacaggccattaacagcagcctgtccacgctggggctggttatcatggccctgagcaacaaggtgggaatgggagtggggtgagatacgggacctgggggacagttggggttggctgtgcagaaccctgcctattcctaaacatctgtccccacctcaatcatctaggagtcccacgtgccttaccggaacagcaaactgacctacctgctgcagaactctctgggtggtagtgctaagatgtgagtgaaagggacagatggaaggggtcaggtaggaactgtgttggggtgaggggtagaaaggggaacagtggagacctgtccaggctctgctggcccctaatgctggggttgggcacattgtcttttcataggctcatgtttgtgaacatttctccactggaagagaacgtctccgagtccctcaactctctacgctttgcctccaaggtgcgattaccacccgtcagccttgtcaggacccgtgggtggttgtaggcttctccattccaatcccttttgtcttctagggcagggagcacatttgtgcagaaaggttttgcaggtatctgaggcactgctcacctggttccatttttaattattagcttttgagttaagttttttaaaaaacgggtgattaatttaacctgagaaagctgattaaaaaaaaaagaaaaggtgactaaaaggtctaaactggttgggcgtagtagctcatgcctataatccgaacacttcgggaggccaaggcaggaggattgcttgagcccaggagtttaaaatcagtctgggcaacatagtgagaccctgtctctacaaaaaataggaaaattagctgggtgtaatggctcacacctgtagttccagctactcaggaggctgaggtgggaggatcacctgaacctgggaggtggaggctgcagtgagccgtgatcctaccactgcacttcagcctgggtgacagagtaagaccttgtctcaaaaaaccaacacacaaaaaatccctaagattcctccctatcagcatacagagatcattatttttaggtctgcctagactccactatgtagctgcaccaaaatttatccaccagttccctctactggacacttggattgtttccacacttttttagtcacaaacaaggccacgttgactaactttgtacatacatcattttgtatttttcagttacatctaactagggaaatagtccttgaaatgggattactggatcaaagacttagaggtttttcagactattccaaatagtgtgaattcagactccaaacctcatgagggtcagccagtggctatatgaattctcactaatgagaattccttccactagaatctccttccactagtgttaagcaagtcagaaagtttccttactgtctgcctccacagtaatttttttctctggtacaccctcctcctgcgcgtatagccctttgatgggctctggctttatttgaggtctgatcaggtctgtcctgctgtgcgcttgggcctcctcccagtcagcactgattgttgctgtggagtagccagcacctgcaccctgatctggtattctactttgatgagggtttccctcactatcttgcaagttcaattttagagggtggtgatgttttttctaactttttattaatgttataccaatgtaacatccaacaacatgaactttaatatcctctaatacccagtttatgttaaatttcacccaactgtctcagaagtgtcttttatacataataggtttgttcaaatcaggatccaggcaagggccacccacttggttgaaatgtctcaagttccacaaccctatcccacactgccactattatgtcgtttgttgaaggtcatttgtcctatagaatatactattctggattttggctggttgcttcctctttcccccatactttcacttatttatcatatttgggtgttgtcaacctgacccatccatttacaagctccttattgactttttcacctagtgattttatccagcagtgaccatacctggatctttatttcattaaggggtttctaaatggggatttttctaatcttagttgttctgcattggttagtcacgattcttttatgaagacatttgccttgccatctacttggtttctctgaaattcaattcatacaggaaaaacaagataaatgctgaattatttattgattttcagtattgagttgatatcctagcagcttccaaaggtgaccaatgaatgtttatctgagggttatttttatttttattttttttgagacagggacttgctctgttgcccagactggaattcagtggctcaatcatagctcattgtagccaccaaaagtgttgggattataggcgtgagccacccagcccggccacagtcgttcttctttctgatgctcaaattgccccatctttagccaataggaacctcctggccgggcgcggtggctcatgcctgtaaccccagcactttgggaggctgaggtgggtggatcacgaggtcaggagatcgagaccatcctaacacggtgaaaccccgtctctactaaaaatacaaaaaattcaccgggcgtggtggcgggcgcctgtagtctcagctactttgggagtctgaggcagaatggcttgaacccgggaggtggagcttgcagtgagccgagatcgcgccactgcactccagcctgggcgacagagcaagactccgtctcaacaacaacaacaaaaaaaagagcctccttcagattggtgccagtgtcctttagacagaactctagtagtcttttcagattcaacttgtacatttccttccccagacttcaactgatccattttctaaggagtcctagttcctaaatgggtgttattactattttatctcggtttaagtgttttacagtgggagaggttggaggtctctagtacagggtattgctggaaatgaaagcctcctttctctgctcctgtattttcttctggggcttccatctcttctcaagccttttcacctcctccaaacctagtgtgcagaggagaacaaaccataactggcaccagcctgaaccagcctttggaggccttatttcggtatttctgagggcagccctagcattggaggatgggagatcttgggaaaaatgttgtattggttacgctgcaaacttttatcctgtctaaccccctgcccccaggtgaaccagtgtgttattggtactgctcaggccaacaggaagtgaagacggatccagatctgtgtgtgtgtgtgtgtgtgtgtgtgtgtgtgtgtgtgtgtgtgtgtgtccctatgtctatgtatcgggtgaggggtgggagggttgctggagggtgctttattgggtggagggcaccatgtcccagggctatcaaataaagaatagtttggttttttttttaaa

SEQ ID NO: 21 - DNA, 72090 bp, Homo sapiens
gctccagcggtcggcatggcagctgctacctcgctgggacaggctctgggcccacgcgtgccgcgcagtccctacagaactgcagttgtcttgtcttctcggagtgctttcggctacttttcccttattactttagctcgatacacgttgggctgcctttcacattcggatattacgctgttcgagtgctgacgggaaaggcagccctttgacacgcacgcgaaatgtcgcctgacgagggcaaaggtgacagttactaccggaagtaccctatctcagataccctttagattttcccccattgaagaaaaacgaggcgggaaaaacgctgttagggtttaactcaggccctggctccttctcgaacgaattagcggaacacccgcaggagccttgtttggcttccacttttcggcccgcccagttctctgagcgtgcggcggacgacgccggtgattggttgagcgaatggaaacggctcggcgcggtggttggccagtgggaaattctgtacgttgtgattggtccacaggaacgactcggcgcgcgcgcgggagcgagctttgaaagttgagcacggcggcggcgagccggtgccctgggatcatggtggcgttgcggggccttggtagcggcctgcagccctggtgtccgctggatcttagactcggtgagcagatgcagccgggaggcccgggggccagggcgagggtcctatgcgtccccgacgatgcctaagcccgggccggggtgccggtgggggcggggtgggggcgcccggctgtcggcggtgcctggggtccccagggccgtgccacgccaggattgcggctagccaggtttcccgtgggggctcaagccggccaggccacccttagaataagcgaatgttggccagtctcttctagcgcctgtgcatctgttttctcggccttccccttcttcctgtgcgtgtcttcgtgcacctatctattcttacctattaagatggttttaaattgcaaatctctttcttccgccagacttatttcttgaacttcatgttcataggttccactggatgtctcacatgcagacatcatcaaacgtcacatgagtgaaaatgggattcccaaagcctgctaatggcaccatccaagccaccaacccaggagtcatggcatttctgcttcccctttcatgcccactaccactgtcctgcctctgaggtgtctcagggcagccccgctccattcctgatgctgctgccttcatcatagcctcgagcaattgcaggagtattttagctgctttctgatgttaactgtgccagcccatcccccacacttttgcagaacgacttttgaaaacacagctttgaatgtgtcaagcctgtacacctttaatgtttcccctttgtttcctaaataaatgaccacatccttggcatgctttataagagctgccattctctccagtttgattttccaagagcataacctttggagtcggacacacttggattgttcccttggctctaccccatagcatccatgtattaccgtgcaggttgtttatccttgctaaacccctgttttctgatctgtcaaatggggagtacaatatctacctcacaggggtttttgtaaagataaatttgtacttgccacataataactgctgaacagatactaatacccacaagcaaacactgtaacaattttgttcatttagaaacactttaatttctttccctttgtgtgctttgttacactgtgcttgctgggaggcacttttctgcatttatttgcctggcaaaactcttacattcaggtccaattgaagaatcatcttattcctctccctcctcccccagtactattccctattaagctctgtagcattttacattttacatatctattattttaacactcatccatagcaaaaataataaataccatctattgactgttttttatgtggctagcacattgttagggcctttatacacattatgtttcacaaaaatcctgtatttccaatgatgaaggagagactaattatgtgtaagtgatcaagtcaggatatttgcctcgttctgactcaaaattcagtggcctctcttctatcataggctgctttttttggtatcctaagtgtgaaatgttgagatctttgtggacaagaaccctctagtattcatctttatatccctagaagtataagtggcttccctagtattttctcaaagtgtttgttgagtgaataggtgatgtatttcttcctcttcttccatcctaagtgaagtagcagagcagaagttacctgcattcgacagctgagaaaataggtagtgagagatttgaatagtgtaaagatactgagggaaaaagactaactcagtgtctcctatactctcactcaacaatcaacactgaagacttctgtgaccaaatggtagataacagggccagttactgccatccaaattagatttgatggtatttacagtagggaactgtcataagcaaaaccaaaagaaggagtgagataacttttgctgtggtctataatgacctttaaaacattactggaaatttggaaagaaacaattgtatttttcagatcttctttcaggcagcatattccatgtctttggaaggaatgctgtgcatagccacttagggtacagagaccccctccttcagggtcaagttcaagtgacaaaagatgatgaccagattgtattctaaggatggaactagttgagtgtaaggcctttcattttcatttgccgagtgcagtgtaatgctcccatctctgttttttccttatttataccttgcccaacttctctaaatcagtggtgaacaaatacttttaatattaatttgaaggaacacctgattaataatttgagatgtccacatttccatctagtcctaattttagtttgggaaagtgacaatgacaacactgaagaaatatagtgtattagaaaagaatgggaaggggggatggagggataggggagggataccattaggagaaatacctaatgtagatgacgggttgatgggtacagcaaaccaccatggtacgtgtatacctatgtaacaaacctgcatgttgtgcacatgtacccaaaaactttaagttaaaaaaaaaagtttatccaaaaaaaaaagaaaaagaaaagaatgggaagatttagagttaagagagattggtggaatccagccagcgtgctgtcttaatacccctcctctcaatgtacattctttcaatcagtgtgttttaaagtcaccaagtattcctgggagtctgaatctgggttgcctcttctattttaaacttcctggagaaattatatatgttttttaaatgctacatgattgtccaagggcccaataaagtgctctatattttatttccacttattaacttggttatgatattttcacaaaggaacctcgtgggcaatctgattaacctctgtttcttctctagattgaacatgtgggaaagcctgatcactgaatgttttgaagtgtcctttcccaaaactcttgtatctgaaaagtatttcctcctttatatttttagaagatgattagcttaatagtcagtgtcagttgtgatttaagattctcttaaccttttctggttttcttttattatgctacacctatgttattaaaacaagttaaatgtgaatcgtgactagtaaacttttctcctcttgaacacacctggaatctaaaggtgactagtttttttacttgttacagagtacttacacatttcattgcattttcccctagaatgggttgacacagtgtgggaactggatttcacagagactgagcctttggatcccagcatagaagcagagatcatagagactggattggctgcattcacaaaactctatgaaagccttttaccctttgctactggagaacatggatctatggaggtaaaaatataaaaacaaactagccaaagtttggtgttagaagtagaagatgaaagtcattattataatctgaagcttagctttcttggtgtacagttcacagggagtacaatatgagtaacataaagaatgtggttaatttattggaatatcctaagagctttcctccaaaagcttcaaggtacttgtctgattttttttttttaagacacgactgttttttacaatagcaaattaaaggaaaagtataaggccgggtgtggtgtcttacgtctgtaatcccagcactttgagaggctgaggctggccagttgcttgagctcaggagtttgagactagcctgggcaacatggcaaaaccccatctcagaaggaaaaaaaaaaaggaaaaatataaaggcaaaaacaagaaaactagaccaaggaaaatgcaaataacaattcagacatgccttaaccttaactttaagaaaatctgcgaccaggcatggtggctcatgcctgtaatcccagtactttgggaggccgaggtgggtggatcacgaagtcaggagttcaagaccagcctgaccaagatggtgaaaccccatctctactaaaaatacaaaaattagccggttgtggtggcgggcttctgtaatcccagctactcgagaggctggggcagataattgcttgaacccaggaggcggaggttacagtgagccgagatcacgccactgcactccagcctgggcgacagagcaagactctgtctcacaaaaaaagaaaatctgatattattaaactgaggaatgactagttgaattaacaggtttgtccaaacagttcctgtaaatattgagttctatccaatgcatagaaatataaattattattaatatttaggttgttagttttcaaaaaaaaccaaagggttgggaaacagaacaaaagctaattggatattaacatctctgaaacatttaaatgaacaaaaaaaaattcacttccaagtttcacatcacaaaattaaatcatctaattaaacattccttcagcataacactaagcactgccttaagtacctgagttgacagagtggggattacgatacaatctccctaggttgaggtcctccccagggacctcagggaggaagagtggacatttgaacactagccaaagtaggtctagcagccacatgcagttgcagggggtggagagttcagtgccactgtgcatttgggcgcctggaaatattctacgaaccacactgtgaaaaatgctccaagagaggtgcggatttgttgcatagggtgtgaaaaagggagcatggtagggttgggaaagttccagaaagaaagtggccagcagcgaatcttcacagatgactagcagaagcttgggttgtaaggcagtcctagtgaaggagccacccaatgggaacacgcaggaagtgtcaagaggcatacagaaaaagtgtggtggaacgggatggtaaggtagagtaagggtaggtcacgggtagctttacgtgaggttcagcagtggagtttgaacatgtttggtagagtgtgtatgaggttttgttctaagcgtcctgcatgtattaactcatttaatcctcaagcagcctgtgtgaaagaggttacagtgggcaatagataggtaacatgaatagatctgttttaagcagacgttcttgacagtaggtggactgaagtgggaaaaattgtgtgcagggagagcccttgggagactgtattggtgatccaggtgttatgagtaataatggcatgatccggagttacaattttgggaactggaaaggaagactaaaaactagggacatttttggaattagaattaatagggccttgtgaactaggaagcccttttgagatatcttaaaaacatggtgtgaagtgctaaactgactgggcatagggaattagaaaaagaaagaagtcagtgatccccagggtttcaaaactaggaagatgatgatattgttaaccaaggtggggaataagggaaaaagagcaaggtcaaatggagaaacagttctgtttagacttctgaacttgagattctgtcaggagatccttgggaagtttaacaggtagtagaaatgtgagaccaggagagagaagagagttctttaaattgaggtatgggttgaagcacagtgatgcatgagatcaccgagggtgagaagcagccaggacagaaatggagagctgattggacggggtctgcagaggagcagtcacatgtagggagtgcagggtcactgacgcccagactagacagcagccatgggatcacatggggccaaggtgaccccatatgcagagccctggtgagcagatggtttagggtgatcgatcaccctcgtgtgtgaagtggaggtgcaggtggcattaggaatgaggatgtgacactgtaaagttaggagatgatttcttccccccccccccttttttttttttgagaccagggtcttgctctgtcacccaggctggaatgcagtggcacagtcaaagcttactgcagcctcaacttattgggctcacatgagcctcccacctcaccctcctgagtagctgggactacaggtgtgtgccaccacgcccagctaattttttattttttgtggagacaaggtcttgctttgttgccctggctgttctcaaactcctgggctcaagcagtcctcctgccctggcctctcaaagtgctgggattacaggcatgagccattgtgcccagtggagatgatttctcccgtaagttttttagttaaggaaaggagagtgctctgctcacttgaattttgtgggcctttttttgttacgatactcaaggataaaccatatttagttcctgctatgtttaggttattaaaataacccatttcttcttcatgtgtttagtaggagaagacatggaatgaagatagaattaatacaattgtggtttcttttctagggtttatctcctttacctgggccatttccgagatctctttcatttcctgctcccattgcctgcaatctgcagaacatttaaataaagggctctgatttcctcagttagtaattattggtaaaggaatttgagttccttttaatataaatagagggataactttcctgaataatcactaatatatggtgtcccaaaagtcttagtgtagttttaagctataatttctgaagtatatatgctacaaacttaacaaaaaattcttttgaaagtttaattatttaaatatgttatatacatatttatcttggtaattttgaataatatacctttaattttgatattttgtttcagtccctttgaagatggtaaacatttagcagtaggagccaggctactctattcctctttttgtaaggcaccaagaacttacaaaaatcaaataataggaaatgtttccatttctctaatgactggcttttgtgatttgcggtctccccacagagtatctggaccttcttcattgagaacaatgtttcccatagtacactggtggcattgttctatcattttgttcaaatagttcataagaagaatgtcagtgtacagtatcgagaatatggccttcatgccgctgggctttactttttgctactagaagtaccaggtatgtagacctgatatgataggataaatcttctgtcatttttttctttctacagttttcaattcttatactttgtttcttgtttcttcacttataaatggggcagtgctaacccatggcagagagttgttgcgaggagcaagtctctaaagtacatggcatgttataggtcttggaaaaccttcccccttttttttttcatccgaagttatgctatctataaactaataaaaatagtctgagaaggagtgcaagagttccacgcccaccctccaccacggccgtctaaaattctgatattgccctttcttctcatgattccttgtctagactgagaaatactgctgtggggagtcattgctttttacctctccgatgttggtattgaaaaatagattaaaaccattctaatcaagaaagcaggaaagcagctagtaatacttgaaggagagcactgaccaggagtctgttttcgagcactgttttacttgattgtcagagcactgaggaggctgttcctcctatgacagtgaaatccattctcttccctactccaaacacagggtgagagagagtggaacatagagattgagtcagataacctgaagttcatatggaaaagagaatggcaagatcagtcaccttgctgcttatctttgtttaattacaaatgtttagcaaaggatttattccatgtgatctgggaatgggcaaaaaggtcttatatttaaagccctgaacattgatttgtgttgttgttaatgctcccatcatgactttggaaatgagtaagttcctaaaggattttgttgctaagcagtgtctcggttgtaactaggccctctctcaaaaaagtagtggttttagaaacccagtttcactctcctcttgccagatgcagtttcttctgattaaggttgagatttatgccagagcaaagaggtggctgttactaattgcgtgggccacttgcagctttccagcaagccgtattcctgccagttaccttctgtttttaaatgtttcgggtttatgattgggatgctgtcgatacttaacattcgatcacagtatattctttttcaggatcgttttggttgttctgcctcccttgcatttccatgtgaattttaggatctgtacgtgaatttctgcaacaataaaaaagccagctgcggttttgacagggattgcattgaaactgtagatgagtttgtgaagtattgccaatttaacaacattaggtcttctaatccctagccgcaggatgtctttccatttattgtagatcttctttaatttgtttcaataatgctctataatttttggtgcgcaactcttgcatctcccctttaaaatttattcttaagtgttattttcaatgctagtgtaaatgaaattgttttcttaattttattttggtttattagtactgtatagaagcaaaattgattttgattattgatcttctatcctagaaccttgccaaactcatttgttggttccaacagggttttctttgtgtaagatcatgtcatctgtgaatagacacaggtttacttctttctttctagtctgggttctttctatttatttttcttacctatttgccctggctagaacctccagtacagtgttgaatagaaggggagcgtggggatccttgtctattcctgatcttaaggggaaagcatccagtcttgcctttaggtatgatgttacctgtgggtttctcaggatggcccttattaagttattattcctagtttactgagtgcttcattatgaaaggctgttggattttgtcattcgcttttctgcacttgtgaagtgctcatgtggtttttgtttcttattctaatatagtatattacattggttgattttcacatattaaaccaattttgtatgaccttggtcatggtgtataatcctttttatatgttgtcagagtgtttgctaatattttgttgaaggttttttgtctatattcataagggatattctttttttgagatatttttgtctggtttgagtatctgggtatcttggtaataccattttcatagaataagttacatagtattcccttctcttctgtattttggaagattttgggttttcttttttcttcagatgtttggtagaacccactagtgaagtcatctgggcctggagttttttgaaagaagtttatgtttgtagaatttctagtgatctcctctcatgcctgatgttggtgatttgtattttgttttttcttgatcaatctagatcgagatttattcattttactgttcattttggagggcccccttttgatgtcattaattaaattctgttgtttgtccctttcttgtttcattgatttctggtcttatgtctacgatttcctttcttcttactttgggtttaatttgctcttattctgactttttaaggtagatgcttagatctttgttctcacatgcatttctttgtttctaatacaagtatttaatactataaatgtccctccaggtacagcttcatctgcatcccacaaatttcgatgatatgtttttactgttgtgcaggccaaagtgattttcaaatttttcttgtcattacttacatctctgagttgtttagtaaattgagtttattttccaaatatttgaactttcctgaaatcttactgtaattgagttttaattggtgggatcagagaacatacttcatatgattatgatacttttaaattatttagttgtgcctttttttttaatggacttagagtctaatttggtgaatcttccatttgcactttaacagaatgtgtaccttgcctttgttggatctagtattctgtaaatgtcagttaggtcaagttggttacaaatgttattcaagacttacatatgcttcctgatgttctgtttatttgttctatctgttgttgagagaggaatgttggaatctctaagaataattatcagtttatctatttctcctctcagttcttttaacttaagatattgtgaaagtctgacggatacagatgtatttatgattgtcatgtcttcctgatggattggtccttttagtattatgttatgtccttgtttgtctggttatattccttgtcttgaagtctactttgtctaatactaagatagccactatagttatcttaagatttgtccttggttggtacatcatttctcatgcttttatttgtaacctatccatatgtttatatttaaaggttttcttgtagactgcctgtcacgtggtcatggcttttctttttcttttttttttttttaagagagacgaggccacacacggtggctcacacctgtagtcccagcactttgggaggctgaggcgggcggatcacttgaagtcaggcatttaagaccagcctggccaacatggtgaaaccccgtctctactaaaaatacaaaaattagccggatatggtaacacgtctgtaatcccagttactcgggaggctgaggcaggagaatcgcttgaacccaggcagtagaggttgcagtgagttgagatcgtgccactgcactccagcctgggtgacagtgagactctgtctcagaaaaaaaaaagagaggtccagggtctcagtctgtcacccaggctggagtgcagtggcaatcatagctcactttaaccttgaactcctgggctcctcagcctccagaatagctggaactacaagtgtgagtcaccatgacaagctaattattattactttattttatttttgtagagacagggtctcgctatgttgttgcccaggctggtcgcaatctcttggcctcaagtgatcctcctgcttcagcctcccaaagggctgggattgtaagcatgagccctcacacccagcccatttggtcatgcttctttctgacaatgtttgcttttgtatcagaatgtttaaattgtttagctgattacatttagagtaattatcaatgtagctgggtttctgccatttttctatttattttctatttctttaaacctgttttttgctcaattttttcctcttcctgccttgttttggattttagtatcccttgtctcttttggtgtattagctatactcttttgcatgtatgtgtatgttttatgtgcttgctttgtgtatgcagtaggcacttctcacagtttatcttcagataatattctcccaatttatatatgatgtaagaacaaccttaaaacagtgtattttcctaggttgggtgaggtggctcatgcctgtaatcccagcactttgggaggctgctgccggcaggtcacttgacgtcaggagttctagaccagcctggccaacatggtgaaacccatctctaccaaaaaagaaaacaaaaaatgaaaattagcccaatgtggtaacgcatgctactcaggaggctgaggcaggagaaccacttgaacccaggaggtagaggttgcagtgagccgagatccacgccactgtacttcagcctgggcaacagatccagactccagtggaacacacacacacacacacacacacacacacacacaaaacaacaaaaagtatattttcctttctcctctcctcttgtgtgttattttttctacatgttataaagcctacatttcattaatgcttatttatcttttatagaattttttagaaacaagataaacagcttttatatttgaaagattaatctcctataattttccttctgcctgaagaactttttatttttaaacatttagtgcaggtctgcaagccataaaccctctcaggttttgattgtgtgaaatatctttatttcaccttcaagaatctttttgctgaatataaaattctgagttaacttttttttgctttttggtgggattatctatgctttgttgtgattgcctctgtgcttattgcgattgggttcattgagcttcttggatctgtggacttatagtttcaacaaacttggaaattttttagtgactttttctccaaatgttgtcttccttccccttttttgggacttcagtcactcctgtgttagactgcacgatgttctcccatgggtcactgagtctttattagctttttggtttctacgctcctgctgtatcttcaagttcacttatctttgtttcagtaataaccaagccactattaagcccatctagtgaatgtttctttttcagatcaaggaagttctgtttgcttctttaaaatttttttttttcatttctctcctcatgataatgttttacttttaattcttgagctgctttaaggttgttgtcagctggttccattatctctgtcatttcctgggctgtttttattgactgatttttcttatggggcacattttcctgctttttagcactccctgtaatttttttactggatgctggacattttgtgttgttttttttccccctgtattttttgtaaagacagggttttgctgtgttgctcagactggtctcaaactcctggactcaagtgatctgcccacctcagcctcccaaagtgttggaattacaggcatgagccactgcccttagccaggatgttgggcatttggaatgttgttgagtgtctggattttgttgttttcctttaaatactattgaagtatgttttgataggcagctattggtggattaacttgatccttttgaggcttgttttaaagctttattagagctgatgtaaagtagcctttatgctatatcgggtttagccctactgttaaggtgtgtttgttctgaggtctctactgaatgctctaggtgtttaacaagatcactccactctggctggccacaactcaaatgtatctgagccttgtgtgagttgtgaaaataattcatcttcttgctccttggaaatacttctttgctctctgtcttagaattttaccctgtgcatgtgtagcttatgttcagccctgggccgatttctagaactctttttctgtgtaggttcttctgttctataaattccatctaccctgtctttctgactctgctttttcaacatagtaagaccattataatttgtgtggatttaccatttctctgccgttgtccagaaattccctctggatacaatactggggcaacttgagggtttacctctgtttcccttttttcagggattgcccttcttatgctgcctggtgcccagtgtcttaaattgttactttataaatttttgcccagttttctagtcgttaacaagtgtaaagccagttcctctgtcctggccagatttggaaatcttgttacttacctctgatgcagcgctgtctcctctactaaggctgacgttgcaaatggtactcttgctacaggttcattgttattcacagtcatgaaaagcctgtgttttgctttgtaacttttcatctgatgttatagatatatttcaagacaattaaatctaacttgcttactctttattcctcatgaataggcagtgtagccaatcaagtattccacccagtgatgtttgacaaatgcattcagactctaaagaagagctggccccaggaatctaacttgaatcggaaaagaaagaaagaacagcctaagagctctcaggctaaccccgggaggcatagaaaaaggggaaagccacccaggagagaagatattgaggtaagaagtaagttgagtataaaacatatataccaacacacgatttgctttatttaaggattgactttatactaaacatggtttcaggcatcatgattataggcaaatggtcctaaaccatcataagctatccaatactgctttgtgtcttcggcttcatataatttttctttctttcttactttcttccttttttctttttctttttctttttgagacagagtcttgctgtgtcgcccaggttggagtgcagtggtgcagtctcagctcactgcaacctccacctcatgggttcaagtgattctcctgctgcagccttccgagtagctggggctacaggcatgcgccaccacactcagccaatttttgcatttttttgtagagatggggtttcaccatgttggccaggctggtctcgaactcctggcctcaggtgatccactcaccttggcctcccgctggggttacaggcatgagccacaacacccagcctaattccatattcttatgtgacacggtagaatgacagaatttcatagacagcaaaaattctgaaaaaaaggattcctcattgacacaaaactagaaactactgtagcggtcatctagtccagtgatttactgttgtggccaaggagacctagaacagtcatgcgacctggtcaaagtcatatcacctcaacatcagctcctgcctggagtttatctgggcttggtttgggtaaattgaaaaccatgggacaaagtgtttggcatttattacagtcacctgtacatttcttcataatctagatggatgaaattatagaagaacaagaagatgagaatatttgtttttctgcccgggacctttctcaaattcgaaatgccatctttcaccttttaaagaattttttaaggcttctgccaaagttttccttgaaagaaaagccacaatgtgtacagaattgtatagaggtaagtgaaaattccaggaaccttagggcaacttcaaaggattagactatggctaatacctgatcagtagaaaaaatcaggccttttcttcatatctgttttctaggtctttgtttcattaactaattttgagccagttcttcatgaatgtcatgttacacaagccaggtgagccattaaatcttccagtgctacaatttaagtatagtgtaccaatttttgctccagcagaaatggaaataccattttatcccaattggcacacaggtagaatttattcatttaaacatggcttgtaggactaagaaatattccaagtaaaatcatatccattaactaatatttcgtcttttttttttagagctcttaaccaagcaaaatacataccagaactggcttattatggattgtatttgctgtgctctcccattcatggagaaggagataaggtaaaggagatgagaacctaatttggttactagttgaatcgaaggcacatgaaccatatgatggaaatatgttaaaagcatttgatataatgccatttcaatttactagctcattttcatgaccttatattatttgcataataaaaagtatcactatttctatttgctctctgttctttattgccaactttatatctgaatacttggtggctgcagcaaattattgttaggctccagttagaaaaaatggttctgctgtgaatgaaataggaggaacagataaactgctgaacagttacttctataggaacagatgagctgctgaacacttacttctataggaatatttcccaaatcattctaaaaagtagaatagtcagagaattttcaagtttcccttggcaattcatgtgcgcttcagtatttctattggtagttgtattatttgtgttgatatgctatggaaattttgtaggttgtcacccgtggtcagcatggatacctgggttttgcctccaggttacctgaacgccactactactagaaactttgcagttagagttagttgcgcatgatgctgttactaaacttagatgtcttaaatgaaacaataagattttgcaaaaaaatgtgttggaccaaggtcatgtggcttttggtatctgcgacgcgttaccttgcagaggcagtaacctggttacgaagatatttttggggatgcttggggggttccgcacatctgtgtttgctttctgacttcaccacttactagctgtgggtccttgaatgagccattcaccctggctaaagcgttagatttcacttatggacaaaaaggaccaaagtctaccttctttatcgatttgtcacaggattaaatgaagttgagcaggccgcctaccgagcacaatgcctgttgtttagaaacattcggtattttataagtttagtatctttatcacttctgtgtgcttgaaatatgaatgtgataacatttacagtaatgtttttaattcgcatgcccttttaaatattttaaacaataacataggtgggaaaattcatccctttaggtctactgtgtctctaaagatggtttttttttttttttttttttttttgagacgcagtctcgctctgacaccaggctggagtgcagtggcatgatctcggctcactgcaacctcagcctcccaggttcaagtgattctcctgcctcagcaccccctagtggctgggactacaggtgcgcgccaccatgcccagctaatttttgtatttttagagatggggtttcaccatgttggccaggatggtcttgatctcttgacctcgtgatccaccctccttggtttcccaaagtgctggaattacaggcgtgagccactgcgcccagtcggtatttttttttaattgtgaaagtactgacttgatgtcaggcaatgttggtttttagccttatttttaattatttgatcttggacagctcacctttggagctttttttaattatctgtgaagtggaaattatacatgtcctgcttacattatggaattgttgtaaggtttaaaattaaatgtatattttatatatatatagtaaaatctagctatgtagatgaaagtgcttaatgcaatacctaccacttacttggttttcagtaaatgttttatttattggatgaataaattaattagtgactatgttatatgagataatatgttggaaagtgctttgtaaactggaggcaaaaagcaggtgtaaagtatcgttctttccccttttgaataagggaacattagtagcattctttgccctatgtaaatgacagttaattccctatttgtcctaaattctgggttatgatatgcaaagggtggggagagaaactaggtattgtttttatcagacatatcatctgtcagccattctttcacactgtttacattgtgcatttattgtatcctgctcattgtttaagaaatatatccctagtgttcagccagcaattatgccagcctgacctaccttcagatggcttgaaatggtttactacagtctgcatcactatgtctgagacccttgtgttctccatccgatcttaaattgaattttcttttctcttctaggtcatcagttgtgttttccatcaaatgctcagtgtaatattaatgttagaagttggtgaaggatcccatcgtgccccccttgctgttacctcccaagtcatcaactgtagaaaccaggcggtccagtttatcaggtgaagcacacaaatcgtgaattttcaccctgtcagtctccctcagtactctgggccctgcactaagatttctgatacatgtagacttaaaatttctggcctgatggtggttttgggggtgaaaaccaagcacttcgtagctaatgtgctttatgtgtctgggtctctgttggtaggctcccagctggggcactgttaaagagataggaatctgcagaacacgggccagcgccagcctccagcttgtttgcgctcaatatgtgggtcagcctcagagagaggatggtggcctctcctcctttcccttgtctgcttcattgcagccagttcacctctttcccttttctgttgctctctactttgcagctctttgcttttgttctttgccactttcttcttgtttctttgcacttttctattcctttccctctgtagaaatgacttgaaggaaaggattgagttgctttttacctccgtagcaataagtgttagactacttttcctctcatgggtcactcagcttcacttaaaaactctcatgccttagtttcactggcaaggacatgtttgctgcgttgttggcttttccttccctccttcactgatttttggcgtgcagtgtggaggtggtgccgagacatggtgtgcatgtgcaagtgtgtgcatgccttgggtgtgcacagtgtgcagggtagttggagacatggggtgtgtatgacgtcatcttgtgactgagcaaatgtctctcactaaggactttttaaaacattaagtaactaaaatgttttaagtgaaaacacgatcgtttcgttttttccatgagagtttctcatatgccagtcgcaatagtcttcatgtaatgttacagataaacatcactaaaaatggatcaagtctgggcattgtagaaatttcttcttgaggcggggcgcggtggcacatgcctgtaatcccagcactttgggaggccgaggcgggcggatcacctgaggtcaggagttgaagacgagcctggccaacatggtgaaaccctgtctctactaaaaaatacagaaactaggcgtggtggcgggcacctgtaatcccagctactcgggaggctgaggcaggagaaactcttgaacccggtgggggaagttgcagtgagccgagatcacaccattgcgctccagcctgagcgacaagagcaaaactccatctacaaaaaaaaaaaaaagaaatttcttattgggttaaagtttggagaagtaatgttactaatgcatttcactgagctaccatgaggtggtactgtgtcttagtcaatttttatatttatccccaaaggatatattttacatcttcatatgaaatttagtaagtagtcaaaagaattgtatgaagattacatttttgttcttacctgatgacttagctactctgcagcagctctcaaaactgcacgggaactacttcacagttttctacgatgacattttatgtcttcactcttcattctactgaaaccactcttatagcgtgaggtagagtgttttaataactaggatttctaaatataggagtagtggtttttggggacagtcgctgactgtattgtgaacagtagatgtgtttttcttttacaaagcgcccttgtggatgaattaaaggagagtatattcccagtcgtccgtatcttactgcagcacatctgtgccaaggtactgtttgccttagtaatattaataacatggaagtatatcgtgtgtgaagataaatgtgtgtgtgtgtgtgtgagtgtgggtatttgttcttgggaatgagtgtgcattgttacttaaagtggttttatttaatgttcactagatggtcccctagacaaaagtgttctataaaaaacaaaaaaacaaaaaaactttgttttggaaaaatgttgaacatacacacagaaacagggaaaataggctggtgaaccaccacatacccatcaccgagttccacagttttgtgtcacttaaacccctaccccacatcccccaacatgtgtatactggattgtgttttgaagcaaattccatcatatcctttcacggtaattccttaatattatcaaacatccagtgttcaaatttccatgatgatctctacatttttataaccatttagacaaatgattcttaatttgaaccttatgaaacctggggatctaaaaactctctgaaattgtatactaaatttgtatgtgcatttttctggagagatggtttatagatttcctttagattagttttgaagtgttctaaaacctaaaatttattagtcatttacgtaacatttaaaggtcattgaactagttgtactcactgactttcaacttatattacagaatatgtttcagccatcctgcgggtggatattggttggtcaacttctctttttgcttttcaggtggtagataaatcagagtatcgtacttttgcagcccagtccctagtccagctgctcagtaaacttccttgtggggaatacgctatgttcattgcctggctttacaaatactcccgaagttccaaggtaggagatagctctgcataaaaccttgggtcctttttaaactctttttaaaagggtctctttttctaggtctgaatgaggagggttctttggttcttactcctatctgatggcaattcttatgatcttgctttaccagatcccacaccgggtttttactcttgatgttgtcttagctctgttagaactgcctgaaagagaggtggataacaccctctccttggagcatcagaagttcttaaagcataagttcctggtgcaggaaattatgtttgatcgttgcttagacaaggcgcctactgtccgcagcaaggcactgtccagctttgcacactgtctggagttgactgttaccagtgcgtcggagagtatcctggagctcctgattaacagtgagtatggcgactattgggacagtaaaccggtcttgtgctcattgagaaatagactgcaagggaatcgttcttttctgtggcaaaagtaataggtatggcatgatctatttttactctcaaaaccatttttagtatattttcttgccaaataactttttaaataggcaagcctgatacatttgcaaggccttttaaaagtatttcagatgttcatatctgagaggtgacattggtggctacctttactgttgctttgcattggtgggcattggtcgtattaggatgaatctccgtttcaatgcatacccaaggagaacgttatcagttgtcagcaatttagaatctgtctgccttgtctttgagcctaattatcttgattttgattcctccgtggataattactcagtttatgatactgacttcttccttcttatctttcttcttgtttttaggtcctacgttttctgtaatagagagtcaccctggtaccttactgagaaattcatcaggtaatggatcaatacattttcaaatattgaatgattatcttttaaaaatttgtggaatatttaaaatgtttttcttacctccttatttacctgctttaacattgtacttttttcatgagagaggttgaaattcatttcagtaataatgttgtaacttaaatgagtaacatgccctgctaatgttattaaaagtataacacatttttagcttaatgactgtaattttttttttaaagctttttcctaccaaaggcagacatctaaccgttccgaaccctcaggggagatcaacatagacagcagtggtgaaacagttggatctggaggtatgtcagattttatcactgtcagataggtaatactgctggatttcagacaaccgtaagtagagtctaaaaccttggatttttttttttttttctgatttattcacccctaagagttgaaacagctggctgggcgtggtgactcatgcctgtaatcccataatcccagcactttgggaggctgaggcctgcagatcacttgagcccaggagttcaagaccagcctgggcaacacatcaagaccccatctcttaaaaaatatatataaaaatcagctgggcgtggtggtgtgcccctgtggtcccagctactcaggaggctgaggtgggaggatggcttgagcccaggagttccaggctacagtgagctctgatcataccactgtactccagcctgggcgacagtctgtttaaaaaattaaaaaatgaaaataacactgcagggcagtctgcttttttgtaccagcttagttactaaatagctgcatgatctaggggtatacctgtcgttttccggttgtaacaccctcccatctttcccagacgactgttgggaaagtctgtagaaacaacatttaagaaagtgatttaaagagagagagacacagataagagagagaaagagcatgtacgtagaggattaattacataattgggtttattaatttattcaataaaccttgatctggtccttcccgatgcgttccaggcattggagatgcacaagtctgtgagacagagctccatctcttaaggatcagtggagagacaggtgcttgtgcacacaagtgttctcatatatacaattgtgcacacatgtatgcggaacactgagataggtgccgagatgcacagaaagcgccctgaggatgattacattactgcttttattattcagcctagaaggtcagcgtgaaattgggttcaggaggctagatattagcatgtattactccaattcagagcgataactacatttataataaacaggttttctaaatgtggtaggaaaatgtactctggaaaaatgctgaatgtttgtgttggctccagacttcgtctaaacaggttacggatttacggtggcacagactttttcaagcaatatcaagttgaggtgatttaatgatgcttaaaaattatgaaagttcggggacgcaaagagcccatgtttccagtgcattgttcataagctgaaaggacatatattgttggcattaattgtacattaaaaattttgtatagtcacttagatgcactttgctctctttgctttttcttattaaggcagagttcacacaccataaagttcaccatggaaagtgtataatgtagttgttttagtatagtcacaagattgtacagactaattccagaacattccatcagctgaaaaataaaccccatagccattagcagtcactccccatgcccctttcctcctaacactggcaaccagtaattttctttccttataaaattgcctattctgggccaggcgtggtggctcacaccggtaatcctggcacattgggaggccgagacgggaggaggatcacgaggtcaggagatcgagaccatcctggccaacatggtgaaaccccgtctctactaaaatacaaaaaattagctgggcgtggtggcacacacctgtagtcccagctatgaggaggcagaggcaggagaatcgcttgaacccaggaggtggaggttgcagtgagccgagattgcgccaccgcactccagcctgttgacagagcgagactctgtccaaaaaaaaaaaaaaaaaattgcctattctggacattccgcataaatgcagtcatgtactgtgttgtcttttgtgtctgacttctttcacctatagcgtgttttcaaggctcattcatgttatagcatctatcagtacttcattcctttttgtgctgagtaatagtcagttataaggatacaccacattttgtttatgcattcatcagttgatgaacatttgggttgttttcactttttggctattgtgactaatgctgctgtaagtattcttgtatgagtttttgtatagatgtgtggtttcattccctctgagtgtatacctaggaggagaactgctgggtcgtatggtaactctatattcaacattttgaggaaccaccacactttttcaaagtggccacaccattttacaatcctgctagcaacgtatgataatcctatttctctgcattcctaccaacacttgccatgtctgtcttttttattttagccatctttgtgggtatgaggtggtatctgcttgtggttttgatttacatttccctaatggctaatgatgttgagtaaattttcataggcttattggccatatacatacgttttctttggagaaatgtctattcaagctctttgcccattttttaattgggttatcttttatttttgagttgaaagagttatttttatatatataccttatcagatatatgatttttaaagacttgtcccagtctgtgggttgtcttttcaaatggtattctatgaggcacaaaacattttaattttgatgaagtccaatttatctttttctttttttactcatgcttttggtatcacatagctaagaaatcgttgtgtaatccaaagtcacaaagatttactcctgtgttttcttctaagggttttatagttttagctctcacatttaggtctttgatcaattttcagttaatttttgaatatggtgtgatatagggggtccaccttcactcctttgcatgtgactatccagttgacatagcactgtttctttcagcctgttccttcacctgtgagtgtcttggcacccttgtaaaaaaatcacttgactgacttgtataagctcatgagcttatttgtgtgctctatattctatattaatggaattttatttcattaatctatatatctgtctttatgtaccacattgtgttgattgccgttgcgttctagcgtaggagaggggaaataattttttcttcagtcctcatgagttcttcctcgggatggatccccataacaagacaaacaagtttattaacatgtctagtgcgtgttatgcgggagagatctcaatgcaaagtaactgagggcttagaactccacttacgtaacacaaaacaccatatccaaaaaatgctggcagtacagtacactggagactctctgttgtccccttttgatggggtggctgacggggagctactcttgctgcccagcatcgtgagagtgtatcattctgcatgtcactagctaggaagtgagcagaattcaaaactcaaagtatggtttgaatgtgcattgctgtcacattattgcaaaatcagaaaatcctaagtcagggactgcctgtatgtgggaggaaaacaatggagtgagttttgtgaattgctctgggctgataagggtccagagaccccgtgtgtaaaggagaatttatatactgcccatataaataaagaaaagggaaaggatagacagagctttttctctgtttgctgctgcttgttaattgtctgctttaactgtcttcccagaaataatttttatgtcagagtcatattttggtgttaacatagtatcctgtgatagtcaattttaaatcaggaagtatgagttctcctcctgtccctttgttcttttttaaaattagtttggctattctgggtcccttgtatttccatatgaattttaagattaattgccaatttctgcaagaaaaaaaaagccatcttggattttgatagggattgatctgtacatcagtttggggagtgttgccatgttcgtttgttaattcctctaatccatgaacaccagatgtctttttatttctttcggtctttaatttgtatcagtgatgttttgtagttttcagtgaaccattgttgctctttaaattttgtcctgagtgtttttattcttttcaatagtattgcaaattaaattgctctcttaatttcatttctgaattgttcattgctagtttttacaaattatttttgataattgatcttctgtcctgcaaccttgccaaactcattacgagctctaatgattgttttgtggattccttaggattttcttgatataagaacaagtcatctgtaaatagaggtagttctacttcttcctctccaatctggatatctttcatttctttttcttacctatttgttgacagaaagagtcaagctctgtaaaatatttgaagacatttattctgagccaaatgtgagtgaccatggcccgtgacacagccctcaggaggtcctgagaacatgtgcccaaggtggttgggtgcagcttggttttatacactttagggaggcatcagacatcaatcagatacgtttaatagatacattggtttggtcccaaaaggcagggacaaggtggggagggttccagcttataggtagattttaaatttttcttgttgaaaattggctgagtttgtctaaagaactgggttcaataggaaggaatgtctgggttaagataaagggtggtggagactaaagttcattactgcagaggaagccttcagatagtaggcttcagagagaatagattgtaaacgtttcttatcagacttaaagactgtgttgatgttaatgctggagggtataatgaggcatgtctgacccccacatcccgtcatggtctgaaccagtcttcaggttaaattttagagtgccctggctgaggaggaagtccattcagatggttggagagccttagaattttatttttggtttacagtctgtggaatgatgttgaaaagaagtcaaagagtagacttctttgtcttttttctttacttagggggaaagcttttggtcttcaccgctgagtacgacgttagctgtgaggtttttagtatgactttcatcaatatgaggaagtttccttccatttcaagcttgctgagtttttatcatggaaaggtgttggaatttgcaaatgctttctctgcatctattttgagatgattgtgtggttttctttgttctgttaccatgctgtaatttacattgattgatttttcacaggttgacatttcattcctgggataaatcccaagcatggttgtatcttgctggatttggtttgctggtattttgttgagaattttggtgtcatattcataaggaatattggtctgttgtattaagccattcttgcattgctataaagaaatacgtggccaggcgtggtggctcatgcttgtaatcccagcactttgggaggccaaggcggatggattacttgaggtcaggagttcgagaccagtctggccaacatggtgaaaccccatctctaccaaaaatacaaaaattagctgggcatggtggcaggtgcctgtaatctcagctacttaggaggctgaggcaggagaatcacttgaacctgggaggtagaggttgcagtgagccaatatcatgcgactgcactccatcctgggcagcagagtgagactctgtctcaaaaaaaaaaaaaaaaaaaaagatgtgagactgggtaatttatcagaaaagagatttaattggttcatggttctgcaggctgtacagaaagtatagcactggcatctgtttctggggaggctttaggaagcttagaatcatagcagaaagccaaaagggaacaggcgtttcacatggtgggagcaggagaaagagtcagggggaaggtgccacacacttttaaatgaccagatctcacaagaactcactcagtattgctgtcctgaagacagcaccaagctgcgagggatctgccacagtgatccaaacacccctaccaggccccgcctccagcactgggtgttacagttcaacatgaggtttgggtggggacaaatactcaaactatatccgttgttttcttgagatgttttggttttgctatcagggtagtactcacctaagatgagctggaaagtgtattcttttctattttttgaaagagttcatgaaggattgttgttcatttttgctttaacatttgttagaattctccactaagtgtctggtccttaggaaggggtgtgtgtgtatgtgtgtgtgtaaagtatttttgattactaatttagtttctttttctttcttttcttttctttttttttttttttttgagatggagtttcgctgttgttgtccaggctggagtgcaatggcacagtcttggctcactgcaacctctgcctcccagctcaagcaaatctcctgcctcagcctcctgagtatctgggactacaagcacccgcccccacacccggcaaatttttttgtattttttgtagagatagggtttcaccatgttggtcaggctggtcttgaactcctgacctcaggtgatccacccacctcggcctcccaaagagctggcattacaggcgtgagccaccgcgcctggccactaatttagtttctttactcgttacaggtatattcagattttctatttctgtttgagtcagtttctgtagtttgtgtctttctaaaacttgtcgttctaaaaatttgtttcttttatgtaggctacttaatttgttggcataaaattgttcatagtattcctttgtaatcctttttatttatgtaaggctaatagtagtaatgtccctcctttcttgattttagcaatttcaattttctttcttattttcttcgccagtctagctaaaggtgtattagttttgttgatcttatcaaggaacctacttttagtttcattgatttttctctattgttttccatcttttattttttaagctgccttcttatatataagcagttcccaaagtgtgttttgggaaccctcaggggtccttgaagtaaaaatgagtgcagtgttcatttgccttccacactctgatttcctcacgaatgtatattggagttttccagtggtcccatgacttatcaaattgcaacagattgcaggtagaaacagagatgagaatcctgtttaatataagccagatgagagataagctggcttatattaagccagacattttaaagtttgcaaaactctaaaacaatgccattctttttttttaaaatcgggtcttggtgtgttgcccaggctggactcgaactcctgggctcagttgatcctctgatctcagtctccccagtagctgggattataggcacattccaccacatccagccttttcactatttttagtttatttgttttggaaaatatagttattttttatgaaaaagtactaacagtaacatatcttgctcttttaaaatgaattaataaatatttttacaattctcagtttaaatttctgattctaagtattaaaagatataatctctttagggtcctcagtaatttttaagaatataaagaagcctcaaggctgggcgtggtagctcactcctataatttcactgctttgggaggctgagttgggaggatcacttgaggctaggagttcgagaccagcctgagcaacacagcaaggtcctgtctctacagaaaaataaaaaaaaattagcatggtggctcatgcctgtattcctagctacttgggaggctgaggagagaggattacttgagcccaggaatttgagattgcggtgagctatgattgtaccactgtacaccaccctgggtgacagaatgagacccctgtctcttataaaaaaatgtcttcaagtcaaacattttaaagctgctgttatatattacctcatcaaatctttaaaataatcctatgggttagatactcctatttgtagctaaacaaaatggaagagataaataattcattcacaattttagaggtaggggctgagatttaaaaccaaatttttaatattccaaagtttatatgcattacagtgaatacctaattattcacattttcttctttttccacactctcatttcttaggatttaaaacaagctaatgagtctttaagatgagtgtattttctgggtattgtgtggtgaaatgttagctgctgtgtgacttttctccagctgtgatgaccctttggtattccctctacagaaagatgtgtcatggcaatgctgagaaggaggatcagggatgagaagaccaacgttaggaagtctgcactgcaggtgggagttttctctgcacatttttttttttaagcactaaaaacttggaaatgcaaaggaatattttttaaactcttaggccatattcattacttaatttgcttttcgcctaactgttagttgaccctgatcctgttgtatatgaatcatagacgaactggaagattttttatttttaagctttcctacagggtttctgatttttttaagaaccacaaatttatatcctgaatttgtttagaatagggattcttaacctagggaccatgggtggattttaataggttcataaaatagtttgtaaatatttgtttatataaaatttgtttttctctgagagaggccttagcaaattggattctgaaaaatgggatgttgtgaggaggaaggttggatccatgaccccaaaatgttaagaaccacaaacttaaaggaagtgttcctttgttaacagtttatctttgtgagttgatgctatgcagttaacagttcatgttgcgtctatgccttctaggtattagtgagtattttgaaacactgtgatgtctcaggcatgaaggaagacctgtggattctgcaggaccagtgtcgggaccctgcagtgtctgtccggaagcaggccctccagtctcttactgaactccttatggtgagaggcaggacattatatatgtaatgcatggtattttacattaaaagtaattccacacaataattacctgctgctaaacgttaagttgacctttaaaaactctactaagtccactgtagaactgtacaatgtaagggaggaggtatttttgaattatgtgtgatagactgtgcttcctattaaacataattaggaactaatgctagagaatgccaattgttagccctttcttcactttattgttattattattatttttgagacagagtcctgctctgtttctcaggcttagagtgcagtggcacaatctcagctcactgcaacttctgcctctcaggttcaagcaactctcctgcctcagcctcctgtgtagctgggactacaggcaggtgctgccatgcctggctaatttttgtatttttagtagagacagggtttcactatgttggccaggctggtcttgaactcctgacctcaggtgacccgcctgccttggcctcccaaagtgctgggattacaggcatgagtgactgcacccggcccttttcttcactttaaatctcacacagaaaaataaaatttaaaattgatttggttaagctagaggcctagattaaatttagtcaattagggcatagatagatgatattgccaaaaaagcagactcacaagtactatatttaatttacttttgtttactagttagcattttagtcaaagaattttagaagtatgtttatttctttatttcataatagaaggcattaagcaatgcatattttgactttttctgtcagcatctgttctaattgctctttgggatatttattatttgctcttgatttttaatgaccaaaaaagtactgatttactagtagctactagtaaaatagtgactttaatgtatgagtttaaaattttggtttgcagtgatttacattaagctggctttgcttttgtatattttttgaatttttttcttttttcactctatggtctatttgcagttgaaggtgtgattatttttaacatctcaaaatgttgatcacaacttccctgacttgtatttagaccttctcatgtcataatctttcactcctaaggctcagcctagatgcgtgcagatccagaaagcctggttgcggggggtggtcccggtggtgatggactgcgagagcactgtgcaggagaaggccctggagttcctggaccagctgctgctgcagaacatccggcatcacagtcattttcactctggggacgacagccaggtcctcgcctgggcgcttcttactctcctcaccaccgaaagccaggaactgaggtaggttaactgtatgacctgtgttccctatagaagaaggccgtaggactttgtattaataaatttctcctattggtcctcgaaaaatcagctttccagattacttagtgtatgtgaagattaagtattggtctctctttccctgactgacttccaatctcttagatatttttatcgcctgtatgtttgtgacacctgtttggtcacttcctttgcatctgtctgacgctttccagtttcagattttggtgtcttcatatgtagtagacaacactgatggagatacatattaatatcacctttccccaatactggttatcacgaaggatgacttcctagctcctgcaagttaaactgtttttaacacctcattggattaattgacttaactaacactgcaggctttttcccctttgataacacttattgaacatacactgtacagtgaatattgtagttaggagttaggatctgtgatggaggaatcatcatgcggtagaaagaaaatagatttagtatcaaaaaataccattctgcagccttggcaaaaatcactttctctgagccttagtttcctgatttgtaagagcagccgttgtactctaggatctcttcatggttttctcagtacaggttgagcatccgtaatccaaaaatctaaaatccaaacatgctctggaagctgaaactttctgaatgtcagcatgatgccacaagtggaaaatctcacacctgaccgcatgagacgggtcacagtgagaatgcaggctcacagcatacagtctgttcagcatccgcaggcgaaaaataaaatcaccttccggctgtgcatacaaggtgtatatgagactttggttccatccccaagatatctcattaagtatatgcagatattccagaatccaaaacacttctggtcccaagcatttcagatgagtgatactcaacctctacccaccctatgctttcctgagatttctagaatggagagatttagctaataatagagtctactgctttttcacttttcttagagatacctccttatgcatgctctatgtattaattcatgttaatgtaatgaaaggtagtagtcattctttgcaaaaaagcaggagaggccttctacagctcctgagaagctgttgggaggttttaaaatttatttttctttataaaaacttttgtattgaagtatagcatgtctagaaaagtacacaaaccataaggtcagtaaatatcacaaagagagtatgcctgtgtaaccaccatgcaatctctgtttatcattgtaggtgatagccacctctgcccaagttggctaatacttgaaaaaaagtggcccagaactcacgtgctgcacattttctgaaattactcttgacttctgatttcatggcaactcttcttattttccagtgttgcttaaaattttgtcttatttttggtattcatttatttcagaggtctttaaggagacattaaaacaaacaaacaaacatgggctcattattaaacctggaatcaggttgtggatgaaactgcttaaggagattataaaatgagtaagaaaaaatgcaagtttagaagaggaaccttgcagaagatgtgcattgaaggcttcagcagaggaagatagccatgtcaaaagaattcagaagtatggagaagtagaggaataactaggagaaaattattcaaatggaaacagggagtgaggatttcaagcgaagcaagtagtcgacaattctaaatgtctcaaaaacatttcaaacaaaacttgttcacatcaagttagaatcttgcacccaaccagattattcaacatacagggtaaaataaagccatattgagacgagcagaaaaccaagggtgtttatcgccaccacctctccactaaagggccatctatgagggatgtacttcaggccaggctatattcccagcactctgggaggctgaggcaggagaactgcttaagaccaggagtttgagatcatccctggcaatgtggtgagaccttgtctctacaaaaaaagccatttgtggtggcgcacgcctgtagtcccagctacttgggaggctgtggtgggatgatcgcttcagcccaggaggtggaggctgcagtgagccgtaattgcaccactgcactccagcctgggcgacagagcaagacctcatctcaaaaaaataaaaaggatgtacttcagaaggatggaagctgaattcagaagggaggaatgagaaggaaaagttgctaagaaatcgataaacacatagataaatctaaattaagcatagccattaaaaatcagtaacaacaatgatatgaggatgattaactgagatgactgaaagcaaggtgaagctaaaatataaaaaagtatgtaggatgagctggagggtgcatttacttgcatttctagcattggataggaggagattagagatgctgattggcattaaactcgagttaacactgcagacaaccagggatagtcgtatgtaacttctgagccagtagaacagaagtaacactgaagaaagttcagtgcaagaaaacgcagaacagaagtgaggttaaaaaatgagaaggaaataaaaagcatggtatatcgaaatcataaaataaaagggtgaattaatccaataggtcagtaatctctataaatgtaaatgacttccatttaatagttagtggacaaaatctttggatataaaaaccaaaatccaactacatactgtttataagagccacacctaaaataaaattaccagaaatgctgaaagtaagaaaaaggttactagaaaaataatgcaaaaagaaggccgtatcaaatagaatagaatttaaaatagagtcaaatagaatttaacggaaaatgtcatcagttgtaaagaaagttacttataatgataaaggaattatacctggaagagttatgtgttcctaaaggatatgtataaaaccccatgcccaataagcacacatttctaagcttatgtgaaccatttataaaaattgattatgtacaacttcagagtcaatcttaaatatcaacaattctgtattaataggataatgttctctgagcattatacaataagtagtagaggaaaacctcaaaaaagagcatttgaagaattaaaaaagatacttctaaataactcgaaggtcaaagaccagtgaattggaagatttttggaactgaatacgtgccaaaacttgtagaatgcatttaatggagtacttagaaggaaatgtgtaacgttaaatgtgtattagaaaaggaaaaggactgaaaactgatgagctaaaggttcaatttaagaagttacgaaaagtctttgaataaacttgaggaaaagaaatgctaaaatttagaaatttaaaaactgggaaagaaaaacagtcttcaaaaagcctaatggaaaagataaacttctgccgagatatgacaagaaaaaaggtacaaataaataatattaatgatgaaatgggtgatacaactacaaatgtcttgttcagtatacattcagaaacagagtattcagaatgtattagtattttttaaagggcacagttctatataggcattttttagtctaaaattttaattgatacagctctttgtattaatttgccagggccaccataacaaaacaccacagagtaggtggcttgaacaacagaaatttattttctcacagttctggaaggtagaaatttgagatcatggtgccaggagagtgggtttctcctgaggcttctctccttggctgtgacctcatgcacatccctggtgtctcattctgtgtccgcatttcttcttataaggataccctttgtgtccggaatttattccttctggtgggttcttggtctcgctgacttcaagaataaagccgcagaccttcgcgatgcatgttacagctcttaaagatggtgtgtccagagtttgttccttcagatgttcggatgtgcctggagtttcttccctctggtgggttcgtggtctcgctgacttcaggagtgaggccgcagaccttcgtagtgagtgttacagctcttaaaggtggcacatccggagttgtttgttcctcctggtgggtttgtcatctcactgacttcaggaatgaagccgcagacccttgcggtgttacagttcataaaggcagtgtggacccaaagagtgagcagcagtaagatttactgtgaagagcgaaagaacaaagcttccacagcgtgcaaggggacccgagcgggttgctgctgctggctcgggtggccagcttttattcccttatttggccccgcccatgtcctgctaattggtccattttacagagtgctgattggtgcatttacaatcctgtagctagacacagcatgctgattggtacgtttttacagagtgctgattggtacatttacaatcctttagctagacacggagtgctgattggtgtgtttttacagagtgctaattggtgcatttataatcctttagctgggcacagagtgctgattggtgcatttacaatcctttagctagacacagagtgctgattggtgtgcttacaatcctctagctagacagaaaagttctccatgtccccacttgacccaggaagtccaactggcttcacctctcaccttgagcttgggttagggccgaccctaacagccacgttttaacttcatcacctctgtaaaggccctataggagggaatggtagaggtgatgaaagctgagcctgaggtttggaggagttggaagaggaaatattttattcaactgaacaaacatattttgaggacttcattttccaggactggttctaagtgctggagattcacagaatagttcagtgcacttcctctcctccagttgctcttggtctagtgaaatagacaaaagcaagtcacaattttagtggaaagggagctacaggagaacagaggaagggcacctggcattttggtgattatttcttcctctttgtcctctttctttcttcttctggcttagggtggcttcccagaagtagtggcgtgggtagaatatttgggaatgtgtaggaattcagcagccagagtagtaagggttaccagaaaggaaatagtcatgcaaaagctcagaggccagaaggctctatgaaatctcaggaaaatgcctgaatcaattgctgttgactgaggtgtggagagcagaagtcgggcaggttgaggacagagggagtgctggagatggaagcccagcttcaacttgaatgctttgtcacacctcagttgggagctcttggtaatgcatgaggtcacccagagttaggttggagataagaggactaagaatagagcttttcaaatcagcaattagttattagaagacaggaattagttacaggagatgaaaagagatccaactggtggaccagagtctcagcgcaagagtagtcagtaacctctggtggaggccatggagacgggcctgaagcatggccgttggttttggtactaagatagaagttagtgtgttgggtcacagtctgcccaggtggggaatggctgtggccctcagctgggctgggaggctggctgggagtggagggctgggagttgtcaaagaggagccaagtttgagatttctgcaagttcagaggattttttcccaattctgttggctacatataataaacattacttaatattttatatcgttatttttaaataaatttaaaaatacttgttcattgcttatatcttgtggtatttggacataaatcagacataaatcatgttgtaagctaactgtagtaagacttgacatctgtggatggatttttaatcaatagctgatatattagcaaaacttcatttatatgcatatgcttattatggtatatagatgtgtttattttgttacagttaccttattctgtatgttttgagaatttcccttctaaaaacagtttaatgaggaattcctgatgttcgcgtgtgggtatgtatgtgtatgtgttttcccagaagtctaagaaaaattaatcaagggaagaagtgtatttttctcttcatttaaatatataatatggcattgtctcatgaatcatatgatcccattcagtgacttgggaagaagtaaaataagagatagttctaaaacaacagtgacagccaggcacagtggctcacaactataatctcagtactttggaaggccaagacaggaggatggcttgagcccagaagttcaagaccagtctagacaacatagtgagaccctgtctcaagaaagacagacaaagagagagagagagaaattagccaggtatggtgaccatgcctgtagtctcagctactctggaggctgagggaagaggattgattgaacccaggaggtggaggctacacagagagctgtgatcatactactgtgatccagcctgggtgacagagtgagaccctgtctcaaaaactagtaatataacacaaacactttagtacatcagaagcattgttttttattttgaaaaggtttgaaatatctatttctgagtggtattaagttattgcatattttagctcatttaatatcatcatatttaattgttaggttgtcatttacaatcctgccatgtagtcccagctactcgggaggctgaggcaggagaatggtgtgaacccgggaggtggagcttgcagtgagccgagatcgcgccattgcactccagcctgggcgacagagcgagactccatctcaagaaaaaaaaaaaaaaaaggacaatgttactaatttttgtcactataactgtgtaagctctggatgtatctgtaactgaccccatgcagttatgtagaaattttggaggggaggaggataagaagagtctgaaatgaattgtgaaattttattctttactttaaggaatattttatgaggggaaaaatgaatataactgatagtagaataataaaaatttaaaagatacctagtttggtatcagacacgccactaattaggaacgtctacatataagtttcatgtgccacttgagtcctggagcagcagaagttgataccctttcagtgaggctcccatctgaatcattttgtatatttacagttgcaattctgcttttctatcttttttttttccagccgatatttaaataaggcttttcatatctggtccaagaaagaaaaattctcacccacttttataaacaatgtaatatctcacactggcacggaacattcggcacctgcctggatgctgctctccaagattgctggctcctcacccaggctggactacagcagaataatacaatcttgggagaaaatcagcaggtttgtatcttctaatttaaccagtaatgacactgaagagtcttagaaacaaagcccaagacttaaggaagtgagctttttcatagctattcatatacagagaccttctgtttaaaacctggtataaaaacaagcatgaaaaaaataagaatcatgtttcacccatttcccctttgtccaagtacattaaatgccttgatgttcccacagcttgactcctaagccatgctacctaccctgcttcctccagtgttattaatccagaagaaaggcctttgttggcagcagtgtttaacttgcttctcccttcatattcctcctgccctttctctagtcagcagaatcccaattcaaacaccttaggacatattctctgtgtgattgggcatattgcaaagcatcttcctaagagcacccgggacaaagtgactggtgagtgtctgctggagaatcttatgtgaaaatgcattgctgttcatttcaggtgtgtgtgtgtgtgtgtgtgtgtgtgtgtgtgtgtgtgtatatatacctgaatatatttaagcagttgaacttcaggggttttgacttccttcatagatgctgtcaagtgtaagctgaatggatttcagtggtctctagaggtgatcagttcagctgttgacgccttgcagaggctttgtagagcatctgcagagacaccagcagaggagcaggtatggccagactttccctgacatgtttctgacttctttgagcttaggatgttactgtatgtgttttgaagtgtgaggagcattctctataaataagaggacgtgtaaggatgtcccccgcagctattgccgcaacaaggcaaggtttacataactagcaattgacattccccaagaagatttagctgcctaagagacacggcacccttagatggtcaccaccttgatcgcaggtgcgagtgtctttaggtaagcattcctgttgattgtcatttcctggtgagaattctgcaaggttctctttctccttgacttccactctcattccaagaacacttatagacaattttccacttaagcaggaagttccctccagaacaggtttctgaccttctgataagtcataatcttggacatgcctgtcctgttactatgaggttacactactcaaatatctcttgttggtatcgtgtccccacagttgcctatagcccacagctagtgtttttatataaacagaaatccacatcagtgatttatgggaggcagagaggtactttgactccttaaaaggtatgcataccagtaactgaagaaataattttattaccatatatttattctgtttttatcatgagatatactcttagtaccaatcataatgaaaaaatgtagagctggggttattaataatggctatagaaaacaaaaattaaataattgctgggatatatttaagttttccagaataaaagaaaatgatggcttcagctgatctccccaactaccttcctgtgtttccttttcttgaccaagttcattagagaaagcccttccttaagatgttacattttctacttctaacagatcaactaaaacaatgattgtaacttttttgcttgggacttaagactgttgacctatttcttatgaaatggtgcctggtgtttttctggtatctatctttaagctgttttattgatgaaagggatacttgcattatttgatttttctaaccctttatctcaagacccaagaaattatatgacaaacttttatttttatttttgagatggagtctcactctgtcacccaggctagagtacagtggcgcaatctcagctcactgtaacctccgcctcccaggttcaagcaattctcgtgcctcagcctcccgagtagctgggattacaggcacatgctatcaggcccagctaatttttgtatttttagtagagacagggtttcaccatgttggccaggctggtctcaaactcctgatctcaagtgatcgcctgcttcagcctcccaaagtgctgggattacaggcgtggtaagactgaggaaagagtgatcaggaggaattaacgttacagactatgaaaccacaagccttccaggctcagtggtacacaacttactaccggcagagctgggactagaactaaggcctctgactttttcctaattttcttttcaccagcactggttggaaaaagaatcatgtgtacagcgcgcagtcagggcctaggaagtcatctgccgcttgctgctggcccagggccattaggacggtggttacattgtcatgagagcctatgaggaaggcaagaactgtcttcaggttagacactgagagctggaagcgggtggggcttactactgcattagcaaagaccgccacggttttaatctgccgacacaacctcacttggtggttgacagaggagcaaggccctgagattgtctggaatgttaggatattttcaatccatgtgacccgcttgtttcccctaaacacgcttctccttttcttttctctgtaagtgaatatcatttattttactgagagcaacagattacccaaagatatagctcagcagcagtatatatgaaaggactgtggtctttgggcatttttgttatctgttttgtgactgtcattaaaaaattgatgagatcttgtatcagtagaaatagtgtctagaacaagaggagcagtgatcctgtgtgctggctgatagttcagtatcagtgacaaatttacagagaagtgttgatgaaattgaatataactagaggagagcagttaaataagggtatcacaaagcaagttatgtaaggaactgcagaagggcctggagtctttagcatggagaagggaagggttggggacggtaggctgcctagctaaattcaaatttatgaaggactttcagataaaagaattggatttatttggtattcccagacaacctatctggaccaatgaatggaaattataaattttggtgaactgcagagaaaacttactgaggtctgcccaaaatggtgggcttgccccagagcatgtcccctgttattggaggtattcaggagaagctggacaaggacttggaacaggctgccatgtggagagaatgccaggattgggtggccttgtcagctttcccagattctgtgataccgaaacttactagtcctagtacccaggttctggcctcattgggatcaagcataagaattgcagaaactctttgggccaatgttgtggtccaggttgtgcaatctattaaaattttaaatgtaatagttcttttagaagtaataaagccaatagtttccagatacgttagggcaagtcagactaaaagcattgctcatagtggtggcttgccaggcactggatgatggttaacacaggtcccttcctaaggcactacagaggagtgggggaggtgcgtgcacatcagcagataatttcaacataatgtcatcattcctaaaataaaagtcggcatcgggtaacatggaagcaagggggtggaggcccttagctcaacctaggtgttttggaatggtttcctacagaaaatgaggtccaagaattctagaatgtggttgggagctctctctcttccttggcatagaggaacagtccaatgtgcactagaagtcaccccttgaagttattgtaatcagtgagagacacggaacacttgtccctaatgcataaatttcagaagagtagcaactctattttatgtctttaaaaaatgtttatcacagtagttaattcatcatctgtatatggcagcaaaactacagcttatttctgtatttttggaggagcactactattatagatctcttacaaattactacatggggtcattgtaaatatttggccttttgctcttatagggcaaatgtaaaaagaaagatgatatatacaccgttctttataaattccacttagccagtactcatggctagattgcttaaatgcatgtcattgtggttttggacaaattgtgggaaagaggaaagctaggaagcacccctacagcctatccatttgaagatcatagtttcttctgagaacatggtgtttcatgggtagtctgggagatgtgcggggcccttcagagatgacttttgacttgccgtaggaattgctgacgcaggtgtgtggggatgtactctccacctgcgagcaccgcctctccaacatcgttctcaaggagaatggaacagggaatatggacgaagacctgttggtaagcgactgcttttcctaaccattcttttcgcttccattttatccgtgaggttctattaaagatgactttgtcatgtacgctttaaatgcttttaacaaaagagctgtcttagcctagagcttactttctctttttagaagatatttttaaattgataacctattcatttttttcttatatactttttatcggtggggaaactcaatggtatacgcttcatctagttcagtcttatgagaagcctgatttcagtagggaaaacacagtatgtgttgtaaggttggtatagtcaagcttagaaatgtaaggtaagaaataataatgtgagtatagtgtttttggtttgtgtgtttgcttttttaaaaatttaacatgtcttctgagctatttgaacatcagacagtagaactggggaacagtgctgagcaattgccaagtaatgactgaaataaaatgagagatttgacaattcagaacacagatgaccttggagccccaagattgttttctgtggcacccctgctttagaaactgtaaacggtgcaagaaattcccgtgagccaggacgggacagtgggctgatttcagtggctgactggggataagatgtatggcagtaattctggttccaacatctgactttgtccagtaaaggaaataatgagctgctttttgatgccattcagcacagatcattatttaaccaaaacgggccatttttctcatatgtttaaattagtggagcacgtcttttctgtgttcagtttctgcttgttggcctagctctcctaacgcccagtgatcaccgaccaagcttagatttgttcaaagagaagaccattgagcctgaggcactactgtgcacgtgatcaggaatacagagcctcactatgggaacctgggtgctttaggtaagagcaccagggagtgtagcacaggcttggcccagggcttctagagggtcttgctcttctcatttctgcccacattaagaaagatgcttactatggtcagtgagtcttgtccccacccctcctcccccaggtttttttcaactgttaaccgtgtcatcaaaatctactcttcagtcaaaatatatatggagaggttttgccctatatacatagtttcattcttgcttctttaaatagaacttaaatatttttttaatgaagagatacagtatttcaagattcttttaaactcatatactttgttattggctttcttaccctagaataagcttttatttgacattttactattcagcatcatcccttcatttggggtgtaaataaaaaaagaacaatattacttagttgttaaactgaatgttatgaagaaacacagcatggcagctgtgagtaggtttttgatggggtctacatagaaaaataatctggagggcaacttgaaaatgtgtttcaaaatgtgaaatagctttatatactctttaccttggattttacttctgaggaaagagagcagtatctaaggatacacaggtgttcaccagagctaatcgaaacattagcaaagggaaacagcatcagtgttcattgatactggaatagtgcagtaagttatgacgacagtcctagttttgaaatggcatatacttatgtagtcattaaacatatgtgtcatacatattgacatgaaacgatgcctaatattcaaagtaatcattgcagacttcaaaatactatacttggtaagtgtataagaaaagtaaacataaagccacgtgactatagaaatactttgaaaaagttatacacaaaaacaataatggtgtctctgggtggtagggttataggtagatgtatcccagtttacccaagataaccctagcgtacacctattttcacaaaataattattaatagcacccccttttacttgcagatgtgtctagatttagatgataaaattatatgcttgccctaattttggatgagtttcattacatagtgactaagtttttacaatagccatgtatttttatgaaacgaaaactagtaacattgttttaaatttgggggataaaggaaatactccattgacatgtccttaatctagctagagttcacttttcttttgccttatttttactgtaaaaccaattatctttgtaggtgaagtacatttttaccttaggggatatagcccagctgtgtccagccagggtggagaagcgcatcttccttctgattcagtccgtcctggcttcgtctgctgatgctgaccactgtaaggcatttgaaatcatactctgtagcacgcatgccgtttcaaggttctgtcggtaactttctctcccttctttgcagcaccatcatctcaaggcagcagtgaggccccagcgtctcagccacccccccaggtcagaggttctgtcatgccctctgtgattagagcacatgccatcattaccttaggtaagaaaaacatgggagaatggggcttgacatcgttctgtgtgtagctgttgtcttaagtaagcccagccatgggactgtgtcaggggctgcggagcctgtctgtgtctgctctcagccatgtggttcctagaggtggctctgatctgagtgctgagctctgcataactgcgtgctggtcatgagagccctcaggctgataagtcctcaagactaaggtactctctagagggtctagagggagcttttgtttttcagtagggttatgttaatttattacaattatacctgtttctgtaattttttttcaataccttcacttgacttgaatattcctgtaatattttaatattcataatgcagccccacgaagtctgttctgtgccgggcactgcactgagttctggaaatgaagaaataaattttccataaaaggaaatggtttatttagtactttccagaattggctagatgactatttacatatttctccatgaactcaaattatttttaatcttgaaaacactgacctctgtgctggaaattgtattttgtttttttgtttttttatttttcctttagtgtgagtgtatatttcatgctacctaagttattaatttttttgtaatattagttatttttcaaatacctaagaattgcaaaacatttcccaggcacaaaagaaacatacaaacaaaactcagcagccttttcaactatgaacaagaaagaaagaaagaaagaaagaaaggggacatgcattctttcctatttacccagctcagatttcaaattcagcatgggtatttagcatctgtagaggatatgtataatcaggagtaaaatgtttcacctctcaggctttgctgatcattttccaggtaaggggataactgcgaaattcaaatgttgactttaaaaggaagatgattttattagtgtaaaggaacatcccatagtatataactcctggggagtttatttctccttaggtatttttattcgactattcaagatgggtctgtctgcctttagttttttgttgtttgtgattgtgggcatgatgttttaactttgatgaaatagaagccattagcaagatgtatctggagaaaatttaggaatggaattaggatttagaatacagttgagacatcttcctgtcttctgtgccaggtaagctgtgcttacagcacgaggatctggcaaagaagagcatcccagccctggtgcgagagctcgaggtgtgtgaggacgtggctgtccgcaacaacgtcatcattgtaatgtgcgatctctgcattcgctacaccatcatggtggacaagtatattcccaacatctccatgtgtctgaaggattccgacccattcatccggaagcagacactcatcttgcttaccaatctcttgcaggtgcgtaggggggttcaatctgtcctttccccttcaccattgcttctggtttaagggaatatttgagtagcataggaaatgtgcttgctttgtagtagaatccaaaaataattgtctcatctctggtctggagttttactcttctgatgtttagcacaaccttctaaacggcgttacttgtgaatgttcattttgggactttgttcagacatcctgtcaagcagtgagaagtttcattttgaaaataagtaccatgtagagaaaagcatattcagtagacaagtagttctagtttgaattctgttattcttttttaacttggacaagtccacatttctgagaggtaacttcttccttcgtcaaatggggatcatggtgttcgcgctgggctctgcaagtccagtgggacgtttccgtgtgcggaaaaacctagtgaactatagagctctgcagagcgttagatatttttatacacactgagagcccatgtttggcctataatggggagaacacctttcacttaggttgtatgtctgtcctggtatgttctgtatgctcatcttttcatgtattacgaaccgtattataaatagagggtggcaccatccctctaatgccatgtgctttgagtcatttttctcctgtggtagaagggtgatgttgttctgcacatacacttctcggcactacattccgacggtttggaagtgtgtgcctgtgcactcagccagtgtgccggggacagaccgcgtggtgggtggggtgtggctgggaacagtgaggcttgcccatgatgacgcactctgaaacatgccggcttctctctgcacaggaggaatttgtgaaatggaagggctccctgttcttccgatttgtcagcactctgatcgattcacacccagacattgccaggtaaatcttttcctcacgtcagacgactcaacagtttacctcatttctgatgtatgctggatttctttttttttcagattggtttagagttaagtaggatttagtgagctttcggtaggtgccaggaaaattagcagatttttaagatgctaagcaatataacaaacctttgttttgcacacaagtttaaaagaaaatggttagattcatcattgaataatctcagcattgactgcacttgctgacagtgtttgctgttcctgaaggagcttgaagaatattatatgcttgctgtattacactgtatagagtagcagccactagaaactcactgttaatttctaggcaaaaaaaaaaaaaagttaattttgataaagagctgagactttaattgcagaaattttaaggaggaaactaggaattaagatgaaattgcacaatgtggaatcaagtgtacagatgacaagactccttggaaatgggcatttcttcagacttctgtggcgtgggggagtgactttggcaattattaatttctatccttgcatctttttttttaaagatttttttcaaggggttgagaaatggtctgatagaatttgctaccctagagtttgttgtaacagtaattctttttcaagcaagtctgcagttggaaagtagaatgctgaatgccatagcaaaagccccacagtggggaagaggtctttacagagctcattaactataaatggctgctaacagtgggtccctctggatctaaatatagccaccaataatttaccctgagttccgtggaagtttctgctcagttttctttaggtgtgattttccaaggaggggaacatttcacataacaaaccagtaaaactaacattctacttactgctttctagaaccagaggcaaaaagctaaggctgtcacctttttttagatagcttcacacaccctcttaccttcacaacgtgtccactatactgactctcaggactttttacgcagtacgtggcccaggagaaggtgtaatcagacaggctgggaatgctttcagatgatgcacctgggaggtaaaatcggttacttaacctgcatttcctcatttttccccgctgttgttagcccctatatgtgtatgtgaaaaagagcaatgatcaatgagtaaactgtatgtgggatttgtacatatgggtgttcagatcatcaatcaaatgaagagcatagatatactttaccgtgtagtaagattaccagggcctcttctagcattttaacacttcccccttaatctatcccttttatgtccgcatcctgggtttgttgaaaccatggttcaaatgtagaccatgattttcagctttgaaaagctgatgactacatttgctaactgtaatttaagttagtctgttctctggaaattttccttttctttttatttgacgtgtaataattatacatatttatgggacagagagtgatgttttgatacatgtatagagcatgcaatgatcaaatcgggataattagcagaaccatcacctcaaacatttatcatttctttgtgtcaggaactttcaaaatcctctccctagctttttgaaaatagacagtaaattgttgttattatattcaacctacagtgctgttgagcattttcctgtactcctcctgtaattttatatgtgctaatcagcctttctgtacccttcccagcctccgataaccacaattcttctctctgcttctgtgaccctccctttttttaactcttacatatgagtgagagtgtgtggtgtgtatatatatatgtatatatatatgtatctttctgtgcctgacttttgatttttaggccaaaggctacgcctatctgctatgttagatactgttttttttgtttgcttttttttttttttttttttttttgagacagggtctcattctgttgctcaggctgaagtacagtggtacagtcatggctccctgcagcctcgacctcctgggctcaagtgatcctcccacctcggcctcccagataactcggactacaggtgcatgccaccatactcggctagtttttgtacttttttgtagagacacgtttttgccaggctggtctccaactcctgggctcaggcaatctacccacctcggccttccaaagtgtgggaattacaggcttgagtcaccacagcaggcaatacgttttttcgtgtgtttctgctaatgcagatcttaggaagagactatggtggcagagcctattgaattttttatgactttttttttcttagaggttctgggttttgtttttgttttgtttttttgtttgttttctttttttttttgagatggagtcttgttctgtcgcccaggctggagtgcaatggcatgatctcggctcactgcagcctccgactccctggttcaagcgattctcctgcctcagcctcccgagtagctgggatcacaggcgtgcgccaccacgcccggctaatttgaggttctgggtctttattagtgagcccagcctgtagtcccctccaccccggcccacacaaagcagacagtgagttggggtctctgtgcggggtgggaaaaggtaccagtggctctcttcaaggtgtgtgcaccagctggacttcagatagagtctagacaatctgaatggagggcagtccctgcatcagggtctgccctccatccaggtcgaatgaggagccctgtgcaggcagaggctaggccaggtggcagtggggccaggggctgcagcatggtggggccgccccagtgctgctatcctccagcagctcagtagctggggtgctgcggatgatgaggagtttctgtccgggtgggccaggggcaggtagcacggacagctctgggggaaggctttctacctcttgcacacagaaccaggtctgctccccatcagcctcactcagcagcacatgctctgcaagccttcatccatctgtggtatctcaaagaggacatcctggaccacacctgtgctgtccccaccatcccccgcctccctgggatctggggctttgagcacctcctcagcagccccctactgaacagctatgaggttgggggcctcagtagtcacagctcctccacggagagctgttggccacaggctgcatctggacgatggtcacttctgaggctggccacaggggctagagctggaccccactcattcctgcagccctgcctccccatcacccacattctgtagaatgaggctctgccctcccctgcaggtccttgcactgcctgcccgctctgtgtgacttttttttttttttttttttttttttgagacagggtcttgctctgttgcccaggctggagtgcaatggagcaatcagggctcaatcaagttcatgtgaccctcccacctcatcctcccaaatagttagctaatgttttattttttgtagcattaggttctcacgatgctgctcctgagctcaagcaatcttctcacctcagcctcccaaagtgctgggattgggcgtgagccaccaccccggcctgtatgacatttttaatcgctggtataaaccccaaatttggaggctacagaattctatgatctgtcttcctgtctgcccgataggtggtggccttgtaatcacagggcaacagccaagtactaagcagattattgtagtttaactgggcactgcgggcactgccacaggagtgtagagaggcagggccagaagctcaaggcaggacagcgcctcaaataatggaccattgagatagaaaagggggcaacaacaaggatggcctggtttgggagaaaaggaagcaagcacgcgactatctggaggccttagtgaagccatggaacaatcggaatggggtgagggagtcaggagccagaccactggaaggatcagcagggtagtcatcagttgatctccagtgtggcaacagggtccacgacgtggctgcactggtgacattgggtccagatgggatggtcactggaaacaatgaagtcaggaaagcagaaagttagggcattcagtagctcatctgcatggggagtcctgcggggatttggaatggagagcaaaactgggaaccaggtagcagagagcgcaagaggcagatggtgggagcaccacggggaggtggaggtggaggcgtcttaacagcagccagcccacactctccgcacttcactggacccacttccagctgtcttccagtgtcagaacacttttggcaacacactatctggtccacacgctatgtgtaggtttcctgaggggcatgagtttggttttgttgttccgcatccctagaaaaggaacacgaaaccaagcagacatgccgtgaacatttggtgggtgaaggcaggaaggcactgggggtccgggaaatgtgctcctcatcctctgactgagggatgaagcagcctccccttgggagggctgagagagaactgctgtgtttggaggacagccggcccacatttatgaaggggaagcatagggagtgccctgagagttggctgtggagggtagggcctgattcaccgtggaacctggagtgcagagtacatggaggaaggaagcagcaatgcagggatgaccagggtctagacagaccatcacaggcgcttggatttggggtggtggccagggagaactagggtgtaggaaatactgcttcaagcctcaggtagaattctggtataaatgggtctgagccccagtcctaacctgagatagatgtgttgtaggccaggtcaggaacatgagttcagcatgaactcttgagtctgcctttattgagcagacaccctgtttcagaatggcattcagctcatgaagaaatctgaagtcagatttttatgtttcctactaaagctgaaaacagaagtggacacatggctcttaccttgtggccttttgggctgtttgaatatcctggatttcgattcttagtgagagagtaataacttctttttacaaggctgtaataaggtaatcactcagatttagctggtcttccctttgtgttccatataattcgtgcagctcgtgctgtgtgaaatccatagaccgcatccctgagttggtggtgtgggtatgtgcgttcctagtggtggtcctgagggctggggagaggatgctgaacgagctcccagcttactaagatttcttgagaatcctggaggtttcctaatccacatacctagagagtgctgcctcttgtcactctaaaggaatgttctaggaagcattacttggaatgttaatttctcctaacttttcagcagacaaacaagaaacaaaatagtccctcttctccaattaggaagcttgcaggatttgtgcatcttaatctaatcaaggctgaaacttgccctcttaataaagtcccagtgaatacagcagccaagatgagttgtggatatcacacattggctgtggcttccagtttctcttgctagaaagctctgtgactacattttcagccctcagcgtgtgaatcctggcatggttttatgttgctatggaatttatttgtatagatggttcagcaagtttttcactagggcttaaactccgcagtatcttgtctgttggtcacctccacccatgtgtattcttgacctaaactgagtcgattggcattgacataagtccaaactcagagggaaccctcttcttgtggaagatttgctgattctatctggctttacattttcgtatatgtgacttcatttctgaggagaaagttcacataatgtggaaactgccatgccatagtagattaactataataaaataccacagaagataaatccttgtttgtttagtggtttttttcattcttgtcacagatggtttaccaaagtaacccttgtttagaaataacttcatctgatgctgtgacctttgcctttcaaacatgggtcattaaacaacataatttgtacaaagtaactgactactcttagatcagacaggtgcttctggttgtccttaagtgaattttgtctcaaggaattctcgttattgaatagagttttatttattttgttttcatatttctaggtcaagctgctcccgtatttcctaggtgaatagtcaaggtgtaattatctacagtggaatttttatctgggcttacttccatcatgatttctcatctaccttctctgatttttaattgatatgtgtgctgtgaacacaaactgatttgaattttggcataaggagcaccactggggaaaggagaagtcagtctcctacacagtcccaatgccctccagagccagtgtctgctgtttggacagtctttgacactgctcctctcccaaggagagctgactggtgctcctgtgtgggtggaaattgcatttgagctctgatattaaattaaaacactggtcttgacagtgtgaatgtatcacagtgagtcctgcaccatgttagtttgacccctgagcaaaaatcagtgctttggcactctgtcacctactatcgtgatgaacagaaactctgtggtggcctgtagtcaaacagtttgcctgtttacatctggcattgaaaatcttcattttggtagggtcctggtggcatctgtgtcccatgtgcagcattgcacagatatgttgagggcatgggtggaaggagagtgcccagggcttgctggtgattccaaagcgcattgagtcagttgctttgcagagggaacttgtcctcctgatccaaactgtgaagctcttgtcattaatccttattcttgaaaaaagttccagttactaaaattggtttttgttcataattgtgggcaacaaacttgaagttgggaggtgaaggccagatatcccttttctggtgactgttgtcattgcatcagtcttataagaccactggcctctgattgcagaagcagctttggggttcagttggtcgattactttccccacttgaactgcagctggatgacaacaccttgtgtcaattttgaaaggaaacctggtggaaaaaatatacttaccttggattagaaaggaagctgtggagcaaggacagaccaaatagctgaatttctgtcttctttggatccgagggaactgtttattgggatagattttgaatccctacgcttatgtacagctctcctctgctcagcagagttcttggtgtattcagagactgttggtacatagcaaatgggtctccctctttgtttctctcacctttgcagcttcggggagttttgcctggctcacctgttactgaagaggaaccctgtcatgttcttccaacacttcattgaatgtatttttcactttaataactatgagaagcatgagaagtacaacaagttcccccagtcagagaggtcagtgaagcagctaagtctggtctccttgtatctgggtaagagctgggggaatcaggggaggttaggctctttgcatgtagtgattggacgcagaccctgccccaggtctttactgtggcttggcaggatggcgtaagaaaatacagtcgtgagaatcgcttcctaagggcagcgcctgtgatgagcactgggatctctgtagtgcactggagtctttggcatgcagcttttaggatgcagttaaagtgcagtgttaaatcccttacacccgtgcccatgtgatgcagtgaacttgtcccgttctgccacagagagaagcggctgttttcattgaagggaaagtcaaacaaagagagacgaatgaaaatctacaaatttcttctagagcacttcacagatgaacagcgattcaacatcacttccaaaatctgccttagtattttgggtaagcccagtgtgtgtgggagaaaatgtgtgtgtttgcaaatgaaatgctgtgttgataatggcccagcaggcctctagtaagggagaccctggcactgcaggaagacccctgtcatcttgtccttctctggcatcagctgtgccccagacaaaacacccttgcagaccccctgacagcctcagatggccccccagttgtgggaattacacctcctctctgggccagagcatttctcagaagctcacgtttttctctctctctgtctctcagcgtgctttgctgatggcatcctacccctggacctggacgccagtgagttactctcagacacgtttgaggtcctcagctcaaaggagatcaagcttttggcaatgagatctaaaccagacaaagacctccttatggaagaagatgacatggccttggcaaatgtagtcatgcaggaagctcagaagaagctcatctcacaagtgagtgtgttgctcccctaagatcatcttctcacaagtgagtgtgctgctcccctaagctcatctcacgagtgtgcacctcccccaagctcatctcacaagtgagtgtgcacctcccccaagctcatctcacgagtgtgctgctcccccaagctcatctcacaagtgagtgtgctgctcccctaagctcatctcacgagtgtgcacctcccccaagctcatctcacaagtgagtgtgctgctctccctaagctcatctcacgagtgtgcgcctcccccaagctcacctcactagtgagtgtgcccctcccccaagctcatctcacaagtgagtgtgctgctcccccaagctcatctcactagtgtgcccctcccccaagctcatctcactagtgagtgtgcccctcccccaagctcatctcactagtgagtgtgcagctcccccgagctcatctcactagtgagtgtgcagctcccctgagctcatctcacgagtgtgcgcctcccccaagctcatctcacaagtgagtgtgcgcctcccctaagctcctctcacgagtgtgcgcctcccccaagctcatctcacaagtgagtgtgcagctcccctaagctcctctcacgagtgtgcgcctcccccaagctcatctcacgagtgtgcgcctcccccaggctcatttcacaagtgagtgtgctgctcccccaagctcatctcacaagtgagtgtgctgctcccctaagctcatctcacgagtgtgcgcctcccccaagctcatctcacgagtgtgctgctctccctaagctcatctcacgagtgtgcgcctcccccaagctcacctcactagtgagtgtgcccctcccccaagctcatctcacaagtgagtgtgcagctcccccaagctcatctcactagtgagtgtgcagctcccccaagctcatctcactagtgagtgtgcagctcccccaagctcatctcactagtgagtgtgcagctcccctaagctcatctcactagtgagtgtgcagctcccctaagctcatctcactagtgagtgtgcagctcccctaagctcatctcacgagtgtgcgcctcccccaagctcatctcacaagtgagtgtgcgcctcccctaagctcctctcatgagtgtgcgcctcccccaagctcatctcacaagtgagtgtgcagctcccctaagctcctctcacgagtgtgcgcctcccccaagctcatctcacgagtgtgcgcctcccccaagctcatctcacaagtgagtgtgctgctctccctaagctcatctcactcagtgtgcccctcccccaagctcatctcacaagtgagtgtgctgctcccccaagctcatctcactagtgagtgtgcctctccaagctcatctcactagtgagtgtgcagctcccctaagctcatctcacgagtgtgcgcctcccccaagctcatctcacaagtgagtgtgctgctctccctaagctcatctcactgtgcccctcccccaagctcatctcacaagtgagtgtgctgctcccccaagctcatctcactagtgagtgtgcccctcccccaagctcatctcactagtgagtgtgcccctcccccaagctcatctcacaagtgagtgtgctgctcccccaagctcatctcactagtgagtgtgcctctccaagctcatctcactagtgagtgtgcagctcccctaagctcatctcacgagtgtgcgcctcccccaagctcatctcacaagtgagtgtgctgctctccctaagctcatctcactgtgcccctcccccaagctcatctcacaagtgagtgtgctgctcccccaagctcatctcactagtgagtgtgcccctcccccaagctcatctcactagtgagtgtgcccctcccccaagctcatctcacaagtgagtgtgctgctcccccaagctcatctcactagtgagtgtgcgcctcccccaagctcatctcacaagtgagtgtgctgctctccctaagctcatctcactgagtgtgcccctcccccaagctcatctcacaagtgagtgtgctgctcccccaagctcatctcactagtgagtgtgcccctcccccaagctcatctcactagtgagtgtgcagctcccctaagctcatctcacgagtgtgcgcctcccccaagctcatctcacaagtgagtgtgcatctcccctaagctcctctcacgagtgtgtacctcccccaagctcatctcacaagtgagtgtgcagctcccctaagctcatctcacgagtgtgcgcctcccccaagctcatctcacaaatgagtatgctgctcccctgagctcatctcacgagtgtgggcctcccctaagctcatctcacgagtgtgcgcctcccccaagctcatctcactagtgtgcccctcccccaagctcatctcacaagtgagtgtgctgctcccctaagctcatctcacaagtgagtgtgctgctcccgtaagctcatctcacaagtgtgccactcccccaagctcatctcatgagtgtgccactcccctaagctcatctcacgagtgtgcttcttcccctaagctcatctcagaagtgtgccccttccccgaagcttatctcacgagtgcgcccttcccaagctcatgagtgtgcccctccacttaagctcatgtcacaagtgagtgtgcagcttccctaagttcatctcacaagcgagtgtgcagctccccctcagcttatctcacaagtgagcgtgctgctcccctaagctcatctcacaagtgtgccgctcccccaagctcatctcacaagtgtgcagctcctcctcagctcatctcacaagtgagtgtgctgctcccctaagctcatctcacaagtgagtgtgcagctcccgcaagctcatttcacaagtgagtgtgccgctccccctcagctaatctaagtgtgtgcagctcctctaagctcatctcacaagtgggtgtgcagcttccctaagtttgtgtcacaagtgagcatgccactcccctaagcttatgtcacaagtgagtgtgcccctccccctaagctcatctcacaagtgagtgtgcagctccccctaagctcatgtcacaagtgagtatgtagctccctcaagctcatgtcacacgtgagtgttcagctcccctaaggtcatttcatgagtgtgaagttcccctaagttcatttcacgagtgtgcagctcccccaagctcatgtcacaagtgagtgtgaagctccctaaactcatgtcgcaagtgagtgtacagctcccctaagcttattttacaagtgagtgtgcagctcccccaagctcatgtcacaagtgattatgcggctccctcaagctcatgtcacaagtgagtgtgcagctcccctaagctcatgtcacaagtgagtgtgcagctcccctaagctcatttcacaagtgagtgtcccactcttctcaccatctactggcttccgtgttctccctggaatcctggtgccatgctctggtgctgacttctttcttactgatggctttaactcttgccagatggtgacaattctcaaacctgtttcccactccagcatttctcatgagcctgagctcaggtccccctgctgccaggacgtgctccgggtgtctctgacttactctgtcaaaactccctcagtcatctcttctttctgctcttcatctcctctttctcccacagtttatggtgctcttgcagactggagtctggtgtgtcaggctgaggcttttgttggcaggaagtgtagaatttggatctgaatgactggggcagagcttggctgccacaggcctctgcaggcctgtgttttcctcctagcctggattgccaatgtgtatttcccacctggcctctggaggcttttgactccaaggatatagactctgatcatatcttgccacaagatcctgcctgttttctcttaccaatctatctctctagttctgaccttatttaagcttatcccatttccatggtttccttaccaccctttctgtttctggtttctttctgtcacaggccatgtaccaccttgctgccagagcagtctttctttctttttctttttttttttttttttttttgagacagaatctcactgcgtcgcccaggctggagtgcagtggcgcgatctcagctcactgcaagctccgcctcccaggttcacgccattctcctgcctcagcctcccgagtagctgggactacaggcccctgccactgtgcctggctaactttttttttttttttttttttgagacacagtatcacactgttgcccaggctggagtgcagtggtacgatctctgctcagtgcaagctctgcccccctgggttcatgccattctcctgcctcagcctccctagtagctgggactacaggcaccagccaccacggccggctagtttttttgtatttttagtagagatggggtttcacagtgtttgccaggatggtctcaatctcctgatctcgtgatctgcccgcctcggccttccaaagtgctgggattacaggcatgagccaccacacccagcccagcagtctttcttaagtacaaatttgatcattttattatatctgaaacagactaaaggcaggttgactgtgaggggtggcaggaagcttttgggtgatagatggtgagtggtctgtagtgctggttattccatatagacttttgtcaaagctcatggaagtgtttgtttaaaatgggtaaatttattacatatgttatacttcactagtgaaatctttaaaaactatgctggtggcttcctgtcatcttctgaataaaccctgattcttctttttcaaggtaaacaagaacttctggtgtgccttccacctttcccatacctccctccatcctcacctctaacctctccacttcaaattgccatctgcacctcagttgcgagctgccccctactcgtgtgctcttgcctctgggtctaaagtctgcagcgccctcacccacccatcctcccttctccacacatcctcaggatcatccatcagatggccatgcactccttaggcatcccatctccatacctaaattccctaacaccctgccacttaacacctcttcccttgagacacacactttctagaagtggctggagggcagggatgcttagcttcattttgcatcctcagagggttagctctttgcctggacagagaaggtgcttgataatacttgtcaagtgaatgcatggaagccacttcttaagactattcctgaacataacatctgctcacatctgggtttattaaattgcttatttctctacttgttgtccttctgtttcaggaactctgataagactttttagaaatgagtagtttacaaggaagaaacatacactagtgactttaaatgagaaggaaaagagtagtttcagcttcaggaggataaatcttgcatatgtgggctactatagtgctttttttttaatttaaagagattcactggagaatatttgtggttagtgatcattcaaggtaaagtgtgaagacttggtcaaatcaggtactatatatataaattcatagtattttgtagatgtgtacacagagagagagacagagctggctgtcttcatgcttagccatttttagaccattgtcccttcaccagcaggaatacgaagtgtccctctgggtagccagaacgagctgacttctgttccaaggggagggtgttgaattgaggactgaaggtggagcaagagccaaggtccctcagggtcttctgtggagatttggggcttttgtcaaaagctactcaacatgtttctaattctttttccccatttagaatatatgagtagtatttgtccccaccctatcttacaaagccttcagagtgttttgaggtaatgcttacaaagtctcccagagaaaagcagaggtcctctacatccagtatcataatgaaaagcaaaaataaacttacatagtgtggtagggtggctctactcaaagaactagatcaaggagaggcctgtctttcagaagttcatacatctaaaacatgtctttgtttgtgttaccaggttcagaagaggaatttcatagaaaatattattccaattatcatctccctgaagactgtgctggagaaaaataagatcccagctttgcgggaactcatgcactatctcagggtaagggtggagcctgtgcttttgtggttgttgtcctaccagttcattacttaggatcttctgccagttatgacagtgcaggcaatccgtgaatgattagaaccccaaattctgcaaacccaacattaccttggtaactgctgtggagctaggggttggctgtgggttccaccaaagccgctctttcccttggatgtgcagccagggccgtgaagagccggcccactgtgccaagcacgtcttcccttaatggagttcaagtccatctggaaaactttcccagctggggtcaagaacacagtcatcttcgttcatgctgcttgggggtaaggtgaaagtgagtcttcgggtttgatttcagggtgcttaccttttgcactgactcagattcacaaggtcaggaaataactgccctgcaggagctgccttcggagctgccatcaccaggctgaattctttgtcaagcaaggggaccatgaggagctcagtcggagcaaacccaggatgtgttgacttgcagggcggacctaagtggggcctcagacctttcttgcaaaatcttttactaagaaataaatgcaacatagtttttctttaattcagcagttatagctctgttcacattatgtgtttttcttcctcaaaaaaatgctacaattttttttccaataaaggcctcaacaaaaattacattgaatataaattttcaaatagctttttatactaggaagccaaggtaggaaagatagtctcattgtatgataaaaataaaaacttccaaatattcttgtatttattgcctgactttagaccctagaaaggaaaaaaaaaaacaaaaacagagctttgatcctacatagactacttaaacacttaagaaaaataagccttcctcctgcttgtgagcacacacacaggatggccacacgttgcttgttgtcagtagcttgagggagtctcttcattggcctgtggaacccactcctagtggcagctggaaaagtgcatggattccttctctttgttgagacttccctcccagttggaactgcagtgtctttttctccctattactgttaggtggaatgattctttctcttagcaaagtggtcttgcccctggcacccctctttaagacctaagaatgtttttccctaggtatgagaaaaggttttctgtaaaatcttcagaagaagacacaaagatgggatttgagccttagttggaatcccctgagagccaatggggaggctaatgtagacagatgagcagcttttagatccatgcatcctgggacttgctccagaggctgtgtctgagcatgtctttctcccattgggaacctgggagagattgcccattaactgccacatagccaggatgcttcctaagagagagaactgttagttactcacatatttttctgcttgtgtggccagtggtgtttgctccaaatataccattgtacctgttagttactggaatggaaatcatctgctttcagtaatgtcagtcctattgttcctatgatttatcaagcaacatgacttggggggcttttttctttcttaacttttattttgcgttcaggggtacacgtgcaggatgtgcaggtttgttacacaggcgaaggtgtgtcgtgggggtttagggctttacgtttttattcaagaaaacatgaaaggatgctcctggctctgtttcaggaggtgatgcaggattaccgagatgagctcaaggacttctttgcagttgacaaacagctggcatcagagcttgagtatgacatgaagaagtaccaggaacagctggtccaggagcaggagctagcaaaacatgcagatgtggccgggacggctggaggtgctgaggtggcacctgtggcacaggtaggtgtggggcccactgcactgtgaccagacagtccagtctgctgtctgctaccagtctgtcgtttgtctggcacctctcaagatctccgtcatcagaggttagtcagcccgaaggcctcgagagtgctgcttgttggccactccctcgtgcctttctgtctgtgatggatttactgtgctccagacctcccttccatgaggacgtggtgcaggaagcgagctggcagcagcagtagctggtgactatagatcctaggtctgccagggtgtgtcagtgtgtccgcatcttcccccagcactccctctttagagcagaccggcacacggccatttctaggagtagctgttgctcaccgtcctgaggaatgcaggcagatctcttgtaggaaagaccaatgagcacaaagtagcatactcctttttctcttctgtcatgccacagcatctacaagtggcagctttctcatagtattctgtttctgaaaaggaaattcaacttacccagggttgatatggcttcaaagtacattacttatggacttgctcatagtacgtgaagattctattccaataaagtgttaaaatggagaaagggaatggcttgtacactgttggtagggatggaaagtagaacagccactatggagaacagtatagaggttccaaaaaactaaaagtagaggtaccatatgaggcagcagcctcgctgctgactgtatagtcaaaagaaaggaaatcaggatgtcgaagacatacctgcactcccatgtttattgcagcactgttcacaatagcaaaatttggaaacaaatgtccatcagtggatgaatggtaaagaaaatggggtgcatatacagtggagtacttttcatctataaaaagtgaaatcttgtcatctgttgcaacatggatgaacttggaagacattatattaagtgaaataagccaaacacagaaagacaaagattgtatgttctcattcatatatgtgagccaaaaaggttgatctcacggagttagagagtggatttttggtgattaccagaggctgggaaggggtgggagaagggggatgaagagaagttggttaatgggtaccaaaatacagttagatagaagaaataagttctagtattcagtacagtggagatattacagtttaacaatttactgtatatttcaaagtacatagaagaattggaatgttcccaacacaaagaaaagatactcacgtttgaggtgatggagatgccaattaccctgatttgatcattacgttgtccacatgtatcaaaatctcatatggacccccaaccatgtacaactatcatatatccgtttttgaaaacttaaaaagtattagaatgtacatactctttatcttctctaccaggttgccctgtgtttagaaacagtgccagttcctgctggccaagaaaaccctgccatgtcacctgccgtgagccagccctgcacacccagggcaagtgctggccatgtagcagtatcatctcctacacctgaaacagggccattgcagaggttgctgcccaaagccaggtaaagagcccctggaggccacatcagggctggttctctgtggcgatgttctcagaggcgtccctgccattcccaagcgtgggcaggaaagtcattgtcattgtctggcctgccaccccgctccacactgtgccctgggaggtttgaatgagggtggtgagggatgcgccggtgaggaggcacgcggggacacagtgcagcactgtcacctctgcagtggtctgcagtgagaaagtcagcggctgtggctgttctccacaggcccatgtccctgagcaccattgcaatcctgaattctgtcaagaaagccgtggagtcaaagagcaggcatcggagtcggagcttaggagtgctgcctttcactttaaattctggaagcccagaaaaaacgtgcagtcagggtaagccttatgtttggtgccagacacagtagagcatttacagatgaaaacacagaacaagctacttcttattcctttcaaagcggtgtgttttcttatctttaaaacaaataacgttaattgggcttttaggatcatgggtagtaaaacaatgcatatttattctaggagatttggaaaatagagtgaaatatgaaactcacccatagcagtgaggcattccttcctccagctattctgttcctcttacacacacgtgttttgttttgtttatggaattgtgatctgtgcgtgcattgttttatgacctgtttccctgcattcttaagtcagatgtagtagatgtagtagacagcttccatgaacttttctttccaacctttgctttcagtggctttatagcattgtggctgtggaaataactgatttattactatcctgttctttgaaatgttgattttcaatttttccatacaaatactatcacagtaaacatccttgtacatatagccttgtatgtatgtaatccttgggattaattcccagcagtcaaaggccatggatatttaaaaactttggatagtgtcaaactgtcctctatcacttatgccaagttagactcttttatttttttgaatcctaatgagaatggacattttttctcatgtttatcatttatttgtatttcttcctgaattgcctctttataagaaaattgtaaacactagtgattttgactttacgtcttgcagatatgttttctcatgtggttgttttgctcttcgttattgtttgggggtatttctggatagcagcaccttttctgttctagtgtcttcatacagtttggagcaagagtcgaatggcgagattgagcacgtgaccaagcgggccatcagcacccccgagagtgagtaactgatcggaacacgtgggcttctcctcagtctctcctgcattcgtgatgtgtttgctagagtcgcagtaaaactccttccggtgcaggatagttctgatggtcagaaccatgagtgcattgctgaggtggagtatttcacagtgaccacggtcgcttgatccatgagcactgaccgagtatgttgttccagtgtcgttacattcagtcagtcaaacaccacagtggcccgcggagcagacaatgccgttgaggcacaggtaggttgggtgactgacccagtggtgccttctggaggcggccctccgtgtctctgggctgtccgggtgcactgggcgctgctgggtgggcctgctcccagggcgggcagacgtcagcaccagcaggtaccatgcacgctctgcaactgccaagaccagagacccggggacccctgctcggagcctgtgtctcattcccctccatgttttttcctactgtttgtgcttttcctttgatttcaaaacagaggtgagttaggagagttgagtattcttttcctattatcttgtgtgatagcttcatattgtgtcaaacctcataaaaaccattattttgagaaaactcttacaggaagaagaaatgcttcctgtcctaaatctgtggagtagtggctaggccctgccgccgtgtccctgtgtgcccctcgctctgcgcccggctgtgcacagtgccctcagcaagctgcatccagccccgctcgtccctggccattccactcctcactgtttccacagaccacagtgcctggaacctgggaggtgtcagagatctcctcccggagacttctgggagggcagagctgggcgctgagcccaggccttctggtcccaactcttgtgccccttctccagcctgtctcctagtcctgactgcaggggaagatgagagcgtgctaaggtgctcttcctggtaacagagcagcaaggtgtcctgccgttcgtttagtcactgcttcagtcagctcatgtgtgtggagcacctgctgtattctagctacttgcttgtttggttctgtcacactgatgctgtgatctcttagaatagttaacaggttagaggtaattttcatccaggtccccctttgaagggagtttatcccacccccaccctcagacgacaaccgaatcatgacggcatttgtcattaaaggcagtgggtaatttgggatcctgcgtcgtggacaggtgcgatgttctgtgtgttagagcttgctgtgtgttcgatgttcctggctcaggagtgccaagagcttctattttggcagtgaggtgccatatgctgaagaaacggggagaacgcatctcattttcgttgtgctcatcctgagtccctgatgtcagtgttgggttgtttcctagcagctcgtgtttctccacagggcagcctggcgtggagggttcatgccgccctcatctgcctgtgtggagccacgctttgtgctggaaatcaggcgcccggtgtcattgagttggtagagtacttgttcttgctccaggctcttggacataatattcctgctgatgcagtctctgtccgtctctctttatactgaaccaggaagaaatgcctggaggtctccccttcctgggagaactgttagatagtttaaaagcactcagttctgttttctctgtggtttatacgtccagattctttttggcaacttttagtttaggtgggggagactgtcaggaagtgtctcagctcttcaaagctggcaggaaagatgccacccagttcagcaccaattcacagtggctttgctaaatggaaatgaaaattagtcaattttcagagcgaggattttaactgaaaatctgtgggggttttagcaagtccctgttactgttaccattcgggtggcacagacgctgctgccttcgattctacgcacagtgcatgggggacgtcagagcccccgcacccgggcttctgtaaagatgggagactaatttcctggagtgcatatgggcttccaaacaggaagagcagtgtgtgtgtcaggaagggaatttcatgtgacagcacaaggagagacttcaccgaaacagaataagcagatctagcagtgatgaggaattctctaccatcgtctattagtgacactcaagtagccatcgggtacacagctgcagtgcgctgatgagctttgaactgtaaatgggaagacacagtccatactcaagacaccaagtggagaacggggagcgctctgaagctgcctcctcgcatgtgcttgcagaagggcagcaggttcagtggtaccagcaagcagctgcccagcccgtgctgttcccgggagtgtgctggtggcagcttatgcactgggtacagcaccacccaggaggggcgaggctgcaccacccaggaggggcgaggctgcaccacccaggaggggcgaggctgcaccacccaggaggggtgaggctgcaccacccgggcctccaagacagggtggcatgtgtaggcagatggggcggtgggggggggggtgcagagaagcataatgtgcagacagggcctgctgaggaagaggacgcaggagggtggacgtgtttgtgcacgcgtgcacctgagcctaacaggtgagtctgtaaaggcagcttgggaccagctgagactgagggtggacttcaggctctcctaggaacacagcgattgaggtgtcttgaagcagggcagtaaatttaccagcttcttgatgaaacataactccagtgatgcagggatgatactgctaataaatgacagtggctgctaacatctcttgagcactgcccttgcagccagcacgatgctaagcactcaacgtggataacctcatgtagtcctggcagccccccaatgaggtagctatgtttttatacccacttaagagatgaagaaacctgagggtctcagagcagctcacacagctggtgagacactgagccagaattcacacccaagctgcggtggaatctgctcaactgtgttctcctgttcctgagggcaaactggagggggttcattgcgggtaggtgccatgaacaatcaagggcgaggggggaggtggactgagccgctcccagtgtggcacgacgggacaggatgaggcggcgactggaggtagaagggacaggacttggctgctgattccatgtggaggagctgctcacggtgccatatttccagcgcgcatgctccagtcactggctggaaaccagcaggcacgcgtggaggtgcagaggcaaggagttgaagtgtcctcagggaatctgggtgagccacagtaggaggtgtagtaagtgggacagggcggtcaccgggacaggggcaatgatggaagacggcgggagggaagccagaggcgtgaacagtgaggcccaggggccagccgagtgcctgagggctgcgggtcagagaagggggtcagagagacggaaaggagcatccccaggaggggccctcaacactgccaggccctgggacagggtccagtggaggtctgagggccgccgctgggacactgatgtggacaccctgcctacgtcccacggacaactagaacagagacctccgatagaccacgcggctttcactcagtggtgtctcctctttatgcagagagcatcagtgatgtcacgtttggagcaggggtcagttacatcgggacaccacggactccgtcgtcagccaaaggcaagttcttggtgtccttctgggctgatagatgcactgcctttgaggttctgggaaagctgaatgtgtttgtttgactcccttttagagaaaattgaaggccggagtcaaggaaatgacatcttatgtttatcactgcctgataaaccgtaagtttagcagtgttccttttgaggtggatgtttctgtcagggtttttctgagttccagaatgactgcacatgtcctttccctaggcccccacagcctcagcagtggaatgtgcggtctcccgccaggaataaagacactccagcctgcagcaggaggtccctccgaaagacccctctgaaaacagccaactaaacagcgcctcccaccagtgtccaggcaggcaggagcccttgaggaagcagtctcgtgtcctccgtgtgaaggcagctggatcacttcccgcagtccttgggcagcgctttgctgtggaacacgagagctcctcctcaggggcctggcactcaccttctattctgtatgatgtatttggttaaacactgtcaaataatagagatgtgccagatttagattttcttaccctaatctgtttaatattgtaactttattccatttgaaagtgtcaagcccattcagataagctataatctggtctttaaggaacacaactttaaaactgcagctttcttttatataaatcaagcctctgttaacttgaattccttatagtacatattttcccatctgtaatgacgaaattttgattctaatattttttctattatttataagtgcaaattttttaaaaaagtgtacagctttctaaaagtaataaaggtttagcataaatacagcc

SEQ ID NO: 22 - DNA, 19540 bp, Homo sapiens
agatatctccggcgccgcccgccattttgactccagtgtctcgtttgcagtcggcgctttaggggaactgtcttcctccgcaggcgcgaggctgggtacagggtctattgtctgtggttgactccgtactttggtctgaggccttcgggagctttcccgaggcagttagcagaagccgcagcggccgcccccgcccgtctcctctgtccctgggcccgggagggaccaacttggcgtcacgcccctcagcggtcgccactctcttctctgttgttgggtccgcatcgtattcccggaatcagacggtgccccatagatggccagctttcccccgagggtcaacgagaaagagatcggtgaggattgggaccgtgggtgggcgcatgagggccgaggagaggcagggactccccggaggaggtttgggaggaagcgactccaagtctgagggaagagctccagtgcgccagggccagcccactagcgaggaggaggaagccgcctcggtgggagttggctgaggggtaaacggcaccgacgtggatgcagcacctactgtgctccctcgcggttgctgtgtggctggggcgggcaaggaccccggtttcttcgtcggaggtccgcgcagggctcttgtcctgggagttcttggctcagggcatgactgtcgagtggacagggaagggccactcagggactttaggtttacaatggggaaaagtaaacttgtgggttgtaagcggtaatgaaaggagggggtcctcgtgtgtaccaaccactcttagatagaaatgagatggaagaggtcccaacagcctggcaaaagcaatacagtatttttaaaatggtgtggccttaagaaacgcagcggttcgggggaggagacttttagaattatctttcaaacacttaagggaggagctgggtggttgggtggagtgacagaaggaaagcttttgtgcggaagaggaaactctggaaaaggcttttctggcttagtgtctagccctggtcggcttagtaaagggcaattagtgttgaaggttgtgcgtccacacctacttagtggctcagtggaaagcacgtcgcattatttaaatcctcttttaaagtaaaataactggaacaacgtttgacggtgttggggggtgctgtacattggctgataacacttagcaaacactgatcttactgtgtgaagtaataattagctgcggccgctgagcagagagcatttacattttcctactcttgaagtgaatgtgtgcctttactaagtacaaggaggagttatttctagagaagggaagaggctgaagtagccaaaacgcgcactattttgtatgtgggtgaatttttatatctagaaacagctgttttagaattctggacttttgttgtcttagggatgattgattaggaagggactttaaccctggttttaataaccatttttaaagatacaaacacagaaaaaaaagggaaaaaattgtagcagagttcacacagaaaaaagaaaaaaaaagatgcaaagaacacagaatttgtgtccagttattattttaactgtattttaagactagaaagtatgtcgcgaagtgggacaaagaactcaaaagttcttatcagtccagtgggtttttcttttactttagtacaccataatgttatagacgagtgatctgccttttttttaaatctgtattttacttcatcctgataaaccattttgaaaactttgcggtcctgttttctctctctcttttttttttttgagatggagtttttgctcttgttgcccaggctggagtgcaatggcacgatctcggctcactgcaacctccggctcccggtttcaagcgattctcctccctcagcctcctgagtaggtgggattacaggcatgcacacgcccggctaatttttgtgtttttagtagagatggggtttctccatgttggtcaggctggtctcgaactcccgacctcaggtgatcgcccacctctgcctcccaaagtgctaggattacgggcgtgagccaccccgcccagatttccggttttgttttctaagagatggatagagatggatagcatacctacataaagtagaaccatccactaagtgttcccccactagccccctgatttctcttttcttttctttctttttttttttcatatttaggtctcagtgttatttcctggatacgttataaaaacttactagctaagtgccagatatctagaagaacttttgctttttctgagctttttttaaccccagtttttttctttgtttctttttttgaattatcatttggatacaaggttgaacatttctctgcgtagctttttaaatctatgaataaggatttactttttttcttttcttgggtgttaattaaaagccaagccaagtttagtttctcaaggacatacggagagtagaggcaagatttccatgaatgattaaataattctgtgatactactgccttgagctactgccctttttcacaaggcactgccacagatcatccctttctggttatgaaattttggggaggaatgtaaagaaggagctaaatctggtttgcttggttcagcagtgactcagatggtatgttactgttttacagatattaataatgtagtgttgtatcttacggctgatttcccatggcagcctttcccttaataaggtcattaaatcatacatttctgttgctaacattaaacagttacagataatgtaataaaggtttaacttaaaaattttttttcaaagcactttattacaaactttgtgctaggtttataaaattgtaccagtatttaatctgagcacttaaatcattttattaaagtgccaaaggcaatttgatatacctgttatccagcaaagaaacacaaggcaattattagtaaattttaacagattaatgcatttatttggtaggttttataatggctctatttcttgagtttgtatatatttgagaattatgttataaatatgttattatttcattgtctttgctatctatttgaaccaattttttagtaattgttaccgctcttttacttttttttttgttcctttgagactgagtctcgctccgtcgtccaggctggagtgcagtagcgcagtctcagcttactgcaacctccacctctcgggatcaagcagttctcctgcctcaccctcccgagtagctgggattacaggttcgtgccaccacacctggctgattttttgtatttttagtacagatggggggtttcaccatgttagccaagctggtctggaactcctgacctcaggtgattcaccctcctcggcctcccaaagtgctgggattacaggcgtgagccactgcccccggcctactctttttttttttttagacagagtcttgctctatcacccaagctggagtgcggttgtgaaatcttggctttctgcaacctctgcctcctgggctcaagcaattctcccacctcagcctggtactacaggtgcatgccaccacactcgctaattttttaaattttttgtagagatgaggtcccctatctatcccaggctggtctcaaactcatgggctcaagtgatccatccaccttggcctaccaaagtgttgggattaccagtgtgcctgtcctattaccactatacacaaggagttccatgattgtggtcaaggtagaagaaaaatatagagtaaccttaaaatacagtctaggctgggcacggtggctcatgcgtgtaatcccagcactttgggaggccgaggtgggcagatcacctgaggtcaggagttcaagaccagcctggccaacatggtgaaactccgtctctgctaaaatatacaaaagttagctgggcgtggtggtgggcatcatgatggtgcatacctgtaatctaagctactcgggaggctgaggcagggagaattgcttgaacccgggaggcagaggttgtagtgagcggagatcatgccactgcactccagcctgggcaacagagcaagcctccgtctcagaaaaaaaaaaaaaaaaaaaaaaagtcacgtatgaaaaatttaagtcttgcttatgcttgctaagggagagcttaattttagtctcatttactagatgttcttgaaattgaatgcaagggctgttcctcgtatacaagttacataaatattctccatagagacttttaagttgaattttaaaacttgcttcccttatttgtgaacttagcatttttttcctcctaaaaatgcttgtaaaatgtttttaaaatgctttaaaaatgttttcaaagatagatgtggttaaacaggaatccaagttaaaaaaaaagtgtgcctgatgcagtgggtcatgccttaatctcaccgctttgggaaaccaaggtgggaggatcgtttgaggccaggagctggagaccagcctgggtaacatagcaagaccctgtctataaaaaattgtttttttgccgggtgcggtggctcacacctctaatctgagcactttgggaggccgaggcgggcgggtcacaaggtcagtagttcgagaccagcctggccaacatggtgaaaccccgtctctactaaaaatacaaaaaataataataataattagccaggcatggtggtgcacgcctgtaatcccagctactcgggaggctgaggcaggagaattgcttgaacccaggaggcggaggttacagtgagccaagatcaagccactgcactccagcctgggcgacagagcaagactgtcttaaaaggaaaaaaaaaagtttgttttttgtttttgtttttttcagttagccaagtgtgggggcatgtgcccgtagtccctgctacagctactcaggaggttgaggcaggaggatcatttaagcctacgagtttgcctctgcactccagccttggcaacagagcaagaccctgtctaaaaaattaagcaggcaggggttgcaaattcagaggccaggcatataaagaaccctggtaaaaggaacaaataaggctgtaggtttgggaaaattgtaaggaaacctggagcagcatgctctttctgaaatcatttgtatgttaaaggtatctgcaggcatttgagggtcaccaagtttgtgaattttgtattaagaaagttatgtggctcacatctgtaatcccagtactttgggaggctgaaggtgggaggatcacttgagcccaggagtttgagaccagcctgggcaacaaaaggaacacctacctttacaaaaataaaaacattaaccgggtgtagtggtgcatgtctgtggtcccagctacttgggaggctgaggcaggaggatcgcctgagcctgggagttcaaggctacagtgcgcagttattgtgctactgcgctccagcctgcatgacagagcaagaccttgactcaaaaaaacaaagttatgtgacggctagtaaagttaatgtcatcttatgctgtgctaatatggggtgggtgggggactctgctgctttgattaaaccacacctgaagtattgtggttagttctgggtgccacttttatgagggccagtactaactagaatttatccagaaaagtatgatgaagttaggatgggaaatggacttgaaaccatgtgatctaaggtatgattgaaaggatagagatctcttagcctggtaaaaaagattcattgatggctatcttcaatatataaatgccatatgaggatagcagcaggcttattctcttaggtcagaatcagtactgagtgggtagagtggtaggaggaagattttgagtcattaaaaacggtctcagttgcaccaaaatagtgtaagccttattatgaatatcatagaaaagtaggtctcaggctttttgtttttgctttctaaaccacacctatttgttaaggtgtcaagaattgggcagataacatatttaaatcactttagaatgggagcataaatgtgtgctttcatattcattccgtaaatatttactgagcacctgtcatatgccaggtgctatactagctgttgatggagcatacattcaggctgaagaagtacattttgggggtgggtgtgtccatgtccaggttctctagctatatcagtgtaaggggttcttatgtgaacagcaataacatagaatatattaaagcttaggtgttggaaagtttaaaccagaaatacataaaaatatattattatacagtgtacaattgaccagacaactgaccacaaaataggtaatagggaaaattaagaccaacccaaaataggtgatacactgataaagaggctcctttccccaaattgaggaaattgtagctgagtttgcatgcatgcattgcagtatgagcttgttgatcatgctttttgttaaatatggaagtaatattctccatatactctggtaatatgccaatttttgttaggaatacaaaatttgagtaatctgaatttaaaatatatgacattgtccattttttgtccttaaaaaccaaaataattccatttttgagtcagtttgaggcctattaggaagactcttaaggaccagtatttgagaatcacaaatataatgcattttggttttttttgtttttttttttttatgacagtcttgctctgtcacccaggctggagtgcagtgatgcagtcttggctcactgcagtctccacctccaagattcaaacagttcttatgcttcagccttccaagaagctgggattacagacacactccagcataccaccatgcccggctataatgcattttcttttattttagcttattttttttttgagatggagtctcactctgtcgcccaggctggggtgcagtggcactttcttggcttactgcaacttccgcctcctgggttcaggcaattctcctgcttcatcctgggattacaggcgcccaccaccacgcccagctaatttttgtatttttagtagagacagggtttcaaaccatgttggccaggctggtctcaaactccagacctcaagtgatccgcttgtcttggcctcccagaatgttgggattacaggtgtgagcaaccacacgcggcctataatgcctttttaaagcactggtttggagggttggactagacaacctgtaagtctcttctagttctgagggttttgtgatttttgtgacctgggcctgaaaagggtaaaaatacttgtttggatagtgtattttgtagtgctttcctttgagtaatggtgtaatattgtattttatggtgaggtatggtttttgaaagctaagaaacttaatttggaagatacttttcctgccaactaagtttaatttcttgcattttaaatgttaataatttgatgagaacgtaatacaatgcaaaagttaggacttttgtaattgttaggtctaattggtcattacattattattgaccagttttttttacggaaactttcttaaaaactcttgcattgggaaattttagggaaatcactttatcaaaacttggagatagtcattatcgttaaggggtcttcatatactgcataccccccgttagaggatggaatgcagaactcactataccctgtctgcatagaagagggaagaaactcaatcccaaagtaatatggaagcagtctcacatgtattgttggttatatatgatatccagtatttttatttttccttttagtgagattacgtactataggtgaacttttagctcctgcagctccttttgacaagaaatgtggtcgtgaaaattggactgttgcttttgctccagatggttcatactttgcttggtcacaaggacatcgcacagtaaagcttgttccgtggtcccagtgccttcagaacttgtaagactgttacttttctgtattttgtatctgtttgtggaatttaccattttctctcagtgtagggtaataaaaacattttgatatttaagttttactttatagatgatgtcgtgagttttaatcatgggctgaatatatttattggaaattttgtgtaaagaattctttgggccgggcgcggcggctcaggcctataatcccagcactttgggaggccaaggcaggcagatcacttgaggtcaggagtttgatacccgcctggccaacatggtgaaaccccatctctactgaaaatacaagaactagctgggcgtggtgtggcacacctgtagtcccagctactcgggaggctgaggcagaagaattgcttgaacccaggagccggaggttgtagtgagtcgagatagcaccactgcactccagcctgggtgacagagccaaataatgtctcaaaaaaaaaaaaaaaaaaagaattgtctggtgttatttatacattaagtttttctgtatgttaaaagtcagattgtgtctaacaagtgtatatatatatatagtgttgtgccagagtaggtgacttctgtgatgtgaagctttttggattcactttggattttacattttgttggataaccctggtgcatagtagtagagacaggggtttcaccgtgttggccaggctggtctcgaactcctgactttaggtgatccaccctcctcagcctccctaagtgctgggattacaggcgtgagccaccgagcctggccctttgttgttgttgttgttgtttttgtttttaatggacttatagtccctctgtttggggtaaattgagtttggatgtttgttgaaagtttttctaaaatgtatcatgtgctatattggatctttccctgttttttttgtgtctagcagaccttcatggttatagtcactaatgttctcattacatataacttgaggtctggaacctatgggaaactgatcattatggtttgaggatttttttccccctttaaggcaattttctgatatcagcttgaccatatcttaagttactgggtttttttgtttgtttgtttgttttttgcttatttatacttgtgtttttaggttgaaggagcaccagttgattcggtggttttgaggaaaatttgggaggcaaataagttataatataaattgctttattgttgaacttactactcagtcactgagaatttctattaatgtccttctctcgtagttcaaatatcaacctttcccttcctatctataggattctattgttatttggtgtcattataataatattgaggttattttaacaaacacttgtaattattcaatgtccagaggagtccagagtgaataataatacaatttccatctgacttcccccactccagtctcttgcatggcaccaagaatgttaccaattcaagcagtttaagattgccaagacaaaatagtgatggtggtcagaaaaataagcctcgtgaacatattatagactgtggagatatagtctggagtcttgcttttgggtcatcagttccagaaaaacagagtcgctgtgtaaatatagaatggcatcgcttcagatttggacaagatcagctacttcttgctacagggttgaacaatgggcgtatcaaaatatgggatgtatatacaggtatggattcatagtttttaaagcaaatgtattattttatgatgcagggcactgcttataggcactggaattgggatttgaggatttcagcttactgaaaagcaagaattgatggcataggtgcgtctttataatagacctgaatgtcaccttcttcagctcatgattttaatttaggaaaactatggagttcatattgcttcatcactctttagagagtattacagtaggaaagggttttccagggaatgtttagttagttgtcctttataaactagttatttagttaatgactcacatgtcaaggtgttttctttgtttatgctttttcaatgattgatagcttagaggttttcgaggtaaatcagatttcagtaatcatctcaccttggaaaggtttagtgaaagtttagatagattgagaagttaaattctttgggcaactagaaataaatgtgttgcttattgcctaaaacactttctggcatataatatgtactcaaaaacataaaggatttttaaagaagcattaaaagaacatgtacattagaacataacaagtgatactaacataggtgataatgagtcaaaatttgggttcttgaaaaaaacaagatgaacacatagattgtcttagaaaacaaagctcttacattattagttaaatacattttttttcactgggatcatgtttgaaaactaaagttgtgggataacttgtatcttttgaggagcttaacattcctaggccagggaaataacaagcaaagaaataatttgattttatattttaaagttcatgcctgtaattccagcactttgggaggccaaagctgggggatcacttgagcccaggagttttagaccagcctgggcaacatagtgagactccatctctccaaaaaaaaaaaaaaaaaaaaaaaaaaaaaggccagccgtggtgacttgtaactgtagttccaactatttcggaggctgaggtagggggattgcttgaacccaggaggtcgaggctgtagtgagccaagattacgccattgcactccagcctgagtgacagagtgagaccctgtctcaagaaaaataagaacaaaacaaaaatatattaatactgtcttttttttcccttttctatcatatttaggaaaactcctccttaacttggtagatcatactgaagtggtcagagatttaacttttgctccagatggaagcttgatcctggtgtcagcttcaagagacaaaactctcagagtatgggacctgaaagatgatggtatgtcttttttccaagctatgaactaggatttgtttcttgatactactatggagaggtattgggaacatgtggggcatttgactttaaaaatgacatgtgatcaaagttccttttctctgccttaacacttaggttcctttcctgaatagatcaaagaaaaacataaatgtgacccagaataggagccaacagttattcgaagtaaatgatctgatattattcagaaactaaccacataaatctgtatcaactatctgaggaccaaatatggatcaggtttgggattttacaggaaccagtctgtgtttatgtcctcttagggagggttattaacttactgtattggctgagtgaaaatttaggtaggtcttgaagtaacttagtatctaataaaatttaaattgaaacatgacctacataccagaacttataacatgtgaatattagtaaacgttaaattggctaggttaagaagtgcttttataaaaagtgaaagatttactgtccaatacaatagaaagatacgttggtgtcaagtactcacctttctctaaagccttacaaagttttggagatgctacctcatttgagatgagcatctcttccctttctcagtccctaatgaaagagtttatatgtttaactaaaaccttaaatgtaaggtctgttggtgctctaacagcctcaagctggaggttaacaggcttgcctaggggtaataaagcttaaattgaattagtaggaaacaaaaccctcagatctggagatgttccagctgatagatagtaaccattccttaataaagttctatgctaacattaacaaatcatgaaggaccttctctgtgttttatctgctcagctgttgaggtgcaaagggatgccaacagttgaaatattttaataatttttttattttgcatatcgaatgatgcttgcttatctcaaactaatttcagcaatgtacatgttttaagaacatagtcttagtaaaatataagctccaagatagtggggtccttgccttatttccagttatatcctcagtgccggcatagggcctggcatgcgtaggcactcagtaagtatttgtaaaactaagagttcagtatacttaagcatagttgtgtgctgtgggtataatacacaaggactttggagtgagttgtaggttctcaaaaatgaagaatgaaaaggcattttgaagatggtcaagtttcttaaccttgctgttgtgttccagttgcttaacttttaaaataaggggattggactaaaagaattctgtcttttttttttttttttttttttttttttgagatggagtctcgctctttcgcccaggctggagtgcagcggcgtgatctccgctcactgcagcctctgcctcccaggttcaagtaattcttgtgcctcagcctcccaagtagctaggattaccggcatgcgccaccatgcccggctgattttttaatgttttttagtagagatgggtttcaccctgttggccaggattgtctcaaattcctggcctcaagcagtccacctgcctcagcctctcaaagtgctggaattacagacaagagccaccgcgccaggccccagactttttcttgaagggctagatgttgaatatttgaggcttgtgaaccatgctgtctgctgtagagcacaacataaacacatggacaggattgtgttccagtaaaatttaaaacctaagcagctggtgtatatcggtaacccttgttatagataaattgctttcagctataaatgtttgtgatcctttgctttactgctgttttgaaatactgctcatttgaagtggattctagggttaatacagattatttctttttgttcaggaaacatgatgaaagtattgagggggcatcagaattgggtgtacagctgtgcattctctcctgactcttctatgctgtgttcagtcggagccagtaaagcagtacgtgtcaaagttcttgtacattcattatgaattggattatgataatgtgtgcataatcattttaaatctaagtaacctatgaagtctgtgctcggtgtcatgaatattttaaatgttttatttcatgatgggggagaatttgcatgaaggaaattaaatatagttattgattgccaagtgagaagttggattgtttttagagataatagataataatgggcatatcagggttttttttttttgtaagtctagaaaagtttatgtgctgtagaagagatctagtctatatgttaagacattcccttgctaattattttcttctctgttgttctatttttttggtccagtttgctgtttttaaagttttgagtcccagctggtcctgtacatttaactgaaaaaaaagtaacttaaaataatataaaaatagcactcatgtatgtcctacagttataggtgaaatttgatattgtttgtcttacatagcatacctatagacagcttaagtaaagtgactgttaagagggttatgcttattgatgaactcttgtagttgtttaccagctctgttagtatagttaaattgatctcagtagcttcaagtatttataaaatggttgaagtccaaatacatgtgataattacaatacactttgaattaatggagggtgggaggctagttgaaatgcattttatttacccaaggagtatgttaaaatgatagttataaatgttggaagtttaaagcaagatactcagtttagttctttacaaatcataagaagaacaaaattagatgttgacattgctattttaggctgtgtgttttccatatgcttcttgctttccctgtcacaggtggtggcagcaatattggtgtgattgaggttatgctggcaccactcgcacacaggcgcacaatggtgttagctgggcagaaagagtggcatctctggctaccgggctgggggcgacctttaccataggatgaagtaaccttgcattcggctgcaaggtgtactgtacgtacacaggtgctggtcgatgtccactttctgcttttctttctttctttttttcttttttaaagtaatttcccccacagtaaaatacactgactcctgagtaaattgattttccagttttatggaattgggagtctgacaagtgaaaccaatttaatgtaaagtatttggctttcaaatggtttctctgtgctattttttggaattctttcagattccagagatatcttacgtctttgattcaatttaaaatttgtacttattttcttttagaaataatgtattgtgtctgtgcagaaaaaaaaaaaaccaaaaaggattgctttactccaagaggagagattgtcttaggataaacctccaagctcacatttaatataacagactgaagtaaacattagaatcctgtttagagctattctgcacagttaactactgatctttagaatctaaaattgtatatgaacttattcttaaataattgaaccgttttatattcaaatgacttatgatcgtggttagtttgggaaaaataagatggttaaattttgatttattgaaatgtaattgtattattttcataaaatagcattttcattttgtaatgtggtttaacatccttgttgtttgccaaagaaatttcatttggctgtgaatattctatttgcttgcagtatctgtttctcttcctaggctcaagttggtgacccaagcctattgtaaacaagtgattatctcaaagggagatgccaatggagtaacaatttgttaaccttacgttttctgtctgtatatttttttaaaaatctggtagtttctggaaaaaaaagagaagggggtttgtagtacttaaccctatttatttccgtatattttagttaattagtttttggaataaatggatttcagtatagctttgtggttaaattgcattgcctttattttatgtttaggcttatttttaaattaacatttaacagaaacatttgaaatagaatttgcatgtctgccttaattaacttaaagactgattttaatctgactatgacactgagcatattctttaaattactcataatttataatgcttaatataatcttaattaaatttagcagttttagtataagatgtgccattttgtcctctgtatgtctgaatgaagctataacatttgcctttttattgcaggttttcctttggaatatggataaatacaccatgatacggaaactagaaggacatcaccatgatgtggtagcttgtgacttttctcctgatggagcattactggctactgcatcttatgatactcgagtatatatctgggatccacataatggagacattctgatggaatttgggtgggtacagcatgaattattttagtctataattcatctccacctatcaagttatgtgaataattacaatcaccaatatatgcaacctaaaattacagtctattctaatttaaaatgttggtattatttaagcccttgactaatggaaagccttcgatataaattctaaaagtaaatttggctctcttgatacaagtcttgctacttaacagtacccagctctctatagaagtactaattatgtttagagtttttgttggagaaaaacagttaaaaccaaagttggacttaatcttactgtcttaaatcataaaagattttttttttttttgacagagtcttgctctgtcgccaggctggagtgcagtggcgcaatctcagctcactgcaacctccacctcctgggttcaagcagttctcctgcctcagcctcctgagtagctgggcttacaggcacctgcaaccacccctggctaatttttgtatttttagtagagatggggtttcaccatgttggtcaggctggtctcaatctcttgatctcgtgatccacctgccttaacctcccaaagtgctgggattacaggcatgagccactgcgcccgaccataaaagattagttcttttcaggtgactttaatttggatgtatcatctctactgagtcttctcagttatattaattaaggctactttaaacactattcaaagacagatgtactttgtacctgggtaattttgttttcttgaagtgactgatatccactgaaaacatatatttgacctcaggcacctgtttcccccacctactccaatatttgctggaggagcaaatgaccggtgggtacgatctgtatcttttagccatgatggactgcatgttgcaagccttgctgatgataagtaagtatgtgcattatagcttgactgacttactattaccttttacattcttaagccttaaagcctttctgcagttaagagttttaatgtctcttcctcaacacaagcccctgggagattttgttgtgtcttaaagaatatcggcctgaacaattatctgtgtaaactaaagataatgcatgcctctccctgtgttccttgtttaacttgtttaggcatagtgggttgatttttagtcagcttttagcccagcttacagagattttttaaagtaatgtcttaacaaaggttgaagcagaaggaaatttctaaagtgaaacaaatagtaaaaccaaaagaattacaaataaatagtaatttgtatccaccatgattgagattagaatatgaaatgtcacatgaatgatatgtgctgcttgttggtaagaagcagaaactagttgcaaccatctgtgttcatgcatatagcattgagtagttcggtgacgtcaattcataaggcagctcttctcttcccagaatgttagcaaacatatggagagaggttttttttgtttgtttgtctgcaaccattgtttcctgtttgctcagatagattctgcatgttagttctctgctgtatttgtagacacactcagcctgggtgaaaagctttttttcctttcctggttttttttgtttgtttattggagacagggtcttgctttgttgcccaggctatagtgcagtggtgcaatcacatctcaccacagccttgattttctgggctcaggtgatcctcccacctcagccttccgagtatctcacaccacaggggtataccaccacacctggctagtttttttaaaaaattttttgtagagacagggtctccctatgttgcccaggctggtcttaaaagtcctgggctcaagcagtccacccacctcggcctcccaaagtggtgggattatggttgtgagctaccaggcccacctagcttttaaaaatgtcttgggaaaagggtgaaacagactagaagttgattgtattgtaagtgtaggaaagtaaggagaaagtttccgggtgtgaacattctaggtttgaacactgggaaggagggaaggcagccatgcattgtagtctcttaagtgaaagtttatccaatttaccaactgatattatagaccttaaaatattttgtaattgtataaagcaagttattataattgcctgttggtgtgatgtgtgtattttgtgactcataactcaatggcatttctttctaaattttaaaaaagttgcttttaccttacattttctacaagatactaaataatttatttcattttcagaatggtgaggttctggagaattgatgaggattatccagtgcaagttgcacctttgagcaatggtctttgctgtgccttctctactgatggcagtgttttagctgctgggtaaatatatttttctcttttttttttttttttttttttttttgagatgtagtctcccaggctggagtacagtggtgcaatctctgctcactgtagcctccgtcttccagttcaaggagattctcctgcctcagcctcccgagtagctgggactacaggtgcacaccaccagtcctggctaatttatttgtttgttcgtttttccagtagggtcgggatttcaccatgttcgcctggctggtctcaaactcctgaccctgacctcaagtgatcttcccgcctcaacttcccaaagtgctgggattacaggcgtgagccaccacacctggcccatttttctcttttctttaagggccaatttaagggggcttttagcagctagtaatttattgtcagtaaaactctaataagtgttcttcatagtagtgttaccttgtcatggaatacatcattggttagttcttcctggttgggttttaatgtgaagtttgtgactccactactcacatgtattgggtgatagttgtttgagctgtagcaacactgaaatacatatacttgggtgactaagcatgtgctttgtttctgtttaggacacatgacggaagtgtgtatttttgggccactccacggcaggtccctagcctgcaacatttatgtcgcatgtcaatccgaagagtgatgcccacccaagaagttcaggagctgccgattccttccaagcttttggagtttctctcgtatcgtatttagaagattctgccttccctagtagtagggactgacagaatacacttaacacaaacctcaagctttactgacttcaattatctgtttttaaagacgtagaagatttatttaatttgatatgttcttgtactgcattttgatcagttgagcttttaaaatattatttatagacaatagaagtatttctgaacatatcaaatataaatttttttaaagatctaactgtgaaaacatacatacctgtacatatttagatataagctgctatatgttgaatggacccttttgcttttctgatttttagttctgacatgtatatattgcttcagtagagccacaatatgtatctttgctgtaaagtgcaaggaaattttaaattctgggacactgagttagatggtaaatactgacttacgaaagttgaattgggtgaggcgggcaaatcacctgaggtcagcagtttgagactagcctggcaaacatgatgaaaccctgtctctactaaaaatacaaaaaaaaaaaaaattagccaggcgtggtggtgcacacctgtagtcctagctacttgggaggctgaggcaggagaattgcttgaacccaggaggtggaggttgcagtaagccaagatcacaccactgcactccaacctggacaacagagcgagactccatctcaaaaaaaaaaaaaaattgtgttgcctcatacgaaatgtatttggttttgttggagagtgtcagactgatctggaagtgaaacacagtttatgtacagggaaaaggattttattatccttaggaatgtcatccaagacgtagagcttgaatgtgacgttatttaaaaacaacaacaaagaaggcagagccaggatataactagaaaaaggatgtctttttttttttttttactccccctctaaacactgctgctgccttaattttagaaagcagcttactagtttacccttgtggtataaagtattataaattgttgtgaatttgaagaatccgtctactgtattattgctaaatattttgtttatactaagggacaattattttaagaccatggatttaaaaaaaaaaaaaaaaactctgtttctgcaggggatgatattggtgagttgccaaagaagcaatacagcatatctgcttttgccttctgttgtttatcttacctgcagatattaagaatgtatgcattatgtaaaatgctcaattatatatttttgttgagttttttaattaaagacttgt

SEQ ID NO: 23 - DNA, 26749 bp, Homo sapiens
aaagcagccaatgggagagccgaggcggggaggtgcggccaatggcgcgggcctgtttgattcaaaggttgcctataaagcgggactgcacgccggtttttgtccgagggctgtcgagtccgagcgccgccatggctctgctgtccgagggcctggacgaggtgcccgccgcctgcctgtcgccgtgcgggccgcccaacccgaccgagctgttcagcgagtcacggcgcctggctctggaggagctggtggcgggcggccccgaagccttcgcggccttcctgcgacgcgagcgcctggctcgtttcctgaaccccgatgaggtgcacgccattctgcgcgcggcggagaggccgggagaggagggcgcggcggcggcggcggcggccgaggactcgttcggctcctcgcacgactgctcttcgggcacctacttccccgagcagtcggacctggagccaccgctgttggagcttggctggcccgccttctaccagggcgcctaccgcggcgccacgcgtgtcgagacgcacttccagccccgcggcgctggcgaaggtggcccctacggctgcaaggacgctctgcgccagcagctccgctcggcgcgagaggtgagcggccctccagggccctgggtcgcacgggagacccccttcaagaatgggaaattgaggcctgctgggagtacgggccggggccactacctcctctgcgccctaccggaagcgcgcgcgggctaggtggtcccagggtctccgactcacaccccactctgcgtgtctcccccggatcccccgggccgctcctcgtggcaggggatagtgggaaagcctcggttcccaaggatgcgaattgtgcccgggttccatctcctaacgttcatatccctgaaggagggaccagaagtactctgagttccaaatttcagttaaaatcaaacttggaaaattgcctatttccctgtctgtcagccaacgctagatcccactttcaggagcttcttaggagactcattaccaaagaacttacgcagggaaagttccagaaagatggtctccagagacaactacggggcattaggaagcaattattattgctaattactttcatgcatcttttgctgtaaaaagcagataaacacgagagtggcaaagtgagagccctgccgctttttctttcttgtcttttttttttttttttttttttgagacagattctcttttgcccaggctggagtgaagtggtgggatctcagttcactgcaacctccgtcccccgggttcaagtgactctcctgcctcagcctcccaagtagctgggattaccggtgcccgccaccacgcccggctaatttttgtatttttagtagagacggggtttctccatgttggccaagctggtctcgaactcctgacctcaggtgatccacccgcctcggcctcccaaagtgctaggattacaggcgtgagccaccgcacccggccccctgccgctttttctactgccagagactggaggggaaactggggcaaggggtttgttttccataggctgggtctgtgccagattgcagtggtctcctaaaatgcagatacatttgcattagatcggcttctgtattcatagtgggttttggtcctactgtctgactcttagtatggcatggtcatgggtgcaatggaggtcttgtctgcttgccagcctcgataaagctgcagcagggtgctggggatcaaggaggaagaaggcagcctgcaggtgggtgtggcacatagagtgtcgtggcagacaccttggtctggagccatggtcaggttgcttgctgactggcagtgcccagctccctggctatctgcctgtgccagggacatggcagataaagccccagccatgttaagacttgttagggctggtacctgagtgtgtctgagtgtgggtgaagataccagtgcattgtcaggttgacatgtccaagccccgactctcaccaatgttcttaatgttctttccctgactggtggggtttcagtggtagtggatacagtgacctagtgccttgcctttgagggagtggttgtgggctgcagctaggctcttaccagccctgaggtgctttgggtggactgagggttttttgatgcagcagacattttccttgcgggttcagtgaaaagattaaaaagatggaaaaggcagacttgtgtaggtatgcatccccaaagctcatgtccagtagaacttgagcacttggaacctgaaaaatgtaaagaactggtctgtatagtgagagctgtggattgttctagtcttttgcccagccccaaattttagtgatagcaaaagggcactggaactagaggccagagggaaactattaaactcacgtgctggcgtgaggaggggatggagccaggagctcagactctccctcatctcacgggcattttgtaatactgacatttccagatagaacctgctgccctagtctagctacccacagttccctccgagatgctgtatttggaacctgggcagttttaactgagaaaggtggtacattacctttaaatccaatgagtattggctgggcacagtggctcaagcctgtaatcccagcactttgggaggctgaggcaggcagatcacgaggtcaggagttcgagaccagcctggccaacatcgtgaaaccccgtctctactaaaaatacaaaaattagctggacgtggtggtgcgtgcctgtaatcccagctacttgggaggctgaggcaggagaattgcttgaacctgggaggtggaggttgtagtgagctgagatcacaccactggactccagctctgggcgacagagcaagactccctctcggaaaaaaaaaaaaaaaaaaatccaatgagtattttcagtgtgtccgatagatgccaaattatttgcttactcattgcctgctgtgtatcagacactaccatggctggggccacaggggaaggcatcatccttgccaacacttgagagtggacagtgtgctgatgggaaacagtgaggagtttgctgcaggtactgcggaaagggctaaagaaagaaagtctccggagtggcagtgacctcagagctgggtggggcttgccagacctagggtatgggggctggcccacaagtgtttaaggacctggaatgtttgggggcagccaaattccccacagcgggttagtggtaggagaggaagctggggtaagggatgctgaaatgagttgggtttgagacagtgctgaatttgaggtcccaaagacaatctcttttgtttaaaaaaaaaaaaaaaagccaggccatggtatcatgtgcctgtagtcccagctactcaggaggctgaggcaggaggatcatttgagcccaggagtttgaggctgtagtacactatgactacgctgtgaatggctactgcactccagcctgggcaacacggggagaccctgtctctttaaaaaaaaaaaaaaaaaaagtaatgctttctgtttgccaggcactgttctaggtgatcccaaggaaggtgcgattatcatcttcattttacagctgatagaactgaggcatagagaagttaagtggccccgaagtcatgcagctagagaatgaaggagcctgtactcaaattgaggcacagaatgtctgaaccactgttaaccaccacactccctgtggagggttcaggagcctgtgctcaggtggggagaggtgacagcagatctggtggctagctaagagctactactatttatgggcatgcattgtggacaagggagtggctgtgtcaccttgaccacatcctttgaaatctagtacctgtgacagcgaggaccatgaaggtgtaggtctcaggctgctttcaggatgaaatgagaagctgttctgcatccgtgttctgatagcaaaggtacctaatggtgatatgattgagcactttgaatgggtcagtttctgtgctaaacccttgacctgaattacctcatttaaccctcccaacactgggaggaggctacaattaagaaaagaccaggcacagagaagttaagtaacttgcctgagatcacacagttagcatgggacagagctgggctcaagcccaagtctgtctagttccagctctgaagctcaagtgttttttttttgttgtttgttattattttttttaagacagagtcttgctctgtcacccacgctggagtgcagtggcatgatcttagctcactgcaacctccacctcctggattcaagtgactctcctgactcagcctcccgagtagctgggattacaggagcacaccaccatgcccagctaattttttctttttttttttggagacagagttgctcttttggcccaggctggagtgcagtggcacagtctcagctctcagtaacctctgcctcccaggttcaagcgattctcctacctcagcctcccaagtagctgggattacaggcaccctccactaatttttgtatttttagtagagatggggtttcgccatgttggccaggctggtcttgatctcctgacctcgcgatctgcctgcctcagcctcccaaaatgctgggattacaggcgtgagccactgcgcccggccaatttttgtgtttttagtagagatgggtttcgccatgttgcccaggctggtgttgaactcctgggctcaagtgattcacctgccttggcctcccaaagtgctgggattacaggcgtgagccgctgtgcccggccactgaagcccacactcctaatccctgctgcatacagcctccctgccatgaggaaggattggagctttggtagttttcaacaggctgaaggtttgtaacagttgaagattgggactttttaatttccatgttgcgtattctataaacaggaaaatgacaatgactagacctgtccttttcaggaagaaaacgaggtggtcagtttttagagtaggaggcattaaggctggcagagaacctcctcaacccatcaagtggggaaggtggttcatgatgccaggagaacataggtctctgagtttaggttttgtaaactagagtgtgttttcctctccctgggaaagatagagccagatagatgtttctggtacctggagcagagggatctgtgagaatcttttggtgggtgaatgaaggaactttgaatgccacatgaagggtcccacttaaccccagaggttggggccaggctgcagtagagcacggtcgaacctcagtgttcgctccatgcagctttatctgccttcactgaggtggtctgaggaccaccctgcatcttcaggaatgtctctggaaggagccaggatacgaggctccttgaccagagtataggcacaggaagccagggttacttggtaaatggtagggcctaatcctggctttgcagcctgaagcgctggttctgggataggttttatccagcagctctctgaccacacagaatcactcagtgtgtctgatacataaaagatgctcagtaaatactgtaggggcctattatgtgcacctttgctcattcagctacatgctttgaggagaaataaagggcagggggaagggagcggtagataggaagaaaagtagttcaggtgattctgtctgcctttccactcagcaagtatttgtccctgggtggctgtgcctggggtttgtgaatctgccagccccttccttgactcttgtttctatatacctttcaaagtgtgggcattctgccacactgaatgaggtacagtgtttaaaaacaaatggtttggccatgcgcggtggctcatgcctgtaatcccagtgttttgggaggtcaaggctggaggattccttgaggccaggagtttgagaccagcctgggcaacatagcgagatcccatctctacaaaaagttaaaaaattagccgggtgtggtggcatgtgcctgtagttccagctactcagcaggctgaggcaggaggattacttgagcccaggagttggaggctgtagtaagctatgatcatgccagtgcactccagcttgggtgacagggcaagaccctgtttctaaaaaataaataaaaacacaattacgtatagcatggcttgaatacaagctggctgcttaccaggtgctcaggcgagcttcaccaaaattggaggaaatactgttttgaaccttttgagaacccatatgtttgtttcctaagcaagtttttggataatcttgaattatacaggatattttccctacatacttgctgtagatccacccctccaccactgtatctgttgatgacgcattcagctttttgcctctgttgctgtgtgaactgggatttggctgggctgtggccgcctgcctggaagggctacatagcctcattttggcaatgtgcttatgaattggctgtccggctattcctggtttgttgaatgagagttcagaggcaaagctggtaccaccacgaggttccaattcctcagagtcacgtttcttaccagtgcctattctcttttgttccaaagaggccacttttgctatgacctcaccctcgggcatcctcttgataacctgagcgttagtagtggggatcattgcgttcccagagagccctgccaggaggagtagcagcttaggaatctgttgggggcccctggcatttacttggatgtatctgaatgaaggctttcctgttcttgcacaactttcctctgcattacagtagagcctgtgtggtgtgatcagtttctgttccaaatgctcatgtcagccccaagcagggcttctcaccctcagcactgttgaccttttgggttggataattctttgtcctgaggggctgtcttgtacattgtaggacgttgagtagcatccatggcccccattcactcgatgccaatagcatccctcacaccaggtagtcatgatattcagtgtctccagagtgggaaatagtgagttactgatgaatgggcacagagtttctgtttggggctatgaaaaagttttagaaacagatggtagtgatggttgtgaatgtaattattgccactgaattgtacacttaaaaattattaagatggcaaacttatctattttaccacaataaaaaaatgtctccagacattgctaaatgccctgtgggggcaaaatcgccctccagttgtgaaccactggcctagaagttctcactagtgcatcattatgggacattacccactggactgaagtgttgctactatttatcccttccttttgatttcatgtgtcaggttaaggattttagaatttagccatttctctttaaaaatattgtggtaaaaaatacgtagcaaaatttaccattttaaccatttgtaagtgtacagttcagtggcattaaatacattcacactgttgtgcagctgtcactagccgaatctccagagctgtttcagcttcccaaagtgaacctctgtacccattaaacactagctcttcataccctcctttcctggccccggcaaccaccattctactttctgtctgccatttctttctttctttttttttttttgagagtctcgctctgtcgccaggctggagtgcagtggcaccatctcagctcactgcaacttctgcctcccgggttcaagcgattcccctgcctcagcctcccaagtagctgggactacaggtgcccgctaccacgcccggctaatttttttgtattttagtagaaacagggtttcaccatgtcggccagcatggtctcaagctcctgacgtcgtgatctgccctcctcggcctcccaaagtgctgagattacaggcgtgagctaccatgcctggcctctgtctgccatttctttattcttttcccttagcgtctagcagacagtaatgaagctgcagaattcttctctgacttctttatggatagaaggtatgttacttcaggaaaaaagcaagcaaaacccaaaaatgtagtggatatattggcttaaaaaaatcttgaacccggtctctactaaaaatacaaaattagctggttgtggtggtacatgcctgtaatcctggctacttgggaggccgaggcaggagaatagcttgaacctgggaggtggaggttgtgatgagccaagatcgtgccattgcactccggcctgggcaacaagagtgaaactccgtctcaaaaaaaaaaaaaaaaaaaaattcttgatgcaaatgatataacctctggaagggaatttggcaatatctagcaaaatttcagttatatttacccattgatctaccacttccacttctctgtatcttgatatattggcaaaaatatgaatagttgtagacaataggccatgcgttgcaacactaattataatagcaaaacacaggaaagagttcaggtgttcgtcagtagaggatgagttcatcattgtgaatgaaccgattcgtctctgcagtggaacatcctgtagctctaagaaggaatgaggactagctctgatatgcggtatctagaatggtactgaccagtgtagtagccatatgaggctattaaaatttatatggattaaaattaaataaagattcagttctgtcatcttggaaggttctattgggccacgctagtctagaacaatgtgtagtattccatgctaccttttacctatagggggatataagcacatatacatagttatatacataatacacatgtttatataaaacaaatatgtttatatacacctgtgtatacttgtttatattgaaaaaatggaagaatatacaaaaaactattggaaatattatctcaatggggaggagggacaaggatggaaactaagtatctttgaaagtaccttgttttgtaaattggattttggaactaggcaaatgttttacatacttataaaataaaaacaattcaaaatgataagccctcctccccctaccccctaacttcttggtgcttttccctcccctttgaaaagcccacctgcttgtgtacttcatgctggaatagtacagagtactgaatagtggtcagtccctccagagatcagtgaaaactttgctcctgccaccctctggtggccctgccagcactttcatctaatacttaaattgttttatttggttgcttgtttgtttgtttgagacaagttctcattctgttgcccaggctagagtgcagtggtgcaatcatgactcactgcagcctcgacctcccaggctcaagtaatcctcctgcctcagactcccgagtaactgggacttaaaggcacatgccaccacgcccagataattaaaaaaattttttctggagacaggatgtcaactgtgttgcccagagtggtctcaaactcctggcctcaagtgatcctcccaccttagcctcctaaagtattgggattacagatgtgagccaccgtgccgggcctaaattgttaatttgataatagcctctgaaacagagggagaacagtgcacacaagcaagtttaggtttcgctgtgggaatttacattcttttttgtttttaaaccccaaagatgtcaagatagttacttaaaggtttttgacaaaatcccaaggagattatttctgttctattaaaacatgtaatacatggagagaaaatatatcttttgcttttttagcaagagggtcctgagagagttaggagaggaagtgaagggtcaatggaggccatgtggtcagctgggagaatgcagcagccaggatgttattgaccacagcacaggctgacattgagtgggtgcagatctttggtggaattccaagcatgttgcacacctgacctcactttatgactctgggagggaagggagggaaactgaggtgcagtgagaaggggtgatcggtacgaacttcctccttcacacagaggaagaagagctagaatgagaactggaatgactggccctgaggggcctgttggggctgcacatgtgcctggtcagagcctagacctgcccattgagtgtgtatgaatcactgacttcgcagagctggaagggttccttgtttcaaggacaccgagactcagatggaatggcttgtccagggatagtgacggaatcgggactaagaatatgagtagctgccatttaagggctttccatatgccaggaactgccagcaaacactatgagataggtactgtcaatcatccgtggtgagcttgagcccatgcacttcatgggctacgccactgatcctttagtgtttgttctaagcttccagtcatgtgaaaaactgcccattaaacttggttggaatgatataaaatactgagtatagtactttttttagatggctccggagtcacagagacctgggttgaaattccagcccttgtacttgtttaagtttgtcaccttgaacaagctacctaacctctccaagctttggctttctcatctataaattggggatgacaggtaatggggttttgaaatttctagatagcacttttgagcttttgtgcaagaaggcaagcagaaaagagttcagttctatgtggcaagtaacataaacagggtctgtgaccttcccagagaccaagaaggccatcatgacgtctgctgttcaactacataggttcccaagtcccttggtacaaatcaggaggggacaggtagaaggactgagagaggtaggcttgtgatttgttacctgagatgatgatgtgagagtggacacacatgcagctgctccagatatggctggagaagtgcaggaacagtggggtcctggtcagcaggccggccattatgcccctgaccagctggatgcgtcctcctcacgtctcctgttgtaactgacttgcactgagttgcaaattgcaaatgggtgttgaccctggaagggactcttgaaagtcaccactctcacgactttctagtccttagagagtgggtgggctccatgcagcacagactgggagagtgccatgactgtgggcacttgatgtgcaagggctgcctgccttccagacatgccattgtccttcgcacattattgcctccaggagtgggagcagtggccaaatacacatcaggtgtatttctggacccacaggctgcagcaagagcaccggatacctaggagttgcatcctggcttggaaagcaggactcggccggttagtggatgagtccaggtcattgctcagctcagtgaagagagtgtcccttcagtctagccccaggtctacttcagctatgcagggattggttgcatgagggctgggacacaggaatgggggatggggatggggatttgaaggaagacttccctactgattgcttctacagtaggactatggacttttcctctgtaaaagacaagtacttttggctgggcatggtggctcatgcctgtaatctctgcactttgggaggccaaggtgggtggatcacttaagctcagaagttggagaccatcctgggcaacatggtgggattctgtgtctacaaaaattagccaggtgtggtggcgtgtgcctgtagtcccagctacttggaaggctgaggtgggaggattgcttgtgcttcagaggcggaggttgcagtgagccgagatcacaccactgcactccagcctgggcgacagggtgaaactgcatctccagaaacaaaaaaatagacgaatatttttaagagtcctgctttagtaagaaaggagtggatgctgggtgtaggggaagtcaggggaagaaaaaaacctccatcaaccctacgcaccctgatggtgttaaggactagtgttcaaatccaacgcacaggaaagggtgaggctttaaaaccaaacaatggaacaaatagcaaattaggtatttactcaccatataacaaaggtgttgcacaattgttttgttaagtggtgaatcaaaattcagcttggccgtgccttgtgctgtgggcccccaggcccatgcccctgcctccagcaggtctctaatccagcagctgggctgggtttttctgatctctgttccagtagcactgagggaacgtgtcctttggcccgtcacactctgttacccctggcttgtctcctgtctcattagactgcgttcttgaggacagggattgacactagatcctcagtgctcaacacctgcctgcctcgattgggtccacaatgaagatttgaaagaagagtgggaaatcagagaggcaagcaggtgtgtgcattttcctctttagctttctcctgtgagctctactctcatttgtacacctgcatattccaaacctctttttgaaggttttactgccacctcaaaatccgtttcgaagctcacccctcactcttgcttcttgtcttgtgtttcctgtttccttgtatctgaatatccctctccctgtcatcctcagcccatgtcgcccactgctcggctctcccatgatctccttccctcttctgcaaccctcattgcttctgccgtgctactgatttgtcttcatctggtctctagtcctcctaaacatttattgaagttgcttaacctaaagaatatccacgtgactgctgtgttgcaggtcctgtgttggaggaggtgggcccagatctctgacctataccaatctcttctggcatcagtttcttccatcctgttggattcttcacttcgaactcattactcttatacaggcaatgtggggaagattgaaactgattccttggttggcattcagggccttctgtgatcttgctcattcatccgtcttttccagtcatgtcccgtggctccctttcatgcatgctgtacgttccagccagactggtacataccccgtcatgccctacctcttcctctgttatcatgtggcttcctgcgggaatgccttctcctcccttcacttctcccatgcccttgtccaaattttgtccttgtgcttcagctcaaatgccatctcctccaggaagccttccctgctcttatctggtaagcatttgagtacctatagtgcccatagtccaccactggaggagacaccttgtttttgttttgttttgttttgttttgttttttgagatggagtcttgctctgttgcccaggctggagtgcagtggtgcgatctcggttcactgcaaccttcacctcccagggtcaagtgattcttgtacctcagccttcctagtagctgggatgacaggtgcatgccaccatgttcatctaattttttgtatttttagtagagatggggttttaccgtgttggccgggctgctctcaaactcctgacctcaggtaatccacccacctcggcctcccaaagcactgggattacaggcatgagccatcatgcccggcccccttagtttaattgcttaggctgtatatatcattttgcctctctgcatcctgtgtcctctccttgaggtaagttgggtctatgtcaaattcctcatagccatctttctgcctagtgcagtgtgcagcccacagcgtgctctgaggaggtgctggctgcataatagcacctgtttcctgccttgccctccctgtgctaagccctttccatgctttgtttcacttaatcctcacagcagccctttgacccagatgctattaattttgtcttcctgaggaggaaactgaggctcagagagattaagccacttgcccagggtcacacagctggtaggtggtagagctgggttctatgcccagaacttttgcctttaattcctgttgtatgacccgaatgagtgggatgaatagaactgtcaaaataggatgtgtaaagccagtggaggatgtaaacttcagaggatgccacaaattcagaaagaacgcttctcattttttaaatcactgtgttcagtgggtttcagccatgccctttaccaagaatagcccacagcttagaccatcattaaaaggggtggggtgggaaaggcagcaggagagtaactggtcttctcaaccccctcacagcaatgacttcccaggaactggtgtttcagggtctcacatcctagtagaccaggccctggagtgttggagaaagacagccaaattgcctttttgcctcttcattccttctttaatcccccaaatccttaaggagtcatgactgtcatatactgtcctaagtcctctgggaccacagaaatgactcaatcccattcaagagcctttgctgcaggagaaggagtgaaacccataaatgaataatcctaactttcagaaaaagagttaatgtgattctgagagacaggcttttactgtggaaatggggaggaaggagaaacccttatatctccagactacagaagagcccccaagcctcggcttccttagttaacacccccaacttctgactcagtttgtcaggacctgtttctaagcctggaggtttggacacccccactgccctgccaggagtttgctgaggaccttggttttaagcctgcaaaaggtgtgattagaggcattgtggcaggagcagcctgtctttaaaagagcgaggaaagctaggcggtgtctccctgtgttgaactgtctggacggctccagctctggactggtaaagtgaataaacgagcagatactaagggatcctttgtaccttgcactttatgtaacatagtcatttagttctcgatacaaccctattttgcagctaaggaaacagacatttgaaacagctgtaatttgcccaggaatgcatggctaaaaggtagctcttaattgtagtctgatgctaggtgtggaaaatcacttgggaggcatgaatggagccatgttgttggggagaagaaaggcctgttctgagcttaagggcagaatccttaggaaatatttccctgttctttgctgtgggcttgcactatggacggataccaaagaactgcagagagaaccttttactgaggagaggccagtgcagtggaagtcatttggttagaacctgcccaacagacagctgatcaggcctggctggtagaaagaacagaatgttaacaaatatggtatgcagtgttagggaggcagaagaagggagaatccatgggcctgcttcgattgctttcgagtcatgagttggtggtgaatgggacaggccttaaaaaagtcagagattatgattcaaaaccagacaataatttaaaaaatagatttcgagaatgctaccctccagaagggccctcagagagaatctgaggttttatttacttgtttaacggacagcaaactgaagcctggtggggaaagcaacaagccaaagatgacagtgtgttacccacagaaccagacagcttgctgatctgaataagcctgtaagacaggagtttagtggaggaatagaaggtgaatggagcaggttcataagagagcaaggcagtggattgatctgtatttttgagaaacctcccagcatggagttgggagtgttagctaggccaagtcaagatttctaggacacggggcccaagtgtctttggagatgcaaaagagtccatggtgaggggggcaccaacactgcagaagggggagggaaggataactgttggatagggatcatttcccagttctgagtggagtccagagtccagagagcgtgctgtaaggtggtgtcctataagcttatcatgtgctcttccctgtttcacctgtaggtgattgcagtggtcatggacgtgttcacagacatcgacatcttcagagacctgcaagaaatatgcaggaaacagggagttgctgtgtatatccttctggaccaggctctcctctctcaatttctggatatgtgcatggatctgaaagttcatcctgaacaggaaaaggtttgtggtacactatatccagtttcaccatagtcaacaaatatgaccaagcatccattatctacaagctggctggtggcggtatccctgtttacaaggaagggactgaggctgtgagcaaagtcatttgcctggtcttacagaaaacaaacagtacctgtgacctggcaattctcctaggtgtctacccaagagaaatgaaaatatgggcccccacaaaaatttatgtgtgagttttatagaagcattattcataaagccaaagagtggaaacaatccaatgccaatcaactgataagtggataaatgatatgttgtctattcatacaatagcatactattcacctataaaaaggaatgaagtgctgatacatgctacagcatggatgaacctgcaaacgtgctaagtgaaggaaaccggtcacaaaagaccacatatgatatgattccattaagtcagaatagggaaatctatagagacattgattagtggttgcctagggctggggagttgggggaaggacgggattattgctaaagggtactttattttagcactttctttttaaactgatgagaatgtcctaaaattgactaacggtgatgatggttgcatatatctgtggatatactaaaaactacagaatttgtgttaattgtatgatctgtgaattagatctcagttaagctctttaaaagaaatgttaggattcaagaccttggcctctcccctgtactgtcctgcctcttaatagagcctggaccagctcccttgttgaaggcctgaaggccaccctggaagttgctgcttttgacagtagctccaggaggctgcccttttaatcacagcaaccagtattttttgagcccccactctgtctttggcactgctccatgctttttttttttttttcctgagatagagtctcactctgttgcccaggctggagtacagtggcccaatctaggctcactgcaacatccctctcccaggttcaagagattatcctgcctcagcctcccagttagctgggattacaggtgcgtaccaccacacctggctaatttttgtatttttagtacagatggggttttgccatgttgtccaggctggtcttgaactcctacctcagatgatctgcctgcctcggcctcccaaagtgctgggattacaggcatgaggccccatgcccagcctgctctgtgcttttaacaaatgttatgtaactgaatcctcaaagcagcccctatcaggtaagtggcacctgtgttttagaccaggaaatagtgacacagagaatccaagtgtccaccacttcaaagtagtgggcctagggtctgcctccttgtatgtctgcctccaaccccagtgtctgtaatcactattacatgctgctgctgttcatttctcattattgtaaaattagattttatgtctatttctctgattctgaaaatgacctaagtgtttcagtggaagcctatacaacatagctagcttggtcactttcatggaaagaagaaagaaaaattgtcatatttattacagaatttgtttttttgttgttgttgtgtttttttgagatggaattttgctcttgttgcccaggctggagtgcagtggcacgatctcagctcactgcaacttctgcctcccgggttcaagcgattcttctgcctcagcctcctgagtagctgggattacaggtgcccaccaccacacccgactaattttttgtatttttaatagagacagggtttcaccatgttggtcaggctggtctcaaactcctgacctcaactgatccacccgcctcggcctcccaaattgctgggattacaggcataagccaccatatccggcccagaatttgttttttaaaaattaagcaacccatggcttctcagccttttggctaagatcaagtgtaaaaattaagcatcttaacctgtgagcttcagaactttatttgttcatcacctgtatgagtatctattatgcactgggtactagatataaagcagtcagcaaaacgaatttagtctttggtactataagttactgcctaagagactctaacttaccaccttattattaccaagcaatttggtttacagaattcagattctcccacagagttcttgttggttgcctcatgataaagacaggattggggtttctagaccaattgagatgagacagccatgtaacccaacaggtggttagaaaatgagtccaggtggacccaaggaagatacactttggcatggaaaagagcattatcagctagccaggtaaagaaatggaaggtatcagtgtttaatttcaaggtactctttctataattaaggctatgcattagcagagaaatcacagaattgttctggccacaactttggtcaagtgattttctctatttatctactagacagaaatctatgagcaggcaccggttcagttgcctactgttggttgttgccttcataggtgtccagatcctctgcaggggggtttaagaaggcctatttctggccgggcgcggtggcttacgcctgtaatcccagcactttgggaggccgaggcgggtggatcacgaggtcaggagatcgagaccaccctggctaacacggtgaaaccgcgtctctactaaaaatataaaaaattagccaggcctggtggcacacgcctgtagtcccagctacttgggaggctgaggaaggagaatcgcttgaacccgggaggcagaggttgcagtgagccgagatcgcgccactgcactccagcctgggcaacagagagagactctgtctcaaaaaaaaaaaaaaaggcctatttctctggcctccccagtttttgtagttttacctccttcctggggaagcactgtcttccctggttgcttgtgtctcctgttcctctctgtgctagtgaatttgtgccccttgctgtatgggggctgatgtccccatgctctgcctctgtagctggttcagaatgttgggttgtgctgtctgtaggaacttggtcacacattgatgtgcaggcgctcacaagtgctttggccacgatcacagaggcatatgcaacattcagatgtgtgtcaaagggaaagatacagaaaaccacacctaatctgcccataatggtattcttatgcttattatatgttgatcctttaagacttggctcaggggtcatcacctcctccaggaagctctcctcccaccaagtccaggtgtacctctatgacattccctagtcgtttttctttttttaatttttattttgaaataatttaagatttataaagaagttacaaaaataatataagaaattcctgaatactcttcacccaagttctccacatgttaacatcttacaaacctcagtacaaataacaaaatcaggaaataaacttgatatcaatactatctaatttacagacttatacatttcccggtcgttccactaatgcccttttttatggtccaggatccaatccagtccaggatcacaccttacatttagttgtcaagtctccttcatgtgatttaatctggaacagtttctccatctttctttgtcttttagggtcttgacctgcccccaccccccccccaccaccccaccccccgtttttttttttaagagataaggtctcgctatgttgcctaggctggtcttgaactcctggactcaattgatcctcttgcatcaaccagcctcccaagtagctggaacgacagacatttggcactgcgcccggctggatcttgacacctttaaagaatactagctagctgggtgcagtggctcacgcctgtaatcccagcactttgggaggttgaggtgggcagatcacctgaggtcaggagtttgagaccagcttggccaatatggcgaaaccccgtctctactaaaaatacaaaacaattaaccaggcatgatggcaggtgcctgtagtcttagctactcgggaggctgaggcaggagaattgcttgaacctgggagatggaggttgcagtgagccgagattgtgctactgcactccagagtgagactccacctcaaaaaaaaaaaaaaaaaaaaaaacaattttttgtagaatttgggtttgtctgatgttttatcaaagttaaattcagattacgcatttggtaagaagaccacagaagtagcattatgtcttgccatagttttgtgttttatttttagcttattttgaatattgatagattaacagaagttgcaaagattgtacagaaaagtttcatgtacccttcacccagtttccccaaatgttacatcttatgtaacttatggtacaatgtcaaaacctggaaattgacattgtatacagctttgtgccatgttatcgtcatgcatgcatatccagacagaagtttccatcaccacaaagatctccctcctcctgctcctttatatagtcacatcactcccctcactttaacccctagcaaccactaatttgttctctatttctataattttgtcgtttacagtctattttgtaaatggaattatacagtatgtgacctttcaagatttgctttttttctctcatcacagtgcttttgaaatccatccaagatgtgcacgtatcaacagtttgttccttttcattgctgagtattgtatggtatcttataccattcagccactgaaggacatttggatatttccagtttttgtctgttatgaataaagttgctgtgaacatgtgtagaggttttgtgtggatataggttttcatttctctggatgctgttatgtgttactgtagtttctaaatcaattagttttctctctcttattctagtccttgaaggtaaggagcatgccttacatctctgttgtctcacggcttggcacatagtaggggctctctatgtttatggaatcaatgagtcaaacaaaaatcttacacgtttaatttaaatgtgtaagatttctaacgatatagagccactggtctgctccagagaatgcagattgttgtagtattttgtatgccattgtttatacatttatgtgtgtcattttacaggaataattatgcatacatgtgcagtatattgccccagcataccactaccagtgtacgtttttggtaattatgtatttgtaggagatgtgacattgcttgttaagccacatgtgatatgagtgtttctgcctcagcaggcctgtactagagaaggcctgtcctgtgttcctattctccatacccattatggtgttgagggtgagtgaggatggactgttactctaatgtgatgccattaaacaaacaagttggaggaagatcagcttaccttctttcagactttgctaaaatgttctttattactagcatgttttctttgatgattttatcccacacattttgcttcagaatcatttcttggattctgttgtttagtatcccaaaaaggttgagtgttcttttagaacacatacacgcatgaactaagggtctcaaaagtaaatataagaaaagaacagatgagaagatggaccaaatgtagaagtaacatcacttgaggcttgagaactgtctggctagtgtaccatgtatactgtcactaaatggtgaccctaagccacgcatatgccaataattatatctgggaattgtaaactaaggctttttgtcctaaccatttgctcagcagatgagtattgctgaattgttcatttatatttctcccactccctgccaacagttaatgacagttcggactatcacaggaaatatctactatgcaaggtcaggaactaagattattgggaaggttcacgaaaagttcacgttgattgatggcatccgcgtggcaacaggctcctacaggtaagtctctaacccgtccaaggcttattaatctaaactcttcagaagaagcatgtcatgtaaaggtaaaagccttttcctctcaatgggagcctgtatggccatgcattctgatatgcgtgcatctgtgtatagcagctggttatcaaagcctcctgttagaggcagtttgggtgggggtcacttcccctgtcctgtagtccatagattaaaatgcagaagttgaacttgtattgagacaacacagtcagcaagtcctagatttcaagccttggcccaggtctgcaggggacgaactgggggttaacagcaacacacagtctggaatcctggttccttagggatctggacccagcttgccctgctcacttgaaggtaggggcagttgcaggcatctccattagtgttgaaggcagagccagagctgtcagctttagactcaaatcctccacgttgcttcaagccttgtaatttagagctttagtctagaaaatactgattatgtttctgacccacctttgaagtgtcacattggcaatggcatcttaaggtagagagcaggaaggttgaagagagggtggggataatgagcggtttacatgaatctctagaatttgtgccatttgtacatatgtggctccaatggttgtatgttctgccgcctctgcggtagattgtctgatggtttgcatgaggtgtgtctgtagaattttaaaaagaaaaccccatttttgaagaaacacacaaccctgagtgataattacgtgtcagccctgggtaaaggtagaaatgtgaaggcttgtggaaaatgaggcagtaagatcaagaaaatcttgacacctttctttttcaacagtaccctcattgctcagaacaaaatttgaactttcttcaccaaagaggctgtgggaaaaaacaaattgaactctttttcttggaatttccttttgtaagaagtttattaaaaaaatttgtttttaacctaagtaggatttatctatattaaccaaacttagctacaaatggacttttgctgttctaaaatataaaaactaccctctccaaatgaaattgatgacgatgatagcttccatttgttgaggaggttttataatcttggtgttggataggtgctttatttacattatctcattgaaggctttcttttttttttttttcgtgatggagtcttgctctgttgctcaggctggagtgcagtggcgccatcttagctcatttcaacttctgcctctcagattcaagcgattcctgtgcctcagcctcccgagtagctgggactacaggcatgccaccatgactggctaatttttgtatttttagtagagatggtgtttcgccacgttggccaggatggtctcagactcctgacctcaggtgatccgctggcctcggcctaccaaagtgctggggttacaggtgtgagccactgcgcccggcccagcctcattgaaggctttcaaaagaatcttccttctcaggctttgaaggcagttttcagggggactttgcattagccatatcttggttacaggagacagagttgactgtgttctatgatctctgtttgaaacctacttctggtacaaataccaccattagtggggtgatggcaagtgtcagctaactctcaaacgtactgactcgaagaacccggaaggaagcatagaaaggtacagttggttttcagttcatcttgacgtaggagccacacgctgatcagaacactatatcctggttctgatgttttcgagttgacttttgttcttaggcaggctctccctttgaagtcaacgatcctggctttgtttattttttgtttttgagacaaagagtcttgcccaggccggaatgcagtggacgatctcggctcactgccaagttccgcctcctgcgtttacgtcattctcctgcctcagcctcccgagtagctgggactacaggcgcccgccaccacgcccagctaacttttttttgtatttttagtagagatggggtttcactatgttagccgggatggtctcaatctcctgaccttgtgatccggccaccttggcctcccaaagtgctgggatgataggcatgagccaccgtgcccagccagatcctggctttcttatatggcctttagtagctgtctcccaaagggtgaaactctttcactcagaattactatcaatcccttctgtcagaatccatttgataaagaaaaaagaaatctctgaaaacttacttggctctggtgggatcacatgcccaccctgaatgaatccctgcatccaagggaataggatactctggccagtgtggaccacatgcctgcccctattgtggttggagagagtatgataatgaaagctttctggggtacaggtgggtgtgagttctgctagcagaggagggaggcggggaagggacaccgtacaggcaagggcacatggccactaatcagctctaaaatgttttgagccatggtgttttgtgaaaatggcagcacagccccatgactgtgggtcctccactgttagtgaggaagactacttcagcagccacaaggacaagcttgagggcaggaaggccactgatgttgccactcaaacagtagcaaggagcagggcattagcaattcatagggcctagggtctgatctggagtccagcagtagctcccctctgtgataatccctttatctggtttccttacctttaagatgggggtgctggcctaaatagttttcttacctttaaaatggggatgctggcctaaatatttagaagccctattttttatttttaattaattttttgagatggagtctcgcccagtcatggaatctcgcccagtcatggaatgtgcagtggtgtgacctcagcttaccgcaacctctgcctccggggttcaaacaatcctcccacctcagcctcccgagtagctaggattacagtcatgcaccaccacgcctggctaattttttatgtgtttttactggagacagggtttcaccatgttggccaggttggtcttgaactcctgacctcaaaggatctgcccacttcatcctctcaaagtgctgggattacagtcatgagccaccgcgcctggccccctttccagtttttaaaaactctgaggcaaggaccaggtgaggtggctcacacctgtaatcctagcactttggaaggatgaggtgggaggactgcctgagccgaggagttcaagaccagcctgagcaacatagcaagaccccgtctcaaaacaaacaaacaaacaaaaaaaccctctgaggctgagcatttagtgtgtttgttaaacagttggcctttttacttttatggtaacacacataaatgttatatatgtgttaaggctagttaaatacatgcaaatggtaggtatgatatcaccaaatttgtgacccttatgtggtaagatacctgtactatattattcagatggacagtgagtaaaacaaaattgctcatccttaccagctgctgtttgtttctttttaatctttaagttttacatggacggatggcaaattaaacagcagtaacttggtaattctgtctggccaagtggttgaacactttgatctggagttccgaatcctgtatgcccagtccaagcccatcagccccaaactcctgtctcacttccagagcagcaacaagtttgatcacctcaccaaccgaaaaccacagtccaaggagctcaccctgggcaacctgctgcggatgcggctggctaggctgtcaagtactcccaggaaggcggacctggacccagagatgcccgcagagggcaaggcagagcgcaagccccatgactgtgagtcctctactgttagtgaggaagactacttcagcagccacagggacgagctccagagcagaaaggccattgacgctgccactcaaacagagccaggagaggagatgccagggctgagtgtgagtgaggtgggaacacaaaccagcatcaccacagcatgtgctggtacccagactgcagtcatcaccaggatagcaagctctcaaaccacgatttggtccagatcgaccactactcagactgacatggatgagaacattctctttcctcgaggaactcaatctacagaagggtcaccagtctcaaaaatgtctgtatcgagatcttccagtttgaagtcttcctcctctgtgtcttcccaaggctctgtggcaagctccactggttctcccgcttccatcagaaccactgacttccacaatcctggctatcccaagtacctgggcaccccccacctggaactgtacttgagtgactcacttagaaacttgaacaaagagcggcaattccacttcgctggtatcaggtcccggctcaaccacatgctggctatgctgtcaaggagaacactctttactgaaaaccaccttggccttcattctggcaatttcagcagagttaatttgcttgctgttagagatgtagcactttatccttcctatcagtaactgctccgtgttcagactcctggtttcttccaggcttacagtggacatcatcagcttcctgctttaaaaaatatcttatgtccctaattgcctttcttttacctgactttgtcacctttgttgtctttgaattctttaggctgcatattattttacatgctttgttttgtcatgtatataccaggtattggttttatggtttaaacactatggatacaggggtttgttttgcacaattttaatagtcatgcactacataatgatgttttggtcaatgacagaccacgtatatgttggcagtctcataagattataatactgtatttttactataccttttctgtgtttagatacaaataccattatgttacagttgcctacagtattcagtgcagtaacatgatgtacaggtttgtagcctgttttgcatttttcttaggttgtatgctcttctgttttaaaggtttgaatcaccagcatttttgtgatcaaaatcctatttagaaaaaataaaactactttctgtttatctctttagaa

SEQ ID NO: 24 - DNA, 1594 bp, Homo sapiens
acagcagttacactgcggcgggcgtctgttctagtgtttgagccgtcgtgcttcaccggtctacctcgctagcatgtcgggccgcggcaagactggcggcaaggcccgcgccaaggccaagtcgcgctcgtcgcgcgccggcctccagttcccagtgggccgtgtacaccggctgctgcggaagggccactacgccgagcgcgttggcgccggcgcgccagtgtacctggcggcagtgctggagtacctcaccgctgagatcctggagctggcgggcaatgcggcccgcgacaacaagaagacgcgaatcatcccccgccacctgcagctggccatccgcaacgacgaggagctcaacaagctgctgggcggcgtgacgatcgcccagggaggcgtcctgcccaacatccaggccgtgctgctgcccaagaagaccagcgccaccgtggggccgaaggcgccctcgggcggcaagaaggccacccaggcctcccaggagtactaagagggcccgcgccgcggccggccgccaggcctccccatgccaccacaaaggcccttttaagggccaccaccgccctcatggaaagagctgagccgcttcagactgcggggcaagcgggccgcggctcccttcccctcccctcccctcgcccgccttcgccgcccggcctcgagtccccgcccgcccccgctcccgtcccgcaccgcctgccgcgtcggcctcgggccctgccctgtccgccgtccgccctccggtagggttcgggccttccggatgcggcttgggcgctcttcggggacctccgtggcgcggaagacccgagcctgccggggggaggccggcggcgccgcacctgcccgcctcggcgttcgtgactcagccgccccatcccgagtcgctaaggggctgcggggaggccgcagcaccttctggaagacttggccttccgctctgacgcagggccgaggtgggcagtccaggccgagaggccggcggccctgaaggtgagtgaggccctcggcagctgcagccggggtgtctggtacccccccggcgtggtgcttagcccaggactttcagacgcggccgctggccgggaggctttggtgggagagacgcgatcgccgatttcggtctggcgccccttctgcggccgggacccaggcctttcacatcagctctccctccatcttcattcataggtctgcgctggggccgggacgaagcacttggtaacaggcacatcttcctcccgagtgactgcctcctaggaggacatttaggggagggcagaggcctgcagtttggcttcacggctggctatgtggacagcaagagtcgttttcgcggaagccgactggcagccaggcctgtcgggccccccgacgccgccccatttcccttccagcaaactcaactcggcaatccaagcacctagataccagcacaagtcggttaatccctgtctggactgagcctccgttggcttctgaactggaattctgcagctaacccttccacgactagaaccttaggcattggggagttttagatggactaattttattaaaggattgttttttttttaaa

SEQ ID NO: 25 - DNA, 6842 bp, Homo sapiens
aatcccgtgcggcgcgcacaggcaggaggttgcagttgggcgctcagcagctgtggcagccggttgaggtctggcagtagcgttgggctgaagcagcggagttcgccatggtaaggcccgggtcactcccgccccgcagatgcccaggcagacgaagttggcctcgggtggacagagggacgttgttgcgggcctgggcgctgagaggaggccagagaaggacgcagggtctagtgcgggacaggaggacacgggatcgtttcctggatctttgggtcccagggcagggacggcggcttttgttttagatgaagctgccggcctttagtgaacgggaccattgacggtgtcccgtcccccagagagcaaatagtggcgtcgcctcctgaagacgggagggcgctgctcccgcttcacacgtctttgtgctactcgaaacaactgaggagccccaggagccttcggtgacgggggttggggctgtggacattgatcagatgaggaattaaggctcagacgctgctgcaacattgccttgttcacctaaaggcaaccgttaggccaggcgcggcggctcacgcctggaatcccagcccttggggaggtggaggcgggcggatcacctgatgtctggagttcaagatcagcccgaccaacatggcgaaacccagtctctacaaaaaaatacaaaaattacccgggcatggtgatgcgagtctgtggttccagctactcgggaggctgaggtgggaggatcagccgagcctggaactttgaggctgcagtgagtcgtgatggcgccagtgcactccagcctgggccacagagaccctgcctcaaagacacaaacaaaaaaagcagcccattaacataacagattcccaagtcccaagtctgaatagctgtggtttgtcagttatcctttttttcctttctttttctttcttttttttttttgagacagcactcaacaaatgctgtgttgcccaggctggagcacagttgcaggatcacggctccctgcagccttgaacccctggcttccagcagccctcccacctcagccttccgagtagctggtactacaggtgtgtgccaccacacctggctaatttgtagatttttcatagggacagggactcactatgttacccaggctggtctcaaactggtcccaagtgatcctctcacctcagccttctaaagtgctgggattataggaatgagccaccacacccagcttggcagggtttaaagaaaccaccaaaggacagtgcagtgtcccagcactaatgacgtctgggagccattacaggcttcaaggggtagagagagggagtggttacaagaaattgggagggtagttttatgaagagggcagcctgccaaaagtgtggccttgagagggattcaggtcacccacagcagttgagcaggaaggggccaaggagggagtaccctggcactgctttctccagccccccagtatcccactgctgcctgccattgaccaaaccagcaagaagccagagggcgaggaaggcctctgatgctgttctcaagggtcagccttcgagagcacagagcaggtggtgaatgatggacggggtagaactggggggtagagagaggacacacactgagcacctgggcttggaccatggtgacctgggacctactctgtatttccttacccaacccgactaccttatcctttgatcaggacataatcaaaaactgctacatattcttcagagaattactgtgacgggctataatgtggggttgattattgacattacatggcttccaagttttaaaataacctaagttttgtgtagtggcaaacaggttctagggctacctctagaacttactagctagtatggtttacagcaattagttttcacagcgataaagggatcagtcactaaccctcctaggaaatatcgattgtgaaagcgccagatactgaagcagtatataaatattaaattagaatattttgcatgccatatagtttcaagttgccttgaaatgaatgggttcacttttatgttcctgttcacagcgcgagtgtatctctatccacgtggggcaggcgggtgtccagatcggcaatgcctgctgggaactgtactgccttgaacatggaattcagcccgatggccaaatgccaagtgataaaaccattggtggcggggacgactccttcaacacgttcttcagtgagactggagctggcaagcacgtgcccagagcagtgtttgtggacctggagcccactgtggtcggtaggtgcctgggcactggatggcagctttcctgagagggtgggagagcattggtaaagccccgtgtgggctcctttgaatcctcctgctgaaaggatgggatagacaggcatatgcccatggcattgttaggagagaaactgaaaggttcgtgatcaaagtgtctgtgagactcggctcctaatttaggaaaacctgacctacagggaaaagctgctttgccagcagtaagatgggctgtgaagagattccctcgtgcgtgcctcagccctgctcaggtggccctgcctgcagggtgcagtggcattggttccctcccgaatgctgtgcattctcttatgctggtgcactagagtcttgacctgcatcttaggcatagaaggtaagtacagaacagtcatttgcttccttcagattcgcagcctgatgtagtttccaaggagagctacaaagaggcagcacctttcagtggccccccaggagatgacagcatcacctgaaagcctgtgggacccaggtcatccagggtgccctgatgggactgccctgcagaagtcacactgacctggtgactgcccaggttgtaagagtttctaacttacagcctttgatgtagctacacgtaggaaagaattatgtacctgcgtaggagtgccagagcttatttcctttcactgggaactggttgtgctgacatttatacaacaagctgagtttaactttgtagagtcataaattgcatatgcagtttggttatcacacagagacattttctaccagacactgccactgttgacctatgacatgtaggtcatgtactttgaacagcatgtgctctgtagaagtgaacactcctggaatgtgtccatcttggtgagtacaggccttaaaaattcacagcacacactgtctcttttgcagatgaagtgcgcacagggacctacaggcagctcttccacccggagcagctgatcaccgggaaggaagatgcagccaataattacgccaggggccattacaccatcggcaaggagattgttgacctagtcctggaccggatccgcaaactggtaagaagagaaggtttcatgtggccattttcttgcatgggaggggtagttcttggaatgtgaaagggaagtcattttatcaacacttagaccagcatcttggccgggcgcggtggctcacacatgtaatcccagcactttgggaggctaaagcgggtggattacctgaggtcaggagtttgagaccagcctggcctacatggtgaaactctatgtctactaaaaatacaaaaattagctgggtgtgggggcacacacctgtactcccagctacttgagaggctgaggcaggagaattgcttgaacccggaaggcggaggttgcaatgagctgagattgcactactgcactctagcctgggaaacagagcaagattccgtctcaaacaaacaagcaaaaacttagaccagcatcttgagtcctactgagtctgcagtggtgatttgtccgtagatctttgcttttctttgcttcaaagtgtactgcatgtttattatggatgatttgaatccatatcaactctttagaggcaaagagaagcggccctggcttgttggaggttggtggtgtggcttccatgggcattggctcacgttgtgtggtttctctcaggcggatctgtgcacaggactgcagggcttcctcatcttccacagctttgggggcggcactggctctgggttcgcatctctgctcatggagcggctctcagtggattacggcaagaagtccaagctagagtttgccatttacccagccccccaggtctccacagccgtggtggagccctacaactccatcctgaccacccacacgaccctggaacattctgactgtgccttcatggtcgacaatgaagccatctatgacatatgtcggcgcaacctggacattgaacgtcccacgtacaccaacctcaatcgcctgattgggcagatcgtgtcctccatcacagcctccctgcgatttgatggggccctgaatgtggacttgacggaattccagaccaacctagtgccgtacccccgcatccacttccccctggccacctatgccccagtcatctcagctgagaaggcctaccacgagcagctgtctgtggccgagatcaccaatgcctgcttcgagccagccaatcaaatggtcaagtgtgaccctcgccacggcaagtacatggcctgctgcatgttgtacaggggggacgtggtccccaaagacgtcaacgcggccatcgccaccatcaagaccaagcgcaccatccagtttgtggattggtgcccgactggatttaaggtatgactgggtgatgtggaggcctttcagcaagcagcagatgcacaaaataacactggccctgaaggcccacatcctttggggagattatccctgttccatgggctaggcatgtgggcataaattagtgaaccagagttgataattgattcagtgatttctttttttttttttgagacagtcttgctctgtcaaccaggctggagtgcagtggtgcgatctcagctaactgcaacctctgcctcccgggttcaaacaattctctggcctcaccctcccaagtagctgggattacaggtacccgctaccacgcccggctaatttttgtatttttagtagagatggggtttcgccatgttggccaggttggtcttgaactcctgacctcaggtgatctgcctgcctcagcctcccaaagtgctgggattacagtcgtgagccactgcacctagctcagtgatgtcttttgaactctctgtctgagtcatcacactatatatctgtggtgagctttatttatttatttatttattttttgagacagggtcttgctttgtcccccaggctgtagtatagtagtgtgatcttggctcactgcaacctctgcctcccaggctccagcgattctctcacctcagcctcccaagcagctgggaccatagacatgcaacaccatgcccgggtaattttttttttttttttttgagacagagtcttgctctgtcgcccgggttggaatgcagtggcgtgatcttgactcactgcaacctccacctcccgggctcaagcagttctctgcctcagcctcccaagtagctgggattacaggcacctgccaccacgcctggctaatttttgtatttttagtagagatgggattttgccatgttggccaggctggtctcgaactcctggcctcaggtgatccacccgccttagcctcccaagtgctggattacaggcacgagccactgcacccagctaatatttgtatttttagtagagatggggtttcgccatgttggccaggctggtctcaaacccctggcctcacgtgatctgcccacctgtctcccaaagtgctggggtcacaggcttgagccaccacacctggcctgatgttgtcatttatagaacaagtttgctgatccctgctctagttgaccctgtgcactgcggccaggacctcaggtcatgttatgcccgagttctgaaacttggaatgcttcccctttggttaccaccttggaatgtcaccccctacttaggcaggcacatggaccacttcgaccacttcctgctgctgtggtagcagcattcatatgacccttgacccatgatctgctacctttgcatatccacagtggcttgttctgtgggtcagaagtgggtatgatgttccttgtgatagcatggggaagagttgtgtactctgaatctatctgggtggaagaagtttagctacagaatttaattgtaatctacaaagaagacaagcagcatacattttcagagggaagactgtcttcacctgggcacctatcacatgtcacaggtactaggacacagccctttaggtagcttgggatcccaccagggtggctacctccaaggttcctttctctattcctcatctggaactatcaccctgcctggtgcagagaagggcttagtgacgtttgtgaggtgaactgagcattctccgtgtcacctacagggtgtcttctgtttgaggaaaagtagctaccatttctaggtttgatataagcttcatggactgctttctttcccttctctggcaggtgggcattaactaccagccccccacagtggtccccgggggagacctggccaaggtgcagcgggccgtgtgcatgctgagcaacaccacggccattgcggaggcctgggcccgcctggaccataagttcgatctcatgtatgccaagcgggcctttgtgcactggtacgtgggcgaaggcatggaagagggagagttctctgaggcccgcgaggacctggcagctctagagaaggattatgaagaggtgggcgtggattccgtggaagctgaggctgaagaaggcgaagaatactgaggggagggtgtggtgggttctcccctgccacccccgggatggctgcttccaagttgtttgcaattaaaggttctgtataaaaccaa

SEQ ID NO: 26 - DNA, 4501 bp, Homo sapiens
tttcgtcggcccgccccttggcttctgcactgatggtgggtggatgagtaatgcatccaggaagcctggaggcctgtggtttccgcacccgctgccacccccgcccctagcgtggacatttatcctctagcgctcaggccctgccgccatcgccgcagatccagcgcccagagagacaccagaggtaagcagggcccggggtggcccagcagggaccggagctgggctgcagcttgggtgctggccaccaggcccgtgcactcccgtgccagatgcctgtctactcagcttggcctgcgggtaccaggaccctgggctagtctagggggaagagggtcggaggctggaactgctttcccaaccccgaggctccaaactccctagaacccctgacatccgcccccaattcccccaaacccatgaccccctaatatcacaaatgctttccaaatccccccgcaaattccttcatcccgaaatttccctcatcgccccctaaatacccaccgctaacccctgcagctccctaaactcccccagctccccaatccccagttccccagctcccaaacttcttttgccctcaaattcctcaagtatccccattgccttaagcccccaaattcccccaaccccttcaacctccaaactcccccagctccctaaacccccaacctcctccaaattcctcaacctccctaaattcccccagcctcttatatctcttaatatacacaacccctaaactctgccgtctccaaactcctccagcccccaatcccaaattcctcacccccaaactcctcaacctccagaattccccaatcccctcattcctcaaacttcctcagcccccttctcccccaagtgccacaaccccataaccccgcaactcactcagtccctcaataatttaaactctcccaactctctaaaccctaaattcctctgcgctccccaatccccttaaaatccctaagcttaccaacccctcaagcccaaatccagccccctaatcccccccataggctgccccggggcaagatggggtggatgacctgcccaggtcagcagatcagctgggccggggcctgcctgacatcccccttccccacagaacccaccatggccccctttgagcccctggcttctggcatcctgttgttgctgtggctgatagcccccagcagggcctgcacctgtgtcccaccccacccacagacggccttctgcaattccgacctcggtgagtcctcaccccactcagcccacacactctgccttggtttccctttcagtccagtggggctcaccatggcacttacctctagaatgattccactcgcccctgcacttcctctgctttagccacactggcatcctcacacttccttgagtactctgtgcccaagcccaccacaggatctgcatgctggctgctccctctgcctggtacactttccccccaggtatccacatgggtggctgcctcaaacgtcaccttctcaggatggccttccctggccatcctgtttaaaattttaacccctgccccttagtactcctgatctcctgttaaacagaaaaatattcagtgatacttgttataacacagtaaggaagaccatattcaggaccatggtgatgggtataggaaccactgcaatgggatcttgcagtcggtgggagagattgggctcaacactgaatatagcatgggccagtgggaatgtgtagctaaggagcagtgtgagggtctgtgggtggaaattactaagaagaaacatcaggggtaagggggattctggctaaaccgacgtaacaggattcttgctgaaggcaggccaaggggaatcagacatcacctgggggatggtggaagatgaagaacccagtcagatagcaaggatgatcaggtattgaggatgatcagagattgaggatgatcagagattgaggatgatcaggtattgaggatgatcagagattgaggatgatcaggtattgaggatgatcagagattgaggatgatcaggtattgaggatgatcagagattgaggatgatcagatatagaatataggggttcttgctaaactgacttagcaaggctctcggctaaaactggattttacaaggaagtgcacagatgggcctaggaggaggttcaggagcctgagtaaagtttggtcaagcaaagaatctttgtcagccccttacccaggtctgtaattccccattatacttaatgtctaacattccatatccttattttgtttgttcttagcctgtctcctcctggctagaatgtgaactccacaaggaaagggatttctgtgttttgttcactgttgtgtccctaacacccagaacaatgtctggcacacagtgggcactcccaaatatttgaggagtaaatgaacaaatcaatgtatgaaaatggcttaagcagtgcccggcaaagagagacactcaacatacagatgaatcaatgaacaaatgtgtaaatcactttgtgtgctgtctggcatccaataacccctatttatgtatgcgctttgctggtatgatgatgatgatgatgatgatcttatttttattggctcatgcagtccatttgactcatatttccctcctctcctgcagtcatcagggccaagttcgtggggacaccagaagtcaaccagaccaccttataccagcgttatgagatcaagatgaccaaggtatcccctgcccccgcctctttcccagcattttctaacatcttcctcctggtcaaaacagaaacttctggccactggttggtgcgagaaagttggctgtgatcttgggatgctatatgacttcagggaagaacctggagtgggaggattatgtcagtaaaagagacacttcccctcatccatcaacagatgtataaagggttccaagccttaggggatgccgctgacatccggttcgtctacacccccgccatggagagtgtctgcggatacttccacaggtcccacaaccgcagcgaggagtttctcattgctggtgaggcaccgtccccgcgccctgtgccacaccaaccagtccctggggcgcggcctagcaaccacgagggggcgaggctctgatgggaatggtcccactggaaatggggaccaccccaatttcagtctatcagaaggccgggcctttggcagcttggcagctcagccaatcacaagctgcttgtcggtccccgccccgcctttctccttaggaaaactgcaggatggactcttgcacatcactacctgcagttttgtggctccctggaacagcctgagcttagctcagcgccggggcttcaccaagacctacactgttggctgtgaggaatgcacagtgagtgcctggaccctgacctccaacgggagatccttcccggggccattccctaaatcgtgggcttgtttcttgctccctctggctattctgtgtccctgtggctgctccccaaccctaagggctgtccctgatctctcttgctatttccccaagcccgagactgctcccttacaaattctggctgctccctttccctgtgtccaataccgtgtgatcacctgtccctccctggtccctctaattctcccttgtgactattctgtaatcccactccccgttcctgagcccccgggattgtttcttggttccccagaatgttctccaagaacccaaagtgctgttccctaatcccactgacccttcctcagcacatctgcttgttgctctgcagctctgactattccagacaccagagggtgttacactgacctcctggctagtccaagcctgttccctgatggctcctgatggcctctgagcccagtgactatcttgaagccccactggctattcctgtgcttaaactccttagccgccaaccgggtggggccccttactactgccagtttttccctgtcctttgggacaattccacaggcgacctgcctgactgacccccagggcctattccccagccaccattccaggacactgatttactggcttactgttacctttcaggacccagtgacatttccctcaatgggaggggctgtcctggggtatgtacttaggtggggtgagagcaagtctccccagcggctcagtgttgaaagctgaggagaggaagttctgctccacgggggaggcagggagaagccctcagagatgtttccctcctcccttccaggtgtttccctgtttatccatcccctgcaaactgcagagtggcactcattgcttgtggacggaccagctcctccaaggctctgaaaagggcttccagtcccgtcaccttgcctgcctgcctcgggagccagggctgtgcacctggcagtccctgcggtcccagatagcctgaatcctgcccggagtggaagctgaagcctgcacagtgtccaccctgttcccactcccatctttcttccggacaatgaaataaagagttaccacccagcaga

SEQ ID NO: 27 - DNA, 17233 bp, Homo sapiens
gtggagtttgaattgggtggcggttgactgtagagccgctctctctcactggcacagcgaggttttgctcagcccttgtctcgggaccgcaggtacgtgcctggcgacttcttcgggtggtccccgtccgccctcctcgtccctacccagtttcttgcttccctgccccatctccgccgctccccgcagcctccgccgagcgccatggctcctaggaagggcagtagtcgggtggccaagaccaactccttacggaggcggaagctcgcctcctttctgaaagacttcgaccgtgaaggtaaggggccaggccgtcgcggcctcctggggcggtcgcgggatgctggcgggtggggacacgagctgcacagattcgcccgcccgtgacccgtgtcctgtcggctctgccctcccgcagtggaaatacgaatcaagcaaattgagtcagacaggcagaacctcctcaaggaggtggataacctctacaacatcgagatcctgcggctccccaaggctctgcgcgagatgaactggcttgactacttcggtaagagctggagagcttccctgggcggaggccaggagccccttggggttaggtgacacccttcagaaagggctcgctcagatgtcaccttttaatgagatctgacatgaccacttatggaaaattgcagaccctttcactctctgtctcacttccctacttcatttttctctatgaaaaatgggggggtggttggggggcggcgggcggggcggtctctgtcggacaactcagctctgctgtttacaggtccaaaacagctgtagtgaatgggcatggatgggctgtattccaataaaattttagttatggatacactgaaatgtgaatttcacataattttcacacatcaggaaatttatttaattttttttaaacagagtctcactctgtcacccaggctggagtgcagtgcagtgcagtggtgcgatccctgctcactgcaacctccaccttctgggttcaagtgattctcctgcctcagcctctggagtggctgggattacggtcgcctgccaccatgccccgctgatttttgtattttcagtagagacggggtttcaccatgttggccaggctggtctcgaactcctgacctcaagtgatccacctacataggcctcccaaagtgctgggattacaggagtcagccactgcgcccggccagaaaatagtatttttaaaaatatatgtatattttacccatttaaaaatgaatgaataaatgacatggttagttaaccagagctcagatagaagaataacccgaagcagctccttctgcagcttatggaaattgctaacctaaaaatgggcgcatcaggctgggcgtggtggctcacgcctgtaatcccagcactttgggaggctgaggcgggcagatgacctgaggtcaggagttcgagaccagcctgaccaacatggagaaaccctgtctctactaaaaatacaaaaaagttagccgggcgtggtggcgcatacctctaatcccagctactctggaggctgaggcaggacaatcgcttgaacctgggaggcagaggttgcggtgagctgagagcacgccattgcactccagcctgggcaacaagagtgaaactccgtctcaaaaaaaaagacacatcagttttcctggccagagaaaaatcccagcctgtttctgcactcccttattaaatgtccggagaaatgcaggaggctgtacttttctgctgggttgcccttttctgttttccttattattaactatccagcatgtagtctccttcctggatagaaatgcatggtctgctcacatattagacattgaatgatccttttgacttgcccttttatttattaagccattcatttgcttatttctccaaatactgagcatgtgtcagtcacagtgctaggtgctaaagatgcactagggaataaaacagacattgtctctgccttcaggaacatacagattagtagaaaagagctattagaaaaatccacatacaattatgtaattaaaagtataggtactacaaaggagatagaatagagtagtggtcagtgagcatattgtgctttctatgccagatgggcattgtaccaagtgttttacatacattaactaatttttcttcataactaataatatccctatttttcaaaatgacaagattaaggcacagagaaattggacactttgctcaaggcctcataagctagttagtgggatagtctgtttgaacccaggtattctggtttcatagcctgagatcttaactgttttacaagatactatgagagtttctagcaggaggttctaacctaactttttattctacatgtaaatctcacaaagaccttttcattcaacacgtttactgtacatctattgactgctagatttttgccagaagcaaaggatgtcatctctggaattcagtccaaggcagggatggacatttaaacagctttgagtagttattgggtataatgagggtgagcaactaactctacactttgcagcaaactgctgagatagaaaaataagcaggctgggcacagtggctcacctggaattccagcactttgggaggccaaggcaggtggattacttgagcccaggaatttgagaccagcctgggcaacataacaagaccatatctttaagctttaaaaaaaataattaaaaataaatttttaaaaaagaaaaataagcagagggcagggcatagggtggggattcatgcctataatcctagcactttgggaggccaaggcaggagtatcacttgaccccaggagttcaaaaccagcctgggcaacatagcaggagaccacatctctacttaaaaaaaaaaaaaaaaaaaaaaaagacaacctggacaacttggcgaaaccctatctctacaaaaaaacacaaaaattagccgaatgtggtggcgcatgcctgtagtcccagctacttgggaggccaaggtgggaggatcagttgagcccaggagacagccaaggaggcgccactccactccagcttgggtgacagagcaagactctgtctcaaaaataaataaaatttaaaatatattttttaaaaagaaaaataagcagaatttttggggtgatgtttgagctgagttttgaaggatgagttagaaatttgttaagtacggaggtgaatttcaggcagaggaaatacaaagtaccatggcaacaagtcatgagagtcagtggcacatttgggatataacttggagaaagaatagattagatggtgaaggtccttgaaggttagaccaagggctggaccagttttagaaagataaatggtactattaggcaagatgatttattgttaaaatgtaatagtaactacaacgttctttttaaagcccttggaggaaacaaacaggccctggaagaggcggcaacagtaagtgacctttcctattttccagccagtggttacttaagtctagtccagtccccagatccaactaatagatgcttactgtggaagaggtttcataaagggacatcatctgtttgtgtcaactgaaaaattagagttggaccagacactgtatacatgagacccagatagttctgagccctacagaaggtggcagttctgtttttgaccaatttcttgcagtcctttgttctgaactctacagcggaagtagaaagcctcaagcccaagttcctttaagcgcctgagtcattacactatgcattggcctgctagatgataaaggtgtttcatcatgtcgtactgtagaagcagtgcttttgcttgggatgctcagtattccccaacccctctcatctccttcctcccagcatcagtgccaggattgaaggcagtaagatggggatgcaaaatagagcatttaaagctgcactgtccagtgtagtagccactgggcatatgtagctatttcagttaattacaattaataaaattaaagaattcatttcctcagacatactagccacattttacatgttcaatacctacatatgactagtagctactccatcagagagcacagaaatagaacattgctactcttgcagaaagttttatgagacagcattgggaactagtccatacatgggcttcacagagtccctaggcactctaaaataatatacaaacaatgcgtgtgtatgcacgcatttgtgtatctttctgttagtttattgtagccttgatcagatttacaaagtaaaccccaaaattacatcttttgttgagttgatcagaatcatttggaatatcagggtttgaaggagtctgaccaccaagggcacatagcagatctccgccagcttcattcagaaggtaaaggtaatgaggagccaattatcaatttggaaaaaattggagcatttgggagagaggtggggattattcacccccctacatacactgagctccaatgttttaaaagagttacctctgagatgaattatgcttactagctaatgcagttctctctttttaaattagaaatacagaactgcaaatgagaacttctaatgtaatatgagagagccattgttaccacaccaagttgagagaattctagccttgactaatatgatttaaaactccagaaaggaacgatagaaaatctataaaagctcttagttgggaagtgtgttggggctcccaagaccacctccaggtttggtgattcactaggaggattcatggggctcagcatacagtcacacccatggcgatgatttattacagtgaaagtatacaaagcattaatcaacaaaggagaaaattgcataggacaaagtccagaggaaaccaggcttctaggagtccactccctgtagagtcaaacagaacatgcttaattcaacacatatgaaatgctgtctaccagaaaatctgattagagagtcaatgcccagagttttaactgggggctgctcacataggcatcctctgcctagcacatgtcaaaatcctagactttcaggagggaagtaggtgttcagcatgagccatattgtttgcataaagtttaggcacagtgaggcatcttgttaaggaaaggtgggaatctttctgaaatcaagttcccagatgccaaccgaggccaggcttgcaaacaggcctttctatgtgtatcagtctcaggcctgctctgttaactgtcctgcacagtagatgcccagtggcctgccaccactgatgactccataaaatgccagttgtttctagagatggcagaaggttggcaggaatgcccctactttctgttgcatcaagcctggcaaacatcagtaacttattacagccctatttcttgctaagcctaagacagcctcagaatccttctctgagtatgtcaagcagtccctaccagaaatgaaacctgtgccattccaaacctgtagtaattattctgatgtttacatgtgttctataaggaaaggactgtgaatcatgactgctctttgtagtgcccatacttattaccatatgaaaaaaaaacgaatttgaatggtgactggaagcctttttgaaggacccaggatcatcatagaaaaccttattgagaccctgtagatttatcgaaaaaatggtaagcttgacacaccaccaagtgttgtagaggatgtagatcattaggaacttgtattgtttgcagatgggctgtagtcaagggtaaccactttgggaaacaatttggcataatgcgaaggctgaatatttatgtaacctataatccctgtcatgtcctatccaaaggatagagccaaggggaaacttggacatgtacctcagacacatgtaagacagttcaaggtagcagtgtttataatagcaggaaactattgatggaagatggacaaatccattgtggtatattcacacagtgggatatgatatagcaatgaaaacaaattaactacaaccacaaagagtggtgaaaacagccaaaaccaaacaaaatgcttaagtacacacttgtgaaaaagcacatctgtgtgtgcacacatgtatacacacatatgcatgtatctgtgagcacatacacatgtacctttcgataaagcaagtgcaatgatatggttacccctggggaatgaaggattaggagactcatcacctttggaagaagagataagaaaatggaacaaggaatgaatacagagccagaagcaagttattggcaatgttttaggtcttgggctgtgtggtgggtttatgggagtttgctatattgtatattgtatcactaacatttaacagtcttatgtattaaataatagttttaaaaaagtttttatcttgaaatattgttcctcatattttggtggaataagcctggtgctttctggctatgtttgtcataggctgacctggatatcaccgaaataaacaaactaacagcagaagctattcagacacccctgaaatctgccaaaagtgagtacctttcaaaactccttgttgtacagaaagaactgaggctcaggttgcttggttggctgctcaggcagcgccttgttggtagagcctcttccctttaatgtctggttcttaatcttgtaaatccaaaaacttgcttttggatggtgcatttagttaattttttttcccccgaacagcaattcaaaccagaaatttagttaattttaggcaggactgctaaaaaccaaactcaagacccgtgtgcgagctaaaatgaaagtgaaaaaaggggggaaaaaagctgtgctagaaaccaaacattgttgcctgcttactttctcctgggttaaatagatgacaagatttagagaggtgttaaaagactggtaacaccaactgagacgctccctgatgtaatcaacaaagttgaaagcgaattgaaaaaggaatgactttctctgcatataattcaaaattactcaattcaggccaggtgcggtagctcacgcctgtaatcccagcactttgggaggccaagctgtgaggattacttgagcccaggagttcaagaccagcctgggcaatgtagtgagaccttgtctctgaaaaaaaaaagaaagaaagaaaggaaaggaaaggaaaggaaaggaaaggaaaggaaaaaaaaagttactcagctaggcgtggtggctcacgcctgtaatccaagcactttgggaggccgaggtgggtggatcacgaggtcaggagttcgagaccatcctggctaatacggtgaacccccgtctctactaaaaaatacaaaaaattagccgggcgtggtggcgggcgcctgtagtcccagctacttgggaggctgagacaggagaatggcgtgaacccgggaggtggagctggcagtgagctgagatcatgccactgcactctagcctgggcgatagagcgagactctgtctcaaaaaaaaaaaaaagttactcaattccatgatctatccacataaaatcatcttacatacatgtcccgcactctgagaaacactgtcttataggaaaagttgtatgggaaaccaggttttgactagtgagcaaggaatcggatcaggatgaattgtgacatggacttaatgtcactgtcattaagctatgatagtttgatgcatccaattcttataagaacatcctgacccatggccaggatttcggggctacacaccagggcacgctctacagtaggcagggcaagctcaattattcagaatgctgggctgtccctacaaagcatcatatggggtctcttaacactctggttagtttcctttgtctaaaccctctttcttaaaaagtcttctttatttttagtccatttcttccttgcagcttaagattgtgtacattttattcctataagaaatgtgaatgcacaaaactttattttcatcagaaataccaccctgttgaaactgtttcttacagcacgaaaggtaatacaggtagatgaaatgatagtggaagaggaagaagaagaagaaaatgaacgtaagaatcttcaaactgcaagagtaagtggacactgaggttggaggctgggggttatcacaagacaagcaaatacaaatgcataaaatacactgttgtacaccagagctcacagtttagtagagatgatcctactttacatggcaatgacaaaagagataattgactggtgtgcaaagtgtgtagaacacagaagaggaagctagcaagcctcccctaccccactaggacatagacaggcctttcaaggtgagtgagagtctactagctagagaagaaagggaagaggaacagtattcaggatagatgggggaggcggaaaactgaagatgaggaaaccagttagaagcctatgaattcttgaactgacatgctgacactatagaatgaagggatggtttttagataggttttagaaagaagtggcatggttggtggagaaaaggaggaatcagagacaactgcatggtttctagctaaggcaaatgctatccagtgaggtgtgggacccaggtggcagagggtgctggactgggggtggtggagcacatgccaattgcatgacatgttgaccattcattacttttccaggacatctaggctagacagaaatttcagcctggagctcagggagaagagggagatttgagagatacactgcctcccagatctttaggtgtttgtcccagtgtgggagtggagatggttgtgcagggagagcaggaagggagggagtcagggtggacactagagggagggtagagagaggagctcctaaggcagactgccaaggaagttagagaagcaggaaagacagatccatcacggaggacaagggaggagagaatatatggaagataaggagtgattcttgccagggacctcccaggccccaggaagggagcactgcagggtttgcctttgattgggcacctgggacgccctgagtgaccttcacagcagccctttatgtaaagtagtggggtacaagccaggctgcaatcagttcaaaagagatttacctttaatcttggtcaaaatcctctattttgaaaacccagccagtggaagtccttattcaattagttatgttctgaactttttaagtcattgaattctgagatacaccttattatatttagtattaactatccaaagcttgttcttaatgctttaaaaaaaaaaaaaaaaccctccttaccttcctctttgctgggttttttgtaaccttagtctcatttgattgtgactgcaggtcaaaaggtgtcctccatccaagaagagaactcagtccatacaaggaaaaggaaaagggaaaaggtagtggattttctaaagttgtggtgttttgggttttattggagagccatatatatcatggcagaaagtgaggggcagtgaaaaggctctggtggctagtgtttgaaagcagcttaaaatcactgaatccttgagtatccaagctggaggggtctctagaaatgacctaaaccaaaaccatctccagtactttaatgtacattctctatccttccccacttttttttttttttttttttgagacggagtttcaatctcgttggccaggctggagtgcaatggtgcaatcttggctcactgcaacttctgcctcgcgggttcaaatgattctcctgcctcagcctcccgagtagctgggattataggcatgtgccaccatgccggctaattttgtatttttagtagatgcggggtttctccatgttggtcaggctggtcttgaacccccgacctcaggtgatccacccacctcagcccccactttttttttttaagtatagcaagaactgcctgttatgtttcagttcctgatagtccatatgtagagctaccccatagctcgtcatagagtggctgtcacttacctataattggtttcttgaaatgttttgtccagtcctgcaaagtgaagaacctctatgggcttgagttgattatactggactctaccataagccatgtgggggaaggtacagcagcttaggagagtagtcaccgggatgcatgtctgtggaggagcgaactcatttctcttgagcagtgcagcagctgcctggcacaaggacagaattccagctgggggagccttcgcatgaagaggctgtctccttgattaaaaagtcagattctgaggctgagtgtggtgtctcacacctgtaatcccagcactttgggaggccaaggcaggtggatcacttgaggtcaggagtttgagacccgcctggccaacatggtgaaaccctgtctctactaaaaatacaaaaattagccaggtgtggtggtgcatgcctgtagttccagctactcgggaggctgaggcaggagaatcgcttgaacccaggaggtggaggttgcagtgagccaagattacgccattgcactccagcctgggcaacagagcaagactccgtctcaaaaaaaaaaaaaaaagtcagattctggaggcagactactttggttcaaagttttggctccatcctaattggatatgtgatcttgggcaagtttttaaaacttgatgcacctgagtttctgcatctgtgtatgaggatggcagcagtgctggcctcccgtgttagaagggtcacgtgagtcgatgtgtgcgaggcgcccggagcagtatctcacagtcagctctccacgtgtcactcctctgctgctgccttcgtggaacctgagagttggcatacctgatggccatttcttacctgtaggtcaagccgtgctaacactgttaccccagccgtgggccgattggaggtgtccatggtcaaaccaactccaggcctgacacccaggtttgactcaaggtgagtatcgagggaaacacttggatttgatgggactccaacattgagcactacccagagaaggagtgtctaagaaaatactcctaggccaggcacggtagctcacgcctgtaataccagcactttgagaggccgaggcaggcggatcacttgaggtcaggagttcaagaccagcctggccaagatgatgaaacgctgcgtctactaaaaatacaaaaattagttgggtgtggtggtgcacgcctgtaatcccagctactcaggaggctgagacaggagaattgcttgaacccaggaggtggaggttgcagtgagctgcaattgcaccactgcactccagcctgggcaacagagtgagactctgtcttaagaaaagaaaagaaaatagtcccgagtccttggcctgggatgccttgtcagaggacagtggccagctgggtttcctggtgtatgcctctcccttaagtgtagtttcacctatcttcagtggcaaaatgattctttaatgggagggaggtgaatattctgcctgtgatgactaggaggcctctaggtgacgtttttggccttttctgattcaaatcagaaggtttttattttatttttaaaatatttatttattatgaggcagggtctcactccaatgcccaggctggagagcagtggcacaatcacggctcactgcaaccttgacttcccgggctcaagtgcttctcccaccttagctcccaagcatgccaccatgcctggctaattttttgtttttttgtagcgatgggatttcgccaggttgcccaggctggtctcgaactcctgagctcaagcaatctgcccacctcggccttccaatgtactgggattacaagcatgagccatcacacccggcctcaaatcagttttttaaagatgagtaggcactctcctgtactcttggtagaagtaaaaattgatactgcttttttggaggctggcataagcgaggatattcttgcagcataagttaataccttccaaagaacctagttgaccaaataggagatgctgtatagccattaaaaaagactggatctgtgtgtgctgacagggaaagagcaccgtgatcacagagcatctccgagcaggttgctgaacactgtgctgtatgatcccatttggttttatatacatacaaagtttctggaaggatagataaggaattcagagtggttacccctggggaggagagcaagaagtggttatctctggtgtggggaagtgttgaagatttattttctacttttaattgccactttttttttttttttttttttttttttttgagacggagtctcgctctgtcacccaggctggagtgcaatggcacaatctcggctcactgcaacctccacctctcaggttcaagcaattctcctgcctcagcctcctgagtagctgagattataggtacatgccaccatgcccagctaagttttgtatttttaatagagacaggattttgccatgttggccaggctggtctcgaactcctgacctcaggtgatccacccccctcggcctcccaaagtgctgggattacaggtatgagccacggcactcagccagttcccacttttctttactgtttgttttctcacatgaatatgtaacaaaaggcatttagggaaaactaggtagcagtattttaactgtcttgagaaattagtataatgatgtaatatctaaatcatcctcctttgcctctgaaaaattcctcttgatggaagcagccacgcctggaaacaattaaccagcgtatttctggctttgtggatggatggatgatggcacccatatggagctttggacctaaactttatgtggataagagttggctttttgtaagatgtatgttcaataattacaaccttctttctccagctgtgtttagtcattactgctttaaaacattttttttttctaaatttagaacgtgctttcttaggaatgtatgacttaaaaactgcaacttgaggccagagtaaggttaaaatggcctatagagtttggtgtcatccaattgccaagctatcttcacagagattttcccattctagggtcttcaagacccctggcctgcgtactccagcagcaggagagcggatttacaacatctcagggaatggcagccctcttgctgacagcaaagagatcttcctcactgtgccagtgggcggcggagaggtgaagtatttccaagggaagccaggccacagtgtgctgcttagtcaagcatttcttttccctgggccctcacccacgcttcaccctcagagtcctttcagtgcgtgggtcctgatctccacacttctgcgggactcagaacccagttttctctcccaggttagaggcccagactgcaaagatcgttgctcagctctgggttctgtttttctgttttttggttttgtttttgttttttgtgggttttttttttttttttttgagatggagtcttgctctgtcaccaggcgggagtgcagtggtgcgatctcggctcactgcaacctctgcctcctgggttcaagcgattctcttgcctcagcctcctgagtagctgggactacaggcacacgccatcatgcccagctaacttttgtatttttggtagagatgggggtttcaccacgttggccaggatggtctcgattgcttgacctcgtgatccgccctcctcggcgtcccaaagtgctgggattacaggcatgagccaccgtgcccaccttttttttttttttttttgagatggagtctcactctgtcgcccagcctggagtgcagtggcacgatctcagctcactgcaacctctgcctcccaggttcaagtgattctcctgcctcagcctcctgagtaactgggactacaggcacatgccaccacacccggctaatttttgtatttttagtagagatggtgtttcaccatattggtcaagctggtctcaaactcctgacctcaggtgatccacacacctcagcctcccaaggtgctgggattacaggtgcaagccaccacacccggcctccatctgttcatcaactaacatttgcccatccgattgtagtaggcccaagaagtagacatggggcctgcccttagaaagcagctcagtggtcaagatgggtttgcaatcatggtacctgtgatatgcgcaataatagagatgttaaagggtggtgcagaggagggcaccaccgaggtatgcgcttagtctagaacccggaccatgagctgtgccttcagctttgtataacttaagggattctgaagcaagctgagctcagtgtctctgggctgcatggagcgagttgctgacctcagcccctgtgaggggaggacggtttgtttcagacatactctgcagggcatttcttagatgatgtgcgtgccttttgtgcccaggtaatccagcctccaccctagtgatagtgctgatgaagtcattgtctccttagagctaatatccttcctgcctgtcttgccacttctccatcccagccattccccaccactaagtgcaggatatcaggggaacctaggggttccggccctaagggccatggccagtttaacccactcccctttctattcagagcctgcgattattggccagtgacttgcagaggcacagtattgcccagctggatccagaggccttgggaaacattaagaagctctccgtaagtctcatattcatctccacacataggatgcctccagtagctttcttgggctacctttatttaggattgtcttttgggcctgggctaatactttctacttaaatttgtgttgtcttccttcccccaagagattttgactcttaccctacttagatagcagcagttctgttcctcagttgatgttgagttttgttcaatcccagggtgcctgccacagaagttccactgcaaaatcaaaattctgcctcattcaggcagttagtgctaggggtatgttaggtcactattggccaccagaaagtgaaacctagagtagctcaagaatgagggtcggggcttgttatcaggaatcttacagaatcaaagagcgagctgaacggccaagcctctggagtggtggggcccatcagctggggcctgtgtgctcatttctctcacacatcttcattcctccctcagcagataaccttctccacaggctccaggttctgtgcttacttaacattgttttgcatgtggctttgagtaaccacacctccaatcccaactttattgctctattgcccaattgttcaatttcttgtcttggtttaaattctgaagagggccaggcacagtggcacacacctgtaatccctgcagctcaggaggctcaggtgagagaaattgtttgagcccatgagttcaaggctgcagtgacccatgatcgtgctgctgcactccagcctgggtgacagagaaagacctcagctctaaaaataaagtaaattatcaatttaatttaactgaagaatgtaatggctccgccagggatgaacctccttggtctggtcagccatcatcttgggtggtggatgaagcacttagtgtaaacatggcaaccttaccctcatccttctgtggggtctgaagggtacatccaaggaaggggacaaggcggggctggtttcctaaacctgtctttctgaacataggcccagtgctgagatcccacacacacctagccacccaaatcttgtgactgtcatcctctagctagatctattgcaatgttcttctcaaatctatgatacctttactgtctcacttgagttgttattttactcccttgttcagatgagaaacaggttcagaaaggtgaattcatgtgtgatacagatagagaatggaggggctcaggctgactgtgggaggccaaggggcaagcctgccaagtgacatcttctacaatgacctctctccttttctttttagaaccgtctcgcccaaatctgcagcagcatacggacccacaaatgagacaccaaagttgacaggatggacttttaatgggcacttctgggaccctgaagagacttcttcccttcaggcttattgtttgagtgtgaagttccagagcaaggagccatgttcctctaagggaattcaggaattcagacgtgctagtcccacaccagttaggtagagctgtctgttcaccctcccatcccagctgatcccagtcactgcttgctggggccatgccatggaagcttcccatcagtctcccagctgaatcctccctgctctctgagctgctgccttttgcctcctgcaactcaacatcctcttcaccctgccctgcctgcagttgagggggcgaagaagaaccctgtgttctcaggaagactgcctccaccaccgctacccagagaacctctgcatctggcatttctgctctctatgcttgagaccgggaggtttaggctcagataagtgagctctgggccatgagagggtaggtccagaaggtggggggaactgtacagatcagcagagcaggacagttggcagcagtgacctcagtagggaacatgtccgtctaccctctcgcactcatgacacctccccctaccagccctcctcttcctcctcctcctcctcctgtgggaggtggtcagtgggacttagggatctttcacctgctgtgcccagtagttctgaagtctgcttgtggagcagtgttttatgtttatccctgtttactgaagaccaaatactggtttggagacaacttccatgtcttgctcttctacctccctagttagtggaaatttggataagggaactgtagggcccagattctggaggttttatgtcattggccacagaataactgtctctaagctatccatggtccagtggtccctgccaagtctgtagacttcagagagcacttctctcttatggggttcatgggaacaggggtgggtgtgacttgcttggtggcctcattccatgtgtgcctgtgcctggggcatggactttgttaagcagagtcagcagtgaggtcctcattctccagccagcctctctgccctggagaatcatgtgctatgttctaagaatttgagaactagagtcctcatccccaggcttgaaggcacatggctttctcatgtagggctctctgtggtatttgttattattttgcaacaagaccattttagtaaaacagtcctgttcaagttgtattcttttaagttcttttattctcctttccctgagatttttgtatatattgttctgagtaatggtatctttgagctgattgttctaatcagagctggtacctactttcaataaattctggttttgtgttttcttttgtaa

SEQ ID NO: 28 - DNA, 17727 bp, Homo sapiens
ctatttgagtttgtggcgcgcgaggccctgcagtccgggttggcgcttgggtactggctgggtccgatgctgggtacgctgcgcgccatggagggcgaggacgtggaagacgaccagctgctgcagaagctcagggccagtcgccgccgcttccagaggcgcatgcagcggctgatagagaaggtgcggcccccgccggtccgccgggaggggaggcctgcgtgtcggagtgaggctgggaggggacgtaggacgggaagggaaggggctctgaggactcggagcgggggttggggaagcgggactggggcttggatgcggagagaaggtggaggcggagctgggggctccggagagggaaaaaggaggcagcgccgaaggcttcggtgcggggacggggaggaaagactggggcctccggaacggggagtggggaagcaggcctggggctcgggtgcagagaggagggtttggtggggctgggggtgctcctgagtgggacgagagaggcggagttgggggctccgctgcagagaccgcgtttggggcgccccaggccagactaacggcctctcacgggctggcgccgcctcctcccgggtctggggcccctcgtggccctggaacctgacaggaagccccttcctcctccgcagtacaaccagcccttcgaggacaccccggtggtgcaaatggccacgctgacctacgagacgccacagggtaagggtcttccccaccttctgagtattcgggtgaagagtgtgaatggagtagttgaaatgctgtccctgctctcttaagaagtaaacattgttcacctaactaataggaaccaaaacattggtgcccttaaacctgtaaattacttgaattacttattagaacaattcctgaagagacataggtgcctcctggctcacatgcctccggcttaccgggttggcatccccgctggccacctccccaccatggcagcgtggggcagttgcttagctggactggtctcagtgtcttcatctgtgaaatgggaaggatgatgacaataatgtctcctgggcgtgggtgttgtaacagtcacgtacaatccctatgaaactgtgaacagtaccccgccccgcactgtgaatactcacattgactattgtttgccctgtttaacttggagtagtaactgtcttccttgaggctccaagtacttgaatagggaggagaaggcattccgtttaatagttaatgtaaacggactgaaatcttgtggattctttttggtaaatagctggtgacactttgcactggctggggtcaattcctcccatatagctttataactaactcagtatcacttaatgaaaacaaacctcagagcaagttctatgttgcattaaacggacacagaaggttcacaagatctgctccttgagttaaaagaaatcctacctttctgcctttatagccaatccagacacatcttgggtgaaaagtttacacaggcagaaactaaaatattccagtggcaggtctgctaccctttggtctctgtataacatgtagattgcccttagaaagcattcattcagtatatgggatgtagagattgcctgcgaaaagtgcttactccctctatatggtatatagattgccctctatatattttaaggacagtcgctgtcatatgttccttgttttcatttaactttttgggctaatgatgtaatttgatgagccgttttctagtaggtaggagagatttccatgaatgacgaatttgccttaaaaacctgaaactttacaaagaggaacaatcgcagggtatcagaaacctggcttggttttaatattgtaccttttttttgcctgtcactttggcatctggtgaacacagattgagcagaagttcagcgttcaggattatgtaaatggtcatttttgtttcttttcttcaggattgagaatttggggtggaagactaataaaggaaagaaacgaaggagagatccaggtatttagtgtcaaattttattgccaaataaccttgctgtggaggagtattcatatgaataaaggtgtgggtatgcccaacctctgagcttacgcagaggccaccacggggcactttttctcatgattatactctttctgtttttaaggatttagaagcatttcttctgtagcttgtcaagtgcaaggagtcactgtgtaatatttggcctttttcatcaccctgtgtttcctgtgtcacaggctgaggggctctgataatacatgtgcagaggctgggccagttgggtaaccctccccaaggtcacgtgccagcccagcgaggcactcactttgtttgggtccttacagaaaataccaaatccagttccttctagggaagaagaatgtctctcttcctgttttgaaaggggaggaagagagatgaggagaggtgcagcctggaggatcacacatctttccttctgcatttttctaccttcggaagaccctggcttccctgcctagttgatccgagggtgttgtcgctctgagacccgttattttagtggaaggtgctgttggcctttctacgggggcatccaggagcccttttgccacagtggcttttgccaggttatctggtattcagttaatcactgcctctcagatgccacatggttcctctctgtggtcacaggtcaaggaacctgtatgaaagaatgaaaaacatcaagatcaatgtgacgatattaacagcaaatttgaaatcaaatcttcttgattaattattctagtcataaaaatgttaaaagtacatacaactacataaatgagctgattcctctctgcaaagatggtcactaatgctattttagtacaatgtgattccctataatacatatctttataaatgcatttttttctccctcacttttccggttaatacatctggcaaactcttctcttcatcaactgttgtataattataaaattatataattatttaaaaaatcatgtttttttaactgctctcctgttgataggcaattagctatttgtggcttcctttattaataaataagggtcagcacactttttccacaaagggccggatgatacatattttaggctttgctggctctatggtctctgttgtaactactcagctctgtgttgcaggaggaaagtggccgaaaataatatgtaaatgagtgtacgtggcagtgttccaataaaactttatttataaagcctctgttagaaatggttttcagagaaaatcccggtccttgtctcttcccaatactgatagtcccccttttcgataaatgctgagaagtgggattatcgggttaaagtatatatactctttgaattatgcataatacagatgtccactcattagaccagtgcttaatatggtcctggtagcaaaaagttttcatttaaagatttatttaaggtttttgcttaaaatgtaggaggaaccctacctgggtctccagaatcttcagaccctttcttgggattaggaaactgggcgtagcctgagatttcagcggggacatctctgacttcactgtaattgctattggtgacagtgtccagatccgccttcaccttttcccagacgacttggtgctcctgccgccctggaggctgggggaggctgtgggccctggcaggccgggtgttgacctgtgctgggttggttataacacaatgcctgggttctgtttgtagctaccagagctaccacatagtttggggttggtgtagatcgtctgcttctctgtgattctcaaaccaggttctgcctcagacacagccacaaaacaaccctgtaaactccaccttacgtgacggtttcactggaagcaaaggttctgatattctggaagtgggcttcagttaccctgtagtgctcctgggtagccccaagtcctctgaaccctcagagttgacacctgaggaccatccctaacggtataggcctcgccaccttctcacgccctgtttttataaggctgggtggttcctaaaatattaatatttcagccaatctggtatcctgaatgcttgaatttcattactgagaacccaccgatgccatgctctgggattattcgtggggcctgctatagagcaggctctggagagctgaagcaggcctgaccaggagtgtggccgcccgaccacctctgcccaccaggtatgagctcctggtcaggacaagcagctgcctctgtgcgttagcttgggcttaaactggctcctccccgccttaaatactccagcatattctttaaagatcacaggaagttgcccaggggccacttgcctatttctctgttctcgctgatgacctcaggacaattttgttctgtttcaatttggctttttgtttgccccagtccctgtcatccctgggccactgttaggaggtgtgagcttatctgctcgtgcctgggcccctgactttccctgctccttccaagtggctttttaagtagcagcccccgctgcaacccaggggagcctcagctccttcctacgctcttgaggcctcttataaagtggacatgcagggagaagagaagccttgtggcaggctcttgctgtctcctgtgttaacagaaggattgcagttttattattttgcggtgactttgaaatgtgctgtcactcaaacaaccatgtttttattggcttctgcacttggaggactcctccatgaagcccgcggacaggacagatggctccgtgcaagctgcagcctggggtcctgagcttccctcgcaccgcacagtcctgggagccggtgagtgttgccttcgtcagagaactgaagtcaggagggaccaggtctgacgcacctgttacaacagcttaaagcctagattcctcagtagtgaagtttttattttttctaaggtatatcttaaaaactaaaatcatgttaaagtaccctgttgattccttctgagctctgccttgcccacagttacatccggtgcctgacatatgaatggtactcaggtgttttttgagtaaataaacatgcccctccatgtgaaaagttaatatccagatttagtaagacttaagatttgcccctacagggtggtgttgtgaaccctcacttctatagggcagcttcccacttcgtcctcctaggaggctccttccttttccccaggccagtctcactgcccacccccatcctgtcctcttttctagggaatctgtccctcaccccttccttctgtcttcagtctctgtcccctggatccatccgtcggtatttagatgcgctcagactcacgttagatacatcagacccttcgtggctctcccctgtcctgggccccttccttgccacatccctttgcccagttccctttaccaccagagtgaaataacctgctccgtttggtgccatggattccctaccccaccaaccccgtgtgttcctcctctcccgactcctttcggctccatctctaaagcccaactctgggtgaggtttctcacaaccccattgctaaatcctgttagcattctttgggttttattctttgggttttgcgctctccattgcatttaaaccttccagaagttctggcctgggcctctgtggccccctgctcctcggccccatgctcctccagttttcctccttctgtcttcgtccttccaagcctgcagtctgctcgcctcccgtccctgctggatgccctttctagagggtttgtttgagctgcctttgcccttcccccaggtggagccatggcttctctgtgtgctgactgtaacctccagccagaactcaactgggggcgttttactgcccagcagcccctctgcttcaatacttcatgtccagacttggcacagctaagactcagcccgacagacaggctccccatcttctgctctgcgcctcagtacaggcccctgccgtcttccctctagcgttagccagaaacccaggatcttcatctcagcctctgcctcattcctcatggccaaggcatccctgtcctgtgccttgtgcttcgttagctctcatgtccccgctgagcaccagcctccaaccccacccgggctccctccgccccactgacgcccctgtgaatgtggtcaagccgcttctctgatgcaacacgtggcttcccattgcttttggggtaaaaggccagaacccagaatggggcctgaagtcctgcctgaccgcatggcctccttgctgcccccgggaagcccctgtgatccccaggctggaacagacccccactcttatctgagctctttagacctgggttcctctgcttgcgaaacagttttgtcactagcctttaaacacctgtctctcctggacactggccttccgcagcctctgtccccctctgcccagtccctttcctggcaccttgcctacaccaatagttagtgatgggtgttgagtcgctaaagggaagctggtggtctttcagagtagaattggaaagctcttcatgaggatatttacctgtggtgctatgtgtttactgctattaatccagattttaactataaatccttaggtccatgaatttccccaaccgcttgaaatcacaggaaatagttatttgatagatgtactgcccagtatggcacccaccagccctctctggatgatatttaaattagttgaaagtgaaataaaatttaaaatccatttcctcagccttactggccacatcccagctgttcagtagcccggtgtggctagtggctggcctaggacagcaggcagagaactttccatggtcaccggaagttctgtcgagcagtgctgggcttgagcgtctcaacttccaggctcagaggccatggaaagctggaggtggtgcagaatctgcctttcctcactccatggccccaggcagtttcccattctaggggttctctgggttactaagaaccacgggcagccgtagatggctccagtgggtgcacccttgaagcaatggggatttttactgtacaacttactcgaagtgatgccaaaaccatccttgagaggaaaatgcactccttcctgaaaatcctgattgagatttacttgtttgacttttagattcaaaaagcggtgaggtcgatgccacgtcagaccaggaagagtcagttgcttgggccttagcagtaagtgctgcctttagtaatgaatggacagagggggcgcttgggggctcaggggtccatcaaagcccatgtggcctgaggcgggcagcgctgcctgcacttttctggaagtcctctcctgaggctggcttttgctacttccaagtctcggatttcctcgtgtcgattcccttcagcggtaaggccctcctctcagtctagcacctggcagccagttctacccccagtgcaagcctgattcacgatgattttcactctgcagataaagctgtcagtgtggttggcagggcgccatctgcctggatgagcacacgacaggaaagctgggctctcggtcagtctcccctacaggggcagggtaaaaagagaggtgttctagggagtatttccaggtctgtcctcaaatgccccaagtcacaaggtcgcctcattgggcagccgtcactaacccaaacagtaagtgtcatctatatgtctgtttcccagagtgccccctgggtcacagaaaccacccgttttcttatgggatgtgcttcttatcctccttggttgggatagatgcgaatttacacagagcttaaccagctccagcatctttcctggcccccgtgtcacactctgttgcctgccagaatacctgatgcatggttttcctctaaaattgctacttttgtgcagagggtttcccacgcacccatgtgtgactttcagtgactaagaaaaaggccgtggtcctggggaagaaagtggatgctcactgagagattgtgtagggattggaacaaaggggaagtgggtggtaccaagagtcaagaaccaaagtgccagccccactcagcagaggatagagggtgacgccctctatttccagtgtctagcaggggaggggtaggagagcctcctgagctggagcactgaatttctgtttttgtttttggttcttttgagatggagtttcactctgtcacccaggctggagtgcggtggggcaatctcagctcactgcaacctctacttcctgggttcaagcgattctcctgcctcagcctcccaagtagctgggactacaggcgcccaccaccatgcccagctaatttttgtattgtagtagagatggactttcaccatgttggccaggctggtctcgaactcctggcctcaagtgatccacctgcctcagcctcctaaagtgctgggattacaggcatgacccatcacacccagccaggagcactgaatttcttataaacttaccagtttgaagttattaccagtagttgagtcctgaactcacctatgaatattcagattttttttttcctggtctagcaatgctgtcataaacttctctagacatggtttttttgtgtgtgtgtgtctttttacattcttttggattattaacatagcaggaagtgaaaaagtgactttgaataacatcatggaggtgaaagtgactttgagtaggatcatgtaaagatttgtacattaatgagcttgccagtttgttccagaagccaaaaggtcagctatactcagaagctcttaaaaattctgacttctcttttttgatcagcctgcagtgcctcaaagccctttgaaaaatgaattaagaaggaaatacttgacccaagtggatatactgctacaaggtgcagagtattttgaggtaatctgtttcccagttgtttgtttttatataattagatcataaactaaatacattgaggtacagtgttattatgctttttgttttttctacagaacccataaagagcatttgaagtaatgatttccaaattgttttattcacatgctgacatacttgctcttcttgaataaacactccaggtcccccagggcagcgccatcaggaaggtgggagccctggcaggggtgctctgcccactgttctggggcaactcacagaaaaatctagtggggcagccaggcacagtggctcatgtctgtaatcccagcactttgagaggccaaggcaggtgggtcacttgaggtcaggagtttgagaccagcctggccaacatggtgaaatctcatctctactaaaaatagaaaaattagctgggtgtggtggtgcgtgcttgtaatcccagctacttgggaggctaaggcaggataatcgcttgaacccaggaggcggaggttgcagtgagctgagattgtgccactgtgctccagccagggtgatagagcaagactctatctcaaaaaaaaaaaaatctattggggccacacacgggactcttaagagcagccctgacctctggaccaggatttgaagctgcatagttagggaagcaatagtccccacattccctggtgcgatcaggctagaatcagctgcaaggtgaggaggctgacccttggcacctgtcccgcctgctgagaggtcatgttgggaggggggggatgtgatggcatgagaggtgggcacactcacctgccaacccctctcttaaggtcagtgccctctgccatagaataaaggacattgcaacaccaaatacttaggaagtacacattgcagaataagaattcatctccagaaaaaggcagcaatctcacaggggtgtatgtgttttcttactgtgctgctgaccagcggaaagcctgtatttgtggaccaccgacttagtggatgtacctgaaatgctttttcctttaacccaaggcagcaagtggtgtcctcttggttgctgtgttgatccagggaacagattagggttaggaacgaacggatctactgggtcttctttgtccaccgtccggttggcccctaggtgttcttgtggtctgagtataatgctagacaaagaaagctaccagcgcccctggggtaagaagttactggcaggtgagtggtgactgtggctggaagctatcctggagaccacatcaactgtccagatcttagtaggacatattttcttcccactgcccgaagcctagctggccactgtcaccacattcacacgcttgtcgacatggctgtgctaagatgcacagtccgcatcgtcaggggagaacccagctccttgcacccagttgacacctggcaacttttttcttgtaaccactggctctgatttcagtgtgcaggtaacagagctggaagggatgtacgtgtgactccgctgccttcactggcctcacctgccgtgcctgcccccggtgagtgtgacatagaaactgtatgaacagtgcgtgtttccttcacttttgttggagctgcgtggcccctcagagctgctcatactggccacgccatcatttcctggtgtgtttcatcaacataacttgttagagatatacttggatttcactggaagattaagatgtttcaaaatgagctgttttctcctccacgtctgctctttattccagtttactagcttgaaaagttttgcatctccagaagcacaggactagtacagtgaacacccttcacttgtttcacaattaacatgttgtcatatctgcgttatcaccccctgccacacacgtgcacacacagtgtgtatttatttgcatttgtgtatgcatttatccctaaatgcctcacacatacctccaaaaatcggctaattctcctttatgactacagtacgcttaacacaggccagaaattgaacattgatgcggtactgttctacccattgtgccagtgacgtcctttgcagcctttctggtttgcctgatcgtttccggacccactcaggctggtaccaccgttgcgtttagtctccctccatcaagagcggctccttggcattttctccctcatggtcacctttcatattattgcctttcttgaatagcacaggccagtaattttgcagaatgtccctgaatttggacctgattgcttcctcgtggttaggttcacgttaaacatttttggcaaaattactacagggatgacgtgtcctctcagaacatttggtcagtctgtcccattcttggtgacttttaggctggtcattgagttaaggtaagaccttacttcgatgtttctcattgcgacaggccctttttccctggagtcatctatgtgtgattctttgagatctcctaggaaccttttctctaaaagcttctcacccagtgacttagaagccagcaatgcggatcgcctgggtggaggtccccgcccaggttgtttctgtctctgccgttccttggcacacgtcagttggcattattctgctcaaaagagctatctcccctctggttcttttttttgcttcctgtagttccctctcatgctttgatttattttatttttattttttaggatcagtaggaattcatggagtctttttgttctttgattcacatgttataatccattgccggtatgcaatttgacgctcaagtaaccccagatttagctgtcagggagcccctttcaggctggcttttgtgtcgtgtagtgcaacgacatgcgtttttgagcacttcttcacccctgccctgatgccatatctgcctctcccagttctcaccagccgcagtgagttaacacgtgctcatctggtcaattgtacagcataaaataactctagcattgcagcacctgctaccactcttcacaaccatctactaaataagcttgaaaatttccaagcagctctttttatccttagacaatatctctttaagaggcagacactcagagtatttggactctttttttttctctttatcaatttaacatacagattttttttttgtttgtgttcaattttatggttttttcccatcactgttggttttttttttttaaatataggaaacatttacatgatgcaaaagtcaaagctatatgaagaggtttgtttagaagtcttacaccccttcccatccatgtaggtaaacagtgttgtcatttttcagtttctaattagcttttgaaaaggcatccatcttctaaacagcctagagggaaaggaagacacctttgggaaatgtacgatggagagtagaaatcaaattttgataccaaaaaatatctctgagaagagtctactcctacacatttgtggtgtttttgtttttgctattgcttaaaaaaacatagtcctgatccaatcttaagttctgtcatctgtgcacatggatggtttagaatggtaacacacctttactttatgtgtatcttttctcccaggatactgcagtcgtatctccagaaagagtcctggtgacccagcgaaaccagcttcatctcccagagaatgggatcctttgcatccttcctccacagacatggccttagtacctagaaatgacagcctctccctacaagagaccagtagcagcagcttcttaagcagccagccctttgaagatgatgacatttgcaatgtgaccatcagtgacctgtacgcagggatgctgcactccatgagccggctgttgagcacaaagccatcaagcatcatctccaccaaaacgttcatcatgcaaaactggaactccaggaggaggcacagatataagagcaggatgaacaaaacatattgcaaaggagccagacgttctcagaggagctccaaggagaacttcataccctgctctgagcctgtgaaagggacaggggcattaagagattgcaagaacgtattagatgtttcttgccgtaagacaggtttaaaattggaaaaagcttttcttgaagtcaacagaccccaaatccataagttagatccaagttggaaggagcgcaaagtgacaccctcgaagtattcttccttgatttacttcgactccagtgcaacatataatcttgatgaggaaaatagatttaggacattaaaatggttaatttctcctgtaaaaatagtttccagaccaacaatacgacagggccatggagagaaccgtcagagggagattgaaatccgatttgatcagcttcatcgggaatattgcctgagtcccaggaaccagcctcgccggatgtgcctcccggactcctgggccatgaacatgtacagagggggtcctgcgagtcctggtggccttcagggcttagaaacccgcaggctgagtttaccttccagcaaagcaaaagcaaaaagtttaagtgaggcttttgaaaacctaggcaaaagatctctggaagcaggtaggtgcctgcccaagagcgattcatcttcatcacttccaaagaccaaccccacacacagcgcaactcgcccgcagcagacatctgaccttcacgttcagggaaatagttctggaatatttagaaagtcagtgtcacccagcaaaactctttcagtcccagataaagaagtgccaggccacggaaggaatcgttacgatgaaattaaagaagaatttgacaagcttcatcaaaagtattgcctcaaatctcctgggcagatgacagtgcctttatgtattggagtgtctacagataaagcaagtatggaagttcgatatcaaacagaaggcttcttaggaaaattaaatccagaccctcacttccagggtttccagaagttgccatcatcacccctggggtgcagaaaaagtctactgggctcaactgcaattgaggctccttcatctacatgtgttgctcgtgccatcacgagggatggcacgagggaccatcagttccctgcaaaaagacccaggctatcagaaccccagggctccggacgccagggcaattccctgggtgcctcagatggggtggacaacaccgtcagaccgggagaccagggcagctcttcacagcccaactcagaagagaggtaggtgtgtttctgttggttgaatgtggtttatgtgagtgactgctctttggacagaggctttttatggtaggaatctttgcgccacgtttagtgaatctcagccgaattcttacatacgtgatcattttctgagctttctcccaaatgcttttccttcctgtaaagtcagcgtctctatcaagaatgtgtccctgtgtaagatgcatcgaggtaaagcagaaagtgctcttgcagaagtttcacactttccattagaatgcattcagaggcttttttcctgcaaatcctcacttactacgctttattcgtctttgtcaaaccttcatttctaacctcttcatctgacactcagaaaatagctgttgtaaggcgaaagtgatctaaagcgaatgacttcctatttctggattcctggtagggaaagagcaagagtggcctgggagagccacgagcacagtattctcacaggtgcgaggggtgccctgcagatatctcagtgctcagtgttaaaacttctgcaccttgttctgcagcttaatttgtgcgaatcatgtcagctagagttttagtctgcgtgtgcccttttctctagagacagtggggtggggtgggtcagtgggagtgagtacctttgttggcattaaaggttggattccccagcacagcttctctgtgtgtccacagtcaggatctggaggatgcgactttcttaacccacaggtggacgggacttgactgtgggtttgatttggccggttcctttgggttttgtgtgtttgtggttccagcaggtgaggccgtgtctccagtatcctcttcccttgtgccctagcctggcgatgtgcctcttctctgaggtcatttgggtggaccctgcctgccataagtgtcccattttctgtttctcccacctggacccgcctggcctgcgagcccttctcagccactggctcctgccgtgcgtccagctcagaaccaaggtctggtatgccttgttccttctgtggtgcctgccttcgaagcctgcagtcccgcctgtgcatggcagagaccacactctcagaccgccagcggcctcctgtggcttgagccccctggggcctttctcactgtcactctgtcttcccaatgcccttggactgctcagggccacctgctccagggtctgccgtaggacagcccttcccttccagggaactttcactggcattctccccctactccccagttctttgctattgcatcctcggacatcctccctagactccacccaccgctcagctgcctgctccgtgcaggtaacccccaccctcccaggggctgcacatggtgggtgctgcagtggggagctgtctggacacagaccagtctcatgggttagcggctcaggctccttggctcagttctagaagctcccaggttttgttggatgttttggttttcaaagttattttcgtgtataaagtcatactgtgtgagctaaccagaagcagatgaaacaagccttggttgtcatctgtcttcccagttgaggatggacatacgtaagtgttcaggtgatgggaaaggtttttctctgcagggccccagctagggtcaggggcactgtgtgggcagggccctcggagctcctcccctggcagtgcacggctaacagcagtctttccctcgggtcttggtctccaactgtgtgcctgatgcccactcctgtgcccacttggggctttttcagaccaaaccaccagccgggtgactttcagccacagttagtgaagccttcaagaatctcagctacatcttcatggcagacacttcatggaggctgctttgaggcaaagtttatgcgttctgtttaacagatgacctctcaagagtctccttctcagttgaaaggggagaatttcaccaaaaacaactgtccggcccagagagagatctgaggtttctcctggtctcccacacatcagagctcctctgctctgctcgtcctgcttgtctaaacctaactgctttttctcagatagtgccccagctcttccttttaccatcatcctgcccctgggattttgtctcgtgccttttcccaccttgttccatgatctggcaccgtgccagtcgcctgcagacccctttccatgagtgacatctgccccagtgctccgtgcagaggctcctgccttgctttttcacctgctcagtctaaagggctttcttctggcccagccacacaggagggacctcggccttgtagagaatggtgtgaggttgcattattgtgggaccatcctgaggactcagcccttggtggccccgcagggccctcccagctaccctggaatttgatagcaagtcaaatcatgaacaccccaggtttcattttaaaccacaatataaacatgtttaactggtttcctatgtttttctgcttttcccgcttaaatgatagatttcttgaggaaagagaccaattcttcatgagctgcaactacatatggagttttcatgcctaacgtctgagtgctctctgtgtgccaggccatgctgaaccgtttttacgtcttatcttctttcatccccaccagaaccccttgattagatcgattctgtccaataggcaggctgtctctccttttaatagatatggaaaagtagcttaagtcttagaactcctaaattcactcgtgcagcagcgctagctgggccagggtgtgggatgtggacttccccaccagcttgtgctccctgggggagtgtggggagcagggtcggggggttgccattatatttttgttgtttctttaacataacttacttatttaacgtaatgccactttctataagtatttttatacatgcaatggaataagtagaaaacagttaaccttttagtggctggcattgggaattctagaattttgctaacatcattttctttgtcttttttttttcctagaggagagaacacgtcttacaggatggaagagaaaagtgatttcatgctagaaaaattggaaactaaaagtgtgtagctaggttatttcggagtgttatttatcttcccacttgctctctgtttgtatttttgttttgtttttgattcttgagactgtgaggacttggttgacttctctgcccttaaagtaaatattagtgaaattggttccatcagagataacctcgagttcttggtgtagaaattatgtgaataaagttgctcaattagaatttttagggttctctttgataggcctgtttttctgatgtgtgtgttttttttgggggggggttatttgtttgtttgtttgtttgtttgtttgtttttgagacagtctctctctatcgcccaggctggagtgcggtggcacaatcttggctcactgcaacttccgcctcccgggttcaagcgattcttctgcctcagcctcccgagtagctgggattacaggcgcgcgccaccacgcctggctaatttttgtagttttagtagagacggggtttcaccatattgaccaggctggtctcgagctcctggcctcgtgatccatctgcctcggcctcccaaagtgctgggattataggcgtgagccactgctcccagccgtgtgttcttttttaaatttagatatgtccagagaatcctctctcctgtttcccatttcattcgagaatattgtttgcttgtgagacgtaagttcgagccctgcatgcaatgacccttgaaggaaaataaacagtcctggtggtcccagacgctcctgcagccaca

SEQ ID NO: 29 - DNA, 1472 bp, Homo sapiens
cgagcacctaaagggcaatattttttgatctcctcttctcgtaaaggggatggaggcggagaaaccgaagtctgtgctgggcttggaagcggacgagggcgctgcgaggaggagcggaaggcggagatgcgccgcggctgcacacggtcgcccgcgccccactccccggcgcctgccttccgcggagacgtcgctggtgtctgccacgtgcggcagcccggagcccaggaggggagggcgggccgcctggcgggggtgggcaatgcctcccggcctccagacgctatataaacagacccggacgcgaggcagcggcggagggcgagcgtgacgctggaggaggagtgggagctcccagcctgcgcgggtcctctctttacctgccagggcttttccgggtaatctgggaccgacagggatgccagcaccccgtcatctcacccaaagggcgccaggccagagattcctggggaaaagtcgccggctgcaggcggttgtcccaggaattcctccatggtgccggcgggagcgcggcgagccggggcgcggcggctgcgggaggtggaggcgacccgggacagggccggtcccagggagaggggatcccccgagccgcgcgttccgccgttcaggccaggtagggggtggggaaggaggaggaagaggatcccgaagcaagacagagctgaggctcagagttctcaggcagcagcttctggaggacaccgtggagacccaaggcggctttatttgggtctgcaaacacccggggccccggttaagattcggcagggccaccccgctcctcccccgccttgcacgaccgcactccgcgcgccttgtcactgcgagggctacctgtcctcgcacactcctccgcgatggccagaaaacgtgggactcgagataagactctggcagatggtactcctccctccgcctaacgtatcaatgcaccaacgcccctgaccgcacactcaggaacctgtggcagcctcgccaagggacagcgtgcccagcaccgtgcactgggcactcttggatctggagctcacaactccggaaggaatggggacttagatgaggtgacagacatgcatgcatgcaatgcaggctgaatccgcctgtctggagccaaaaataaacgccatggtcacctctttgttacaacctggatatgatgcccacatgcgtggggtagacatgcttgggatagataagcctgtggacttcagacggtattttctctttcccttttttcttctttctcgtcctcatctctgtccctccctccttttcttctcgccctatctcttcctccctttctactctctctagtgtctcacttgagaaagacctagatttgagtgggaagagttatgccttaaactgttctcattataaattcaaaatgtacttgaagaatacagatcgactgtatgatggcatgaataaagcgctatgctgtaata

SEQ ID NO: 30 - DNA, 35312 bp, Homo sapiens
taggcgccattttcgagtgaaggacccggagccgaaacaccggtaggagcggggaggtgggtactacacaaccgtctccagccttggtctgagtggactgtcctgcaggtaaagtacttctcttcctggtcaggttgtcacgctcttacttcctgccttgtccgcgagcgcctggaaaatagaggccttgagcccgagcggcgaagtccgggcttgaagctgccgctgggagatttctcttgctgtcacccctcccccctcggccgctccccggcggcccgggctcccgcgcgcagctcccgggcgccacttttccaagctactcaaatgtctcggggaggccctgagcctcgcagatcttttctttaaaaaatcctagtctctatctggaaaagggcgtctccccctacccctcttccttctgccaacggactagtcaccgggtctcagccttcgctggtgacctttcatggtttactgtccaacgggactccgcctggggagctggagagacaaactcttgccactccaaaattagcaagcgctgccagcgtccgacttgaagttgctagtggttagtcccagccttcgcccttcgcggtccgaccgctgagaggagggagacttcgttatgccccgggccgtcaacggcgccaggagctaaagggcgggcagacgaaagcgggcggcgagtcgccagttagtcttcaccgctctggagagagttgctagccacgggatcctgacccggacacgaactcgtttctccacgtcggtgcgcgcttgcatccctggccccgaaagcgtgggaatgtccggaaatgctggcgtatgggagttccttaattagaaatgcgttagcgaatattatacgcttatactatgggcggacgggtggagagccttaaaaacaacaacaacaaactaagcagttgctcaatcgttgattgatcctcaggcacgtctagattttcccacttacataggtcttgttaagaaaccagtcctgccttcttgccactcgtgtctttcgatggctcccttcccgaagtcccgctgcctctaagcggagtgttaagcggggctctcggaagccggtggaccgagatttccccgggtggggcgggcgcggtgtagcggcccgcgggctgacttgctcccggctgtcccccggccccagcgaccatgccccgtaaaggcacccagccctccactgcccggcgcagagaggaagggccgccgccgccgtcccctgacggcgccagcagcgacgcggagcctgagccgccgtccggccgcacggagagcccagccaccgccgcaggtgagtgacccgccgcgactcggcgggaacgcgcgctgtgggactggcaggcaaacgcgcccagcccgaggctggctggggttgttgagcgcggagttgacatctgaaggtccggtgtcggtccggtagaggctcaggaaagccatttggcaactttgagataggattcccgtgcaattttggtgtaacggcgctggaagggatgggggcgagcaaacgggttcagttgtgaatttttgtttgtgacctgtggaatggtacaggtcacaaacaaaaattcaatatctttattgtattcccgctaaaatcgagacggtcaatcaagagagcaagtggacttttttcccagagacaatcaatatgactatgtgagcatgatgaaaagttttttgaccctaacctcacctccgtggtgttagattgccgttaaagagaagacgataatttatttgaagccactgtagcttttgtgagtccaggagttgggtgacattattaaaccctcgtggcagtgtcgctgaagttcatgagtttccaaaatgaaggttccaggtgctcagcggtacggagaattgcatctagagccttaggatttaacctcctgtttaggataggcagcaggaaatagcttgttacggttttcccagatttgctctatgatgtagtgttttgactcttaagaggtataggtgtatagaattttgtgaccggtggcatttctttcaagaatttcttttttagtaaaaccaagctgaaggtttagtcacccccgtgagtttaagataataacatatttaagtggaaaatatagactcctaagtttcataaataacatccctccatcccctactttaaagatgggcagtcattagttctccgaactaattgcactaatgtaggcttttcccccgccgtttgccttcgttttcctttcctttcactgacttagagactgcaagtgaggaacttgataatagaagtttagaagagattttgaacagcattcctcctcccccgcctccagcaatgaccaatgaagctggagctcctcggcttatgataactcatattgtaaaccagaacttcaaatcctatgctggggagaaaattctgggacctttccataaggtatttgtatggaaataactattttataactttttaaataactattgtaaggtaatacgtttttacaagatgtttcagttttgtaactatcctaaaattcattcactccctatttatcctgatagtctttctgtctctctctctcacacacacacacacacgtttcatatgattttaacactgaaattatcttttgtttatctggttatctttggtacctctagttacaaagttttccattgaatggagtcggtgtgtgtttctgtttgaaagagtattttcccttggataatttttttttcttaaagccttctatggaacccttagataatttaactataaaatgagttttctaaaacgtctgcgttagaattggagcattcttattgaatgttgaagcttttaagagagaacttgatgtaagaaaactcaagtcgtatgcctgtgattagcaatgagaacttttaaatacttgcagtttttaactgcaagtaaaaaaatctaacagtttcagttaaaatcagtagtattagcatgaccttatgaacttttccgtgttttgtttttgtttttttaatgcagcgcttttcctgtattatcgggccaaatggcagtggcaaatccaatgttattgattctatgctttttgtgtttggctatcgagcacaaaaaataagatctaaaaaactctcagtattaatacataattctgatgaacacaaggacattcagagttgtacagtagaagttcattttcaaaagataattgataaggtaagggatttttactgttattggcaagttcaagtaaggaaaatggacttaaatgcattacatattttatttttggctttaagaaatttgtatgtaattacagcggaaagcattggtttcattatctctgaccgtattttattttgggggagtggtggtgcctgttaaaatacttattttttagctaaagaaatgaagtataaatagttcatagtaatcctttttggaataaaagcattgagcagttttagggtcctgagtactaaataggcattattttactataaatattcagttcatttttaaagttatattttgattgctttagaataaattagctaaacttgaaaatgtagcagttagccggttttaccatcttcattatttcagtgcattttaactctaatgttagtggcccctgagtatctgtgatatgaaagagctttgcttcagtttgactactgctgtaattaagtcctttagaaatgggggaaggacaagctaatgtttgttttctagaaatggagacaactagaggtaaaatgtctagattatttacctgttgagactttttctcttctgtttaataatgtaggaaattgattgttcaaaaatgactcgatggaacctaaaaatatagaaaactaattacataatgaaattgggaggtgatttgtcttttgaattcgttttcctttttttaatacaaagtgctttaattacacagaatcatctattttaatttggtttcttttgtgctttctattgtacaagttgggttggaaaatagattgccaggaaatcagattttattccattgcatattaattacatttgatttatctaaattttagaagcctttgcttcagtatgacagaacttttaaggttaagggaaagtgttaaagtagatttgcaattgatttttttaaaaatctgtttaaaagaaaatcaagggaatttagttgttatttctttgtgattctttttactttaaattaacggcacactctttaccctcccacacaaaaaaactaaagtgtatcacccggttactaccttccttcctttttctttgaatcatcattttaaaaagctgcagctttttaatctgtcaacatgttaataatttgtgtgggttttggatatggtgggaatcttgtctacgtcttctcaatcataaacgtttttaggcttgtttggaggtgggttttttcgttggctggttggtttggcttcttgatttttgtgatctttgagaaagggaccaaaacagcatggaaaagtatcaattctttgctaagttgggttattaatgagaactactggcagtttgtgtgcatgttcaattgaagtttttaatccatagaattagtttcagtatgaaatgagtgaattttgaagtaggcctatgacttaataccaacaattgttttctggttttgtttttcctcaaaacaggaaggggatgattatgaagtcattcctaacagtaatttctatgtatccagaacggcctgcagagataatacttctgtctatcacataagtggaaagaaaaagacatttaaggatgttggaaatcttcttcgaagccatggaattgacttggaccataatagatttttaattttacaggtaagtttattaaagacttcaaagattctcttattcttgttacttttttttctataaagctaggttggatgaatcctacatttttgaggccttaaagtactgtagcagcacatcatggtttacatgctacagtcaagatgcgaatcattatttgctgctctagaaatttaaggaaattcattcaaaactatgttttcatcatcagatgttcgttttatgtttggatgaactgacatacttgttccactctagcagcacgtaaatattggcgtagtgaaatatatattaaacaccaatattactgtgctgctttagtgtgacagggatacagcaactattttatcaattgtttgtatttccctttaaggtaacattttaaatgaaatgtattatattttaatctatccttttcctttgtttttgttcttattatctcttctgatatataaccaaaaaatgaaaaaatctgtacacttggtgtttgatttacctaagcacctagttaatttaatctttgtaacactttggatggttaacttaacctttactcaagttggtttttgttttgttgaaaatgacttacttggtggaaccactactactgaaagaacgaaactttgatattacattgttaagtatcagagctgttacagagcaagtccttttaaagagatgtaaaaattaagtacctgtgccaaactgatttttattagaaaccctgttttctttaagtaaaagtatattctaccagcatggcttggtaagaaaaatcccctatctttttttccctgtcctcaaaattcagaatttttcggaaaaaaaaaaaattagggtaaaaccatggctttgtcaagttcctgtttgattcgagggtatcttcttttcctgtgttctatccagaatcaccgaagcataataaaagcaaaactattttgtgatgcagaaatgactgaaataagtagggaattttgttagggtgactggatgttcctaataacaaacttataaaatgttagcctctgtttccattttagtctttattcttcaattgtttctaaaaattattacttttagacattcatagtatacaaggtaaatcagtatcattctaggataaccttttttaatatcttttgttaccaggcacagtatatttgcaatacttcaacctaaacttatttaaaaattaatgttgaggaaattaattgcagatatatttctaaacaagattggaatttatagaatgtggcattaaaggattttgtgtgtttttaaaatcaaattgaactgttttattgacttacatattctgggacttggtttggttaataatggataaaaagttatgtccctatataatactaaatttgatgatgataccaatttgcaggaaattgtacttatgtttatcttttgcttaatcttttaccgtcatcctgggataatcaaagttttacatttatccaaagattcatcaaaatacactgcattttaacccttctaaggataatttttttctctgtacagcatctctgtacgtaattcagtaataaaggaagctaatgtaatattgtcccaacgaagtaaataatttataaattgtcaaatttatattacatttgtgcttctgaagtatatgggatgctaaagccaatttgttcacatgataatctgaacctttttatgtgatctttacaattgtttaaaaaacatttcttcccaaataatacaaaggtgaatgttccaagttaacagattcagtttgactcaattaaatttatagataaggaccttaggaactcacttgttaggaataagaaacagggattggactacggtagaactaatagtgcccaattaaaactttgagggaaagtgacaatggtttctatggattgttttttttaagtcgcttatgaaaatctcagactcctaactggcaatttaaagcatttgatggtaagtaaaaatgtgatttttattaccttctctcctactgaataacatctatcttaaaaactgatttgggaggctgagaaattggaaacagcatcgtagtatcaacatccaagacctaaatcattacttggaataaaacatgtagactatttggccagtaatagtgattaacagcaaaagtaatctaaatttagtaaaaataaacatttatttttgagattaaaaagaaccaaattttttagaagttcctaagagtaaaatttttcagtgttaatatattcgcttagcaaatttttcaagtaggcatttttattacttaaatccattaaaaatttcattaattggccattcaattgaattcctattaaggcactatgctaaaatgctgtaagtaatattaagatggctaaaccttatttcttgtccttaaagacacatacatgccttcaaaaagtttgttgtgattgaccattgtgttttttataatcgtacattttcttttatatatacctactttgggagcctcggtcccgttgtaagtctgtacaagtagagttttattagctctgtataacatttcttgggtaactatgacttataaattaggggtgcttttgctccattcaggggtagaagaatggttaatgtttttactaaaaagttgtattaatgattgctgcctcaggaatatttttgtaaactcctcaaaagctacaactattagcacaactttaattttgtcaaagttttcaacttcatatgcttttgtcttcatattacaaaatctaaagtttgaaacacgaaccaggctgggtgcattagctcacgcctataatcccagcactttggaaggctgaggcaggcagatcacttgagcccaggagttggagaccagcctaggcaacatggtgaaactatgtctctatagaaaatacaaaaattagctgggcatggtgacacacccctatagtcccacctactcaggaggctgaggtgggaggactgcttaaacccaggaggcagaggttgcagtgagccaacatcgtaccactgcactccagcctgggtgacagaccttgtctctaaataaataaataatagccaagttcttttttttttttttaattattttgtaatttggagatttaattaacctaggtctgagttgttgcctagccatctgttcttttttccaatgtacttctcttaagcttgtcacataaactacttgggttctagtctcttagtctgtagaaatgagcctatgctataatatcaaaagaaatttttagttttttcagtaatgcctcagttttccaaaggtgtctgattcaatatccacaactagggtgaaggtggtggagagcagcaaggaagctacctctaaccaaccagaaatagatatcaagaagtccagctactaacaagttactctttctgttttattttagaaagatactaaccttggtggtttagttccttggcctctggtagcttacaaagatcaaattagagtaaaatgtattggaggaagataaagaacactaatttatagtatagtataataaaagatatagaaaataaaaagatgatcaagataaaaacttaaacctcagtaattttaggccatttaatttttatgcaaacactcatatttgctgtaagaatcactgaaaccctccttcatagtaattacaagtaaaaataaagagaagaataattgaggccttactaggacaacaaaactttgttatagctatgtactgtttgagttttctgtagttgatgcttgctaaaatttggattacatttgaataaggataaagggcatcatacctattcattcctcttagatttctaagctgtatttcagtaaattgattctcaaagagtggtataactggatcataatatccttgtttgccactcaagaaagtgttccataacttaagataacagtggtgggaaaaatcatttaagaccttgtttcatatgctttaagatacaagaaatagagataacactgggaacatatgaaactttgtcagcatcagataatagtgttgtagcgacttgaaacattttttgtctgtgattgtgccagtcactatttgtgacttggattgaaccttgatatgactttaaattcaggttgatgttttaaaattatttctgaaatatattgagcttattgccctaaattaaaactatattctgtaattttacatgagttatgtaagttttctgaagaaataaggaggaatcctttaggcacagactgtcaatctacagattacataggagatggcacaaatggaaaaagaaggaagaaaggaaatggtagcaagtggtagggcaggcaaaggacatcaaagaacagagcaacaagaaaagtcccaggttgtcattgtaataccacagtagtcttaatagtcaaaggacaagtaaaggcctgttaatagcctgttgattcaataatgctaatctgataatatggtaactggtttaaaaaaaagcaatacggtataataatcttaagactgctgtaatcccagcactttgggaggcccagacgggcggatcacgaggtcaggagatcgagaccatcctggctaacacggtgaaaccccgtctctactaaaaaatacaaaaattagccgggcatggtggcgcgtgcctgtagtcccagctacacaggaggctgaggcaggagaatggcgtgaacccgggaggcggagcttgcagtgagtcgagatcgcgccactgcactccagcctgggcgacagagcgaaactccgtctcaaaaaaaaaaaaaaaaaaaaaaaaaaagactgaatgttatacaggagttgagatgtaactattttgctttgtaaatatcctgcctttaaaaaaaaaaatgctcaactctattagaggaaatcatagctgtatctttcattttatttggagagagaggaacaaacaaccaaaaatgagcaaccattgttatttacccaaagctaagctgtttcttaatagctgtactctatctcttcagtaagtaatttgccaggagaaatacaatgtttttaaggaatatttttgtcagcgtaaactgttaaacactgaatcccaacttttagctatctgaaaaatgtatacttaaataatacattatggccatttgactcaaatgtaagttcttttgggatggtttttcattttcttaaaataagtgttcagatattctccttgaattgggtagaatattaattgtcagatattgttttttatttggatgataaacactaacccacaggatttaaactacaacttctagactaggcatggtgggtcatgcccttaatcccagcattttgggaggctgaggcaaaaggatcgcttgagcccaggagttcgagaccagcctgggcaacatagagggaccaccatgtgtacaaaaaaaatttttttttaaagattagctgggtgtggtggtgtgcatctgtagtcccggctacttgggacactgaggtgggcggatcgcttgagtctgaaaggtcaaggctgcagtgagctgagaccacaccactgtactccagcttaggtgacagaacaagaccctgtctcaaaaaaataataaatgagtgaacaaacaaactgcagcctctagatcagtagttctcagctgacagtaattctgccccttttcccataggacattcagtaacgtctgaagacagtttcggttgttatagctggtagaagtggggatgctactggtgtctagtgggtgaaggtcagaaatgctattaaagcatcttataatgcccagcatagctctccacaacaaagaatatccagcccaaaatgtcagtagtgccactgttgataaaccctacgtagatacaaacttgaataagactcttggcttcctcagtgacttaacgttcatcctgtgtaatccaaaggtttgggcatttttccaggcttcaatcctgtctaaaacttaaactcttgctgcaaacatttagagagaactaacagttgaaagcagaataaaatactttatataaatatctacatattttcacttatataccgattcatacataatataatgaatgttatggaaaataacttttggggtaacagttttactttgataatcattgtgcttatagactgtcagaagtatcgaaaagtgatttatgcaaataaaattatttcttaatgagtagattttcaaataagctgttttgtccactgttattgaattgtttactttttgtaattatgttgaggcttttggtgaattatgatgctctcattagtaagttttaccccacatttttaaggttcacctgtattcacttaggaaataggaatcactaagatatttgaattaagaaaacaatatactatttttaatgtgtaattctttttgttgacttttttcgtctttgctattttgttgaaaataagaggtatatcttttttcatttgcctgtacctattcttccattgtaatagtctagagtacaaacaagctactcctataacgtagcagcatttggcctgaacatactcagacacaattttctctccaccatcaaactaaatgactgcctagcagtcagccttgatggttacttattatggattttttttctctttactcttcataattaaactgcataaatgcaaatatgtaaagttaatctaagattttaattacagttcaaagttgttatattagtgattacaaactgaaagttttctgatgtcttatgtaccagtgccattagttttctctagtcaaggtggtctgtttgatttctgttattaccatgagaaataggtaatatccttttctgtcaaaggctcttgtttttagaaaactgaacatgtaagtttttgactacctttgaaacccattacttgttaaggaactcctaaaaaccatgtttgtagagaaagttggtaatactactttgggacagggttcctaacacagtttaaccatgcaagtgtttttgaaaattctttgttttagaacaggagcttcaattgtgttattaacaattgataatgtttccactataatcagattgcagattaagtgaaagctttcctaaattttacttaaagaaacaagttttatttatttatattgaacattctagttggggaaatgagtgtgtgtaagtgggtgtatattacacttttataaggatttatctaagggaatataaattcatgtttcatatctccctgtgtaaaattaaaactcttaggaataccagtgaaaataacatttttatttataccttattaaatcattgcactactaactgtacattatttagatgtttattactcttggctttattatttaactgctcccaattctcacttaagattgatttagctaaacatacacagtgagtatgaaatataacttttttttaaagggtgaagttgaacaaattgctatgatgaaaccaaaaggccagactgaacacgatgagggtatgcttgaatatttagaagatataattggttgtggacggctaaatgaacctattaaagtcttgtgtcggagagttgaaatattaaatgaacacagaggagagaaggtgaatcatctgtagactttcattgtaaatcagaatgtttcatttatgatctaacaaattttagtaagtcagatattcatgttataatacttaatgaagaagtgttatattgaaatttatatcttaacatttaagatgaacattctccttattaactgtttttatctaatgtttgcatattttaagttcatattgtacatatgaagtgtgtattcagtctttaaacttttaatttctgtagttaaacagggtaaagatggtggaaaaggaaaaggatgccttagaaggagagaaaaacatagctatcgaatttcttaccttggaaaatgaaatatttagaaaaaagaatcatgtttgtcaatattatatgtaagtgccttgattgatattaccaatttttatattagtttttaaccattaagtcaaagcccttctcttttcctagagaaacatgaagactgaagtgaaaaaaaatctctaaatattgttttgtgtgactgaatgtgttagctcatgcctgtaattccagcactttgggaggctaaggcaggaggatcacttgaggctgggagttcaagaccagcctgggcaacatagcaagaccccatctctacaaaaaaaggaattatgtggtgaacttatccaatgtgaggactatctggctgtgacacctgtcatcccgttgatcaccagggttgaatttattaaattaggcatattaattcattgaagttgactttttagtatcctgctttaagttgggaggtaggttcacaggtatttattactgtactcagtccttttacgtgtgcactttttaaaattcgtgtaatagcagatctgatttttttcagcttatgatgaactgttttttgagatgggctgtttcacccagggtggagtgcagtgtgtgatcacggctcactgcaatctcaaccttccggactcagttgatcctcccacctccacttcatgagtagctgggactacagggcacacaccaacacacctggctaattattattattattattgttgctgggatttttttgtttttattttttcttttttctttttttggtagagatggggtttcgccatgttgcccaagctggtctcaaacttctgagttcaggcagtctgcctgcctcagcctcctaaagtgctgggattacaggcgtcggccaccacattggtacaatgaaatcgatttttgttcctaaattctagccttgacccagggggattttcccctcatagcctaggcagtcatatattgactagttaataatattttagaaacagttagttttactaaaattgttatacagttttggaaatggcattttaggagcttcaatttctttttttttttttcctccctatagttatgagttgcagaaacgaattgctgaaatggaaactcaaaaggaaaaaattcatgaagataccaaagaaattaatgagaagagcaatatactatcaaatgaaatgaaagctaagaataaagatgtaaaagatacagaaaagtaataatattttgggaagtactaaaagtatttagataattgtattacatgtgtatttatatataaagttacttctagcacattgtgagtgtaagacatttgccagcatatcaagtggtggcccccttagtgaaaaaaaaaaacttgccttgcatccagttccttgttacagatgaaattccctactctgaagtcttagaaccgtggggatgctaccccctagtggcgtagcacagtaacaaacaataagcatttggcttcacagtttaatcttttagtagtccacaaatctgatagagggataggatttgggtttttctagatagatttttaagggttttatcatgtccctacttgatgccatttttcaatgacactagtatctctaattatttttaaataaaaaaatttgtatagtaagtttattgtatagtaacttgtaagtatattcgtaaaaggtaaaaccaaaattttactcctatggtaaaatttttatatacctagacattgtagtcactggaaaatgtgttattttccctccaacttagaaaggcaaaatagctgtcataatcaaaaatacaggtgcttcttcaactatggggagagggatcatcttggaataaggagagttttaggatcctgccttattaagagcctggacatatttatagaggaagtgttccaggtaggaaatgtggttttaaaatatgtgcacattcaaaataatgacttacaatatacttgctttgctaggaaactgaataaaattacaaaatttattgaggagaataaagaaaaatttacacagctagatttggaagatgttcaagttagagaaaagttaaaacatgccacgagtaaagccaaaaaactggagaaacaacttcaaaaagataaagaaaaggtaggtgttagaaaaaaattcttaaaatttcacgtctgaatatcatacctagttttcatggatgtgtttgccccttattgcctaagagaatgaattagtattctaaatgttgttttaaggtttgtctctgaacatgattttaccccctcaagggaaaccttgcttctactgactttattttgcaggaggttttttgtttggttttggaattttgcagagatggggtctcagtctgttgtccaggctagcgtgcagtggtatgattatagtcttgaactcctgggcttaagaaacctacctcagcctcccaaagtaacgtggactacaggtgtgagccattgctcctagcttgactttgagttttaaagtttatattacaataatatgttattgggaaaacatttaccaaatcaggagttccattttggtgttaattttaattttctttttcctaaagtagtagtttttaaagatatttaagttaggtattacagacttaaaaatattgcctgtcttctacaaaaactaagctaacaggatcagagcaggatttcccaagaattaccaatgttggccaggcacaatggcttacacctgtattcccagtgctttgggcggccaaagttggagaattgcttgatgccaggagtttaagaccagcctgggcaacatagtaagatcccatctctacagaaaatccaaaattagccaggctcagtggaacttgcctaaaagtcctagctagtcaggagagtgaggcggcaggatgccttgagttcaagattccagtgaatagtgatcaagccactgcatccagcctgggtgacaaagtgagactctgtgtcttaaagagagataggaaagctcataatttggaatctcttaagctgtgttcatgttcatagctctgtcatatttaaacagatatgataccttaaccccagccccgcaaaaaaaaagctttgttccatatggttacacaataattatagattaggctctactttacgctataagcattttctaaatgtatttgttcacaaaatactttctgcttagcacagctgataaatacgttgagtcagtgtttaaggaagtggcattttgggaaatgttgaacttcacaggtactagataatcagagtaaacaaaataacaaggctttgggggtaaccccaaagacttgacagacttagctaagtgtaactgttacagagtgattagcctttaggcatagactgcatggataagtgattattatcagaagatgttaatggagtaaaatattagccctacatgatgactctggaagagtaaagttgtgaaagattttagggttggggagatggtaaagataatttgtggtaagttatgatataccaggaaggatagtttagaaaattccgtgtagtcagagcatatttatagctaaagaagaataattacaacctgaaatcaggagagaaggatgacagacctgaggccctgccagagacagttttccttcataagaggtcaggtgtttgtagaagtagttttactattagattgagagaatatagaaattacagtgaatagtcgggaaaatacttgttaaagctagctaatttaactctgattataaagaaaagaagaactagaggaccctgagaaatgcctttaaatatgtcaaatattgatagtattgggtaacataaagatgtatgctcctataacttgttttataatctcaggttgaagaatttaaaagtatacctgccaagagtaacaatatcattaatgaaacaacaaccagaaacaatgccctcgagaaggaaaaagagaaagaagaaaaaaaattaaaggaagttatggatagccttaaacaggaaacacaagggcttcagaaagaaaaagaagtaagttttttttttttatcagtgtttattttggtggcttttttttttttaacttaaagattattttttcaaaaatactgaaacctgaactggtaagtttggacttttaatgtccaacattcctaaaactagtcaacctagacttagatgactattcttttaattcctgctgacatgttttttaaaaagtttactaaatgagagtttgtagtagtagcagaaggtgtgatgtcaaatacagtaccttgattattatatatgccactcctaagcgtgttgaatcatcatattttgttgccacctgtaaaacctggagccacactaagcgcaggttaatgtctcttttgtttttgcttctatagctcttgtgtaatagttaaaagctgtggctcttgtttcagttcttggttcaaatcctaggtcaatcacttactgtctctgttcttgtgccggttgtcatatctccaagtcatcttccttaaaatgagaaagaatatatctactttgtgaaaataaagaataaatatatctatataacgtactgagaaagaaaataaatgttagctataattttagcattatattaataaaacgagagcatgaagttgtcacattgatatgtattatctaccccaacaagagtaagcataaaattatctttgtttgtatgtaccacagcatttttgacagtgctaagcatgttaaatacctatgttaatggataatggtaattgactgcattaaaaagtcatggtagagtctgctttggcatatcaacatgttctaatgtcaaactataaaacttaacaggttagaatacctgtgtgatgaagtgtcacttaatagagtctgctttggaatatggacatgttctaatgtcagattataaaactttacaggttagaatacctgtgtgataaagtgtcaatggataatgcagtagctttcatgatgggatacttcatagttagtggattttcactgtttgcttatttaatatatattgagtactcatgtgccctgcaccccatgttaatgacaaagctaggcctcaaatgtctttattcctcagcgtaatgatcgatctcacaaagctcttgtgaaatcagttgggaaaagactatgtacagtgaatattgacaactaggcaaaaactgaatctagtccacttgtgagaatttcttatttctatatactgtgcttatagaatctcctttcttaaatcgaatataaaatgtatggtttcatttcagtgtaggtttgaaagtaaatatctgtccagatttaatgaactcatattttaacagagtcgagagaaagaacttatgggtttcagcaaatcggtaaatgaagcacgttcaaagatggatgtagcccagtcagaacttgatatctatctcagtcgtcataatactgcagtgtctcaattaactaaggctaaggaagctctaattgcagcttctgagactctcaaagaaaggaaagctgcaatcagagatatagaaggaaaactccctcaaactgaacaagaattaaaggaggtaaatctttgcttctctgttgcatcagaacatcattcgtccacttcagctttatacatttttgtttttaatctccgcgtcagaggtgactagtgataaattttcttcattttgtataatctcaaaagaatgaggtcagcatttcagtattccatatgtgaactgagactatcaagaaactatattatccccagaagcaccatatagtaagtaaatcaccaccaccaccccactgtagaaataatttaaacaaaagaaagtttgtgtttctttaaatcttaagtatagacaatttaaagataaataaaaaacaagtgtatatgtatttatataatgaatatacaaacaactatcttaatgtgttttgggttttgaatttatggatgtagtttctttgcttgcattccaaaatgttataaactaactaagatgtatagcttatcggtgcctgtcccccatccttgagtgaattagatgtctaaggaatttcgtaaactttaatctccaaagatctccaaaacctcagtaggcaaggtggcaataaaaaaaaaatctgtttgaagtgtaattatactgaaaataaatatgagtctttttcattttagttaatgcatgctatttggtcatcagggaatttcatgaccaggtagaatttaaatgtaaattaagttagatccagtgactgcttctgtcttcctgggattcggtttcttttgggatgaattatgtcagtaacttggtttaaactttatgccagtacagtaagtaatagacataatttaaatctagtggatggaggaatataccagttagaaaagatggctgctgagaagttggagattgagaaacagaggttgtgtttatgtgtgcatgtttgtggttcctttcttgttgggagcctggcatttttgtatagcaataggactatccagtcatctttcgtttcagaggtgtgctttttctccagtaccccccagccccgttcagctaaaataaagcacagcataaccgtagtcctgcccagtcattttctgggtcagcttttcattagggcagagctgaagaattagggcacacttatgtataactatgtagtatcaaactgggatttccacagccccagctatacttctctatcaggatgaactgtttgctcctgaaaaaaatattacacctaatgttttcttttattgacccaagtaatttatgccccttttaaacccatccatattttccacaaccaaaccagcaattgccatacaggtgctcagttttggttcaaatttttattgttggtctttctttctttattgttattaaagcattacaactaattcagtgctatgactggtcatatttagaagttaatgcttctggatttcattttattttcacttttagaaagaaaaagaacttcaaaaacttacacaagaagaaacaaactttaaaagtttggttcatgatctctttcaaaaagttgaagaagcaaagagctcattagcaatgaatcgaagtagggggaaagtccttgatgcaataattcaagaaaaaaaatctggcaggattccaggaatatatggaagattggtaaagtagatttttggggggcatggctttactttttttttttaagaaagtgtaacttatttttttgccttgacaaccatatttcaagtgtcactgtatataaaataagattcattttgtttgttttaaggcacatttatttttaaacattttgcccttacagtttcttgtttacttagctttagataaatacaattatttcatacatatcaagaaaaatactagtaatgtcacacaaacttaaaaccattttatccttttttttaaaagagagactttagccaggcacaatggtgtgtgcctgtagtcccagctgttggagaggcagaggcagaaggatcacttgagcctaggagttcaagtccatcctgggcaatatagcaagactgttttttaaaaaatgaaaattaaaaaaaatttttttatatatttggggtttcacaccattttacttaggtttgggctagcatttaaggatataacaagggataatctaaaaatccaaggctagcaatagtgaggaccattactgcttcttagcttcgagggaagggagttgtggtccagaggagatggggaaaatggataccttaaccccacctatttcctgccctccagtcttagctgaaacctcaaattggctgaaggtggagagtcaaaggagccagttgatgcagtccttaagtcagcctttcggagaagggaacaaattgatgtaaaaattacccaacatgattgcttctgcatcttgtatcgggacttccaccttattttcttaaagataaacagtttgatcctattcatttgctctcaaagaaagcccaaaccagtgaatactgctagatagttgtgtaatagataaacagataaatgtgtttcatcaggatttacataattttagatgcttttcaataattcaaagttttctgagttttgcttatagttcatttaggttttaagcttcatgttgttttcataaaatgaaaacagttctttcattttgtgctcattagaaattcaagctgcatattcataaacttatacatattttgtattttgttgtgtacccttttgttctctttaaaaccatgtctacataaagtttttcaattaaaagaagtttttaaaacttgatgaatgaaatggtcctgtgcttttctgcctaactcttttttcaccccactcttcattattagggggacttaggagccattgatgaaaaatacgacgtggctatatcatcctgttgtcatgcactggactacattgttgttgattctattgatatagcccaagaatgtgtaaacttccttaaaagacaaaatattggagttgcaacctttataggtttagataaggtgggtattcgtaataacctacctataattggaattttttttttttgagacgtagtctcgctctgtcacccaggctggagtgcagtggcatgatcttggctcactgcaagctccgcctcccgggttcacaccattctcctgcctcagcctcccgagtatctggtactacaggtgcccgccaccacacccagctaatttttttgtattttcagtagagaggggtttcactgtgttagccaggatggtctggatctcctgaccttgtgatccgcccacctcggcctcccagagtgctgggattacaggcgtgagccaccacacccagccctataattgaatttttaagtgctaagtgtgtttttctttttggattcaggctttttcttaatggttactcagtgaacacctgatgggttttgacgattattttatgttctggggttatatgattataaaaaattgtttgacatttgcagtgcctccactaaaggaatgtacattccagagttaaaaggaaaacctttattgagataatttacctacaataaaatttatcattttaggccaggtgcggtggctcatgcctgtaatcccagcactttgggaggccaaggcgggcggatcacgaggtcaggagtttgagaccagcctggccaacatggcgaaatcccatctctactaaaaatacaaaaattagctaggcatggtagcaggcgcctgtaatctcagctactcgggaggctgaagcaggagaattgcctaaacctgggaggtggaggttgcagtgaacctagattgcgccactgcactccagtctgggtgacagagtgagactcaaaaacaacaaacaaaacaatcattttaaagtatgtaatttggtgggtattagtatattcacagtgttgttcacccatgaccactatctaattccaagatatttttatcactcccagaaagaaaccccatagacagtaacagtcgctccctataccccttcaccccctccgtaacactaactacttttttgtttctgtagatttatctacatataaatggaatcatacaatatatggcctttttatacagctacatttacttagcaggttttcaggttcatctatgttgtagcatgtatcagtacttcattcccttttattgccaaatggtattctgttacatcattttgtataaccatttgtcagttgatggacatttgtgttttcactttttgtgctttggcaatacttgtgctacgaacatttgtgtacaagtttttgagtgaacatgtattttcagttctcttgggtatatatatacctagggtagaactgctgggtcatgtggtaattctatgtttaactttttgaagaactgtcaagattgtttccacagtggctgtaccatttcccacaagcatgtgtaagggttccagtttctttacatcctcgttaacacttgttatggtacatctttttgattatagtcatcttagtgaatatgaagtggtatctcatggttttgattaggattttcctggtgatttatgatagtaaaagtcctttcatgtccttggccatttgttatcttccttggagaaatgtctgtttcaaatcctttgcccattttttaattggtttctctttgttgagttgtaggatttctctattctgaatacaagtctcttgtgagatatgatttacagatattttaccccattccttggattgtattttcactttcttgatggtatcctttgaggcacaatttatcttttttttcctttggttgcttgtgttttgggtatcatacccaagaaaccactgcctaatccaaggtcacagtgatttgcctcctttgttttcttctaaaagttctatagttttggctttatatttaggttttaatctattttgagttaattttatcacgtgatataaagtagggctcaaactactctttccatgtggctatccagttattccaacaccatttgttgaaaagattctttaccccattgaattttcttggcatccttgttgaaaccacccaaccattaatgtaaaggtttatttctgggctttcagttttattacttgtgctggtataggacactgtcttgattattgcagcattgtaataagttttaaaatcaggaagtctgagtcctctaattttgttctttatcatattgactgttctgggtccctataatttgtatatatgacttttaagatccagatggtcaattactgccacaaaaaaaggcgaggaagtaactgggattttgatacaggttgtattgaatttgtagatcagtttagatagtataggcatcttaacggtattaaatctttagaaccacaaacatgagatgtcttccgtttaggtctaattttagaaccttttgtgtataattcttgtttcttttgttgaatttattcctatgggtttttttttgtttttttttttgagttttcttttttgttaactgttgtttttgtttgtttgtttgtttacttttagatggctgtatgggcgaaaaagatgaccgaaattcaaactcctgaaaatactcctcgtttatttgatttagtaaaagtaaaagatgagaaaattcgccaagctttttattttgctttacgagataccttagtagctgacaacttggatcaagccacaagagtagcatatcaaaaagatagaagatggagagtggtaactttacagggacaaatcatagaacagtcaggtaatagtgtttttgtttcttggtttgtttttttttccccccacagcattgactttatttaatcttgttggggagacatctgaagctgacttctctcccctgttttccaggtacaatgactggtggtggaagcaaagtaatgaaaggaagaatgggttcctcacttgttattgaaatctctgaagaagaggtcagcatatctaaaattgtatccagacttttttttttttttaaatagctttaccgaggtatatacttactacaaaatttggccattttaagtatggtgtactcaaattttaatagatggcgttttctataaatgactagggattttttatgtaaagccctttaaagttttagaaaacaaaatattaatcagaaactatatgctcaaagtacactttttaattagtacatttggatcatacagatattccataacttacataattatttctgttttacatttaatttattggggttttttttgtattattgctgtattacataattttttacttcaaaataattctttaaaagtatagcaaagacttgatgcaaatctcaacttcagagtattttaaacttttttcctcctcaaaaacatgttctgaaatagcttgaacaccttttcccaaagtgttgtgctttgatttttttccctcccgtattttgaaaatacaagtttatgtccttctgcttaagtatttgaatgctgtaccttcattgaaataataggtgactgtacaacacttagttacctttccatctgattttctgatcaagaaattacttgaccatctcctgaactttaagattgggattggaacaggtggtttgattttgttctggtctttaagatcagaagttttaggctgggcgcggtggctcacacctgtaatcccagcactttgggagtctgaggctgtcagatcacaaggtcaggagttcaagaccagcctggccaacatagggaaaccacgtctctactaaaaacacaaaaattagccgggcgtggtggcacgcacctgtaacagtcccagctactcaggaggctgaggcaggagaatcgcttgaacccgggaggcggaggttgcagtgagctgagaccgcgccattgcactccagcctgggcgacagaagttttagttttcttcgtaagttgacttttctgtcaatctgaaatggctcttagagaaaactttctttgtaggtaaacaaaatggaatcacagttgcaaaacgactctaaaaaagcaatgcaaatccaagaacagaaagtacaacttgaagaaagagtagttaagttacggcatagtgaacgagaaatgaggaacacactagaaaaatttactgcaagcatccaggtatgtgtgtgtgtgtgtgtgtgtgtgtgtgtgtactgaaactattgggattcaactggaatttatcagaaccattttgctatttgcttacaatttattaaatatataagggagggaggatctataggcagatataactcttgatgattttgtttcactgagtactaatagataacgccctgtcacagtgttgttccaaccacagctattcctgttttccgtttgtactccatagaaacattactttccttaacaactatatgaccctttatttttattctcttttcaaagtggaattttttttaattatgaaaaagcaatgcacgcccactgtttttttaataagtttccagaaaatacccaaatgatcaccttcattttgacgtatgttctttcaacttttctaatacctagtttgcatgtaatgtatttatatatgtggtagatatgtgtagatatataaagtgtgcatatggtttttttaatgtcatactagcttttcttaaattatggttttctttccaaggcagtataaatgtactttgtttttaattgctttagagcattttgtttataacataatttgacaaattttttttgtattatgtacatggctatgtttaaaaaaatccttgtaggtataccttgattcagttatttccttagatttcaaaaattacaagtattacaccatatgtgtacaatgtttaaggcatttgttgcataatgccagattgttttcaaaagttataattcatgcactactaacagcatattcaaataattatttttccaagtctttgaacactagggtggtctacataagtttgctaccttgtaaacagaaatgtggcattttaacgtgtctttataatgagcttacatattttgtgtttgttggccattttcattttttatatcaatggcacatatctttcctcttcctattagtgtgtgtctttttcttgaagattttaagtgccctttttaaaaattcacaatgtttaaagcaaatgttaaaatattgaccttaaatgttaaaacttttttgtagcgtttaatagagcaagaagaatatttgaatgtccaagttaaggaacttgaagctaatgtacttgctacagcccctgacaaaaaaaagcagaaattgctagaagaaaacgttagtgctttcaaaacaggtatgtttagagatagaccttttttggggggaaaaaaaaaacaggtttttaaagcttgcaatatttaagaagcagtagaataataatagaagctaagtatatgcaagtcattgcactattttatggtgtttgttataaagtaagtgttattaatagtctcatttgacaaataaggaaactgaggcatttgcctaaggtcacacagcacgtggtggtataggaataggtgatttttgagtccatgcttttaatgtcatactttgtatactttggccctaatctttccaaaaccccttcaagatagtggttatagatttagaaaaattatatcactcagataacacagggaataagtggtatgcaatcaaagaaaaacaatgtgtacttgaaaacttaaaatatatatatatgtattttttttctttcataacttcttcttgtgcagttatagacatgtaaatgttctaccaaaatagaatctttaggcaggaaaaggaattcacaggcagaattggctctgtagccttaattgaaatcccctgatcatgcacttgagcagctgtgcttgtctttccatgttggcttcaatcaaacatagatgtgcatcttaatgggagaagggatagtggattatgccacagtccccttccaggtttacagaatcttagctagtgactccagcaaacacagcaaggttcattttattcttaagacagatccctgttacagtttgctttgtgagccaaggaagacaaatactgattaaccatcccaaagaactaatgagagtggagttggagcgattatccaactgctccaaaaatgtggggattttcttccaaaagaaaaagatttttaaatgttgacacatttccacaatgcatatcaaatgtgcatttatattaatttgtgtctgtgtttatctgcatttctaatattcaggcactcaaatagtatctgctactggccaggctttgttttaggtcctactgatagagcagtaaacaaaaataaagtctcttcccagggagcacacatgtaagatggcacatatttgagtggaggcccaaagaaagtatgagtgctaacccatgtatgtttgagaaaaaagcattccaagaagagtataaaggagcaaatacaaaggctgaagcaggagtatgctgggaacacaaaccattgtggctggaataaaggacggaagaacccagattctctgaggccttcacccacactcccctttccctgcaagcacccacaacaatggctttgatggtacctgatggtcaattgagaagccaaaatgtatatctgtgctattaatggcaacattttcatggagagactgcaagagtctatatgtgtttcatccttatttgaaaaggaatccttgactttgttaggagctctatatatctcctctcatagaaatgccatatattatcaggagactgttaatatctcatgtggaggacccatttgtgcaagcatatctttaaaattaaatattttcaactattgaacatattcatatttttaaataaaggctacagtaaaccattatatcgaaatctgtgcaaacattttatatttaagataaattgggctgcgcatggtggctcacacctgtaatcccagcacttgggaaggccaaggcaggcagatcacttgagatcaggagtttgagaccagcctggccaacatggtgaaaccccatctctttgaaaaatacacacgcacgcacacacacaaacacacacacacgccgggtgtggtggcacatgcttataatcccagctacatggtaagctgaaccacgagaatggcttgaacctgggaggtggatggaggttgcagtgagctgcgatggcgccactgcactccatcctgggccatagagctggagaacctctaacttcgttacagaaaatccagacttctgtgtgactgcttgccagaagaaacatgtccaatttgtttatgccttccaaattatgcaagtacttttgattgaattgacctaaattatgtctaaaccctagccacagaggaatctgggaaatgttaacttttactcttcgttgtcacaggaaggaacgctaattcatcttatatcctccactttgttttaatgtggagaactgcgaagttatgttagcagaagaaaataaccacaatttcttcattgtgggcaagttaatattgagttaggcacatagtgtatctaaggctaaaaatcattatgaactcagtagtcaaggaagtgccctaagaaaaagttgtaaagatattttaaaagaagctgagaacatgaagccattaagaaatggtgtgtttacagccgagctagtgtgtttaactttgtgcattgttgtaacaccatttgttttgatacaggatatcgtttttttttttaaggtgctttttcccatatgcctaaaatttgttttaatgcatcacgtcaagtcatagcaactgaagaaatgtacatctaacaaatgatgttcattagcataaaaacacaaattaggttctttattttttaatttcagaatatgatgctgtggctgagaaagctggtaaagtagaagctgaggttaaacgcttacacaataccatcgtagaaatcaataatcataaactcaaggcccaacaagacaaacttgataaaataaataagcaattagatgaatgtgcttctgctattactaaagcccaagtagcaatcaagactgctgacaggtagagtatgcatgttaccctaacttgttttccctttccctgccttcacattggaaagggggttactatgtaatgttccataaaatgtttctcttactgttaatttattgaacctgtctgacacattacctaatgggacttccatgacggaaaacctataatgaacatttatcctatggccaattaaaaaggctggtaaacaggtatgccataggaaagtacaggtagactgtaactccccagttgctgtgagggcatagaaatcagttttgtttctctggtctcggggagggagtagttggtccttaatttaaatagatacaggccttaaaagaataagtaaaagaggtaaaaatgggatcacttagcaaaattaattctcttggtaacttacattttagtttttatttttattttttgatacagagtcttgctgtgttgcccaggttggagtgcagtggcacagtcagggctcactgcagcctcaatctcccaggctcaggcagtcctcccacctcaacctcccaagtagctgggactacaggaatgcactacaacacctggctaatttttgtattttttttgtagagaccagagttttgccatgtttcccaggcaggtcttgaactcctgggctgaagcagtcctcttgccttggcctcccaaaagactgagattacaggcatgagccactgcacccagccaccttaaaattttaaatacctagaagatttcattgtccttaaaaaaaaagatttatctacttaggtttttttttttttttttttctttttgagacagtctcgctctgccatccaggctggagtacagtggcgcgatctcggctcactgcagcctccgcctcccaggttcaagtgattctcctgtctcagcctcccaagtagctgggattacaggcacacgctaccaggccctgctaatttttgtatttttagtagagacagggtttcaccatgttggtcaggctggtcttgaactcctgacgtcatggtccccctgcctcagcctcccaaagtgctgggattacaggcatgagccaccgcacccggccttaatttttttagagtatttattgaagtgtgtctgaaataaagttaggtatgtatataaaatattgaaatttaaatagccatttctttttttagaaaaaattttaacaaattgattgcatattgattatctggttaaattaatccagagtgttttgctcagagataaggaggtaataagggagaagtagtgtcttgcttttttggaagtacttgttgccttgtcttgaattgggaagtatttgaaggtacaactttatgggtgtagagatttaacaatctctgacgagaaaatgacaaaagaatttgataatctaatggacagtgttgcatcagtctaaagttgaatgatacaagcagcttatataagaaaggcatttataattaaaaatatacaactcatcccataagtgtttgtataaacctacaaaaactgatttaaggatggtttagtaaatcataaacttaaaaatatatgaatagaaaaaatgtcacattaaatttcatgaaaagttctttagtaggttttcagaaacaataacaaatcaccttaccacatttttgatgcatcattttgcttctttagaaaccttcaaaaggcacaagactctgtcttgcgtacagagaaagaaataaaagatactgagaaagaggtggatgacctaacagcagagctgaaaagtcttgaggacaaagcagcagaggtcgtaaagaatacaaatgctgcagaggtatgagttgctttgtattgaagaggagatgggatgatactggaaccaatttaaagagctggatatatgacagtgcctagaatgtagtaagcactcatagacttaaagttttataactatcaatttttatttgtacaataagaatactataatttgtgaatttaaatgcttaaattattttaaaatggaaggggcatgaggagagattggtaattccttcatctctgtaatgtgaaaatgatggctctatttggaaaattctatctagcagttcttttcggtgtttaggaatccttaccagagatccagaaagaacatcgcaatctgcttcaagaattaaaagttattcaagaaaatgaacatgctcttcaaaaagatgcacttagtattaagttgaaacttgaacaaatagatggtcacattgctgaacataattctaaaataaaatattggcacaaagaggtgagattgttaccgtttagtttaattttaaacatattctttatgaaaaaggagggtttggggaggattgttttagggggttggggttcttaaattttgtttgtgagctacattgtgatttttaattctgtgatcacttctaaggtttataggggacataacaatataaattgttatatacagaaaagtctgagtaacgattagaattagacaactaccctttcaccctagggctgatctggacatttaagaaaagattacatggacacttttgagtgttacaactatttttcttgaagtcctttgaaaaataattgataaatcagtcacaactcctgttgttttcatagctgtgtaatttgtcatatttttttttaaacaatgaattgtatgtaatattatgccttctctaactctcccctaaattgaacttttagatttcaaaaatatcactgcatcctatagaagataatcctattgaagagatttcggttctaagcccagaggatcttgaagcgatcaagaatccagattctataacaaatcaaattgcacttttggaagcccggtgtcatgaaatgaaaccaaacctcggtgccatcgcagagtataaaaagaaggtatgaatgaactgtgtatgtatactagttggagttctttttagtccttagcctaaattctgatctttagttttgtataattaacaatgctgttggccgggcgtggtggctcacgcctgtaatcccagcactttgggaggccaaaggcgggtggatcacaaggtcaggagttcgagaccagctgggccaacatagtgaaacctcatctctattaaagatacaaaaaattagccaggcgttgtggcacgtgcctgtaatcccgggtactcgggaggctgaggcaggagaatcgcttgaacctgggaggtggaggttgccgtgagccgagatcgcgccattgcactccagcctgggcgtcagggcaagactacgtctcaaaacaaagtaataattaacaatgctaattatcatatcaaatttatctgaatagattttccctatcataatcttttcacaggaagaattgtatttgcaacgggtagcagaattggacaaaattacttatgaaagagacagttttagacaggcatatgaagatcttcggaaacaaaggcttaatgaatttatggcaggtttttatataataacaaataaattaaaggaaaattaccaaatgcttactttgggaggggacgccgaactcgagcttgtagacagcttggatcctttctctgaaggaatcatgttcaggtgtgtaattatgctgagtttataatcccactgttacctttttctacatattctccaaactcagtatttcttggaggtaggatgtgaaggcaagatgtacaacttgtttcatttactagtaaatactaatttgcttgcatgctatttatgcttgcagtttacaggggcagacagccagtatttacaaaatatttgtctagttcatcttttcttaaattttcaaggcatttttaacatgaggattgagaaattgtatttgataaggagaaagaatagcaagaagtataatacttagcttgctctttaaatcttaaaactttggtatgtgctcctatgtatgcatcctccaataacgtttttataaaataacagaaaagagaattcatatttgtgaaaagcaagttacagattcctaaaaaagatagtagaactcaattatggaaagcaaatcacaaagtcttaactttagctttacaggtaatttgactatgattttcttaatcatttcagtgttcgaccacctaagaaaagttggaaaaagatcttcaacctttcgggaggagagaaaacacttagttcattggctttagtatttgctcttcaccactacaagcccactcccctttacttcatggatgagattgatgcagcccttgattttaaaaatgtgtccattgttgcattttatatatatgtaagtaatcattttgggattttcattccagaaacttttaggggtatcctaaacattacacatggaattctttatttcttacaattgagctttttctttattgtctaataactccatctccatctcctctggtatcagtggagaccaaattattttttatttgaaccaaatatttccattttggaggagtaaaatataaattaaaaatgcaaattagtagcagaatcacagctagaatcctaggtcatcttcctagatcttttccactagaagtcaaaataaccaaattcctttcacactcaaatactgttttatgaattattcctgccatcattcctttacatgttatcaatgtaatgtttattgtccaaaaaatatttgaggttacatgtttgtgtgatttacctgttattacttaatgtttgacttttctttgtttctctttaggaacaaacaaaaaatgcacagttcataataatttctcttcgaaataatatgtttgagatttcggatagacttattggaatttacaagacatacaacataacaaaaagtgttgctgtaaatccaaaagaaattgcatctaagggactttgttgaactttatgctgaagattcttcaagttgattcagtgtattactgatttttttctatttgtaaaggattatgagttgtataaaatacatactccctaaactagatcatgaaactggtttctgttttatgcagttgtcatttgtaaagtctaataaaatattctctataattgcttctagattacaaaaatatgacaatcttgtaagtagcagactatggagaaaaatgagttacctggagggtcaggtaacttgccaaactaaaaagtatgttagttgaggcaaagtcctaagcaaggttgtgctatcaaggctcagcataccttcgtgggcctttgatttaccaacactggaaatgcctgccaactaatcttggatagattctttaaggcattccacttagcttgccagttgagacaatcaccacagttattacccaaatactatgaacatatttttgtaaaccagtcattctgaattatagtgatgagaatttaaatatatgcttttctagaatttgatgtttgaccatttatgacttaattaccagagagccagtaaattaggacagtgtttcaacaagcctaggctatctcgtaagttgaaaaatatcccactatagttgcttcatgagtatgaagtaagatggcctctgatttacactggttcaatttacaaattttcaactttatgataggtttatccgggtactaaatgcatttcaacttgatagtttcaacttatgataggtttaccaggatgtagtcccactgttgaggagcatctatttaggggttaattactttagtaataagtggaaagtaagataccttgagtaatgtttgcctataaaattgtcagcgtatttttacactattggctcaagaatgttataatgctaagggacataagttggcaaccacttggtttttggaaggactttcggtattgtattagaagtctgccctagctgttaaatttctgggtatttatcctaaggaattaattaaagagttaattgttcctttcttcagtgggccattgttttagatatttaaaaaatccaacagtttctatcataatgtaactgtaaaaatgtaaacacattattagcatggacttttaaataaagatttaaagaaagcaa

SEQ ID NO: 31 - DNA, 7375 bp, Homo sapiens
gggaagtgctgttggagccgctgtggttgctgtccgcggagtggaagcgcgtgcttttgtttgtgtccctggccatggcgctgcagctctcccgggagcagggaatcaccctgcgcgggagcgccgaaatcgtggccgagttcttctgtaagttctcgcgcaggccaatatatcggggggaacggagtcgtgacggctcagtaggcccacagctcggcctctgataccagagaagtaatctggggagaggcggctgcaggcgcttcctccagacgcgttgctaacgtggagctgcaggcctgcgtgctgctggggcctacctcgcggcgtagcctcttccggagcgtttcttcctttaagtgcagatccgtcccacctcccaccccttactttccgatacaggacacggtgtgactggggtgggccccagtgtatgcgtatgtgtgtgtttttcttttttttttttaactgcgagagcaccctcaccctcccactcaaagtgattattgggcatgaggctggcagtagacaagactttgggaacccttgttttcgaacaggccagctgcacgttctaaaggaacctggcaggatttgggagggaaaggggaagataaaggcttgtctggagcacagtgactattcagtcagttgctaactcgaatgcaacagcctattttgacatcctctagcctcataatctgaatttggacttggattacaatgaggtgaaatttggcaataataagttgatacactttggctttttttttttgccacgtgaaagcaattatctgttttacttagaagcaagacttttaaggatttttaatgccactttgtacctactctgctttcagcaagatacacgtgtgttcagtcatttatagctgtatagcctaatgaaaatatagcaacatctaaatatattttattttccagagttatgcagggataatgaattttctgtaacatttcttttgcttgcagcattcggcatcaacagcattttatatcagcgtggcatatatccatctgaaacctttactcgagtgcagaaatacggactcaccttgcttgtaactactgatcttgagctcataaaatacctaaataatgtggtggaacaactgaaaggtattttaatcattggaaacaatttgagtcttgcagattttctagcatcttaagcagtcatttttccgctctgcacatagaagtgtactgacatctcaaatatattttcaattgagaggaagaaaataatatataaaatggaagaaatacactcttcccccacccactacattgtgagtgggctgaatattttgatgttagaaatctgatatggctaaaaaaatagtcttcatcaactcccttagaagtggcttttgcagtaaatgtggccaaatggaacaggttggaattttacataattataatggtgttcactatctgagacaatatacactacatattctcaatataatgtattaattttctgtaactaattaattttctgtagtctaatgttatcattacattaagatcaaggaaattggattcaaccagagaactaaacttcaaaaagagaaaagattagctactaaataacagaacactcacagtttttttgtttgtttgtttttcacgtatttctatttgtcgttttcaaaaattctgccagtgattcagtaagccttttctgtctgaacactcgtttttctttagctgaagacattgatgtattacctgttgggtgaatacttgttcttcatcgatttctttttcctttctagaattcctgttagtttttctttcgtgttaccctccacttaggattctcatttctaattgttcaagtgtttctcccatttgatcttctaaaattttaaaaagtactacagcagccatcttttttttttaatttagaaattatttcttttgttgttgaccagaaatgtgtcttttttaccgtttttattgcatttttactaacccatttttaatatgcccttccaatgatggccatgtgaacttttttagcttggtaactctctttcaagctatactatcctctagataaactgttaacattgccttgccatttatgtgtacaggaggggaatcccacaacaacctgtggatgtcaggtctcaaattaacaggcaagggaagatagccctgttgacattttggcctgggtatttctttggtatgggtgcttttctttgctttggtgtgggtgcttttctgtgtgttatagaatgtttaccaacaactatggcctttactcaccaaatgccagtaacaaacccccttgctctgacaaccagaaatgcctccatgtattatattgccagatgtgccctaggggacaaaactgcccttggttgagaacttctgctatagtagattggtattgtcaaaatagcaagatgagacctcttttggtgtgggaatagacctctgttctcaagtgtacacaggaaagacactgataagagtgtccacctctcccagagttgcatccaaaattgggggtcaggaataaatcatctatagtgattcatagggctgtactcaggtcgtttggcctggaacctctagacaactatggatgtgtgtttttatcttaatttgctggagaagcaagcattgcctaagccaatggtttttaggttgtctcctttgagactgcgttaatgacatttcaccttatttgtgtctagaccttcctatttaacttgtcccttttattttagttaaagtggaaaaattgctcttccctagaggcaagttgttcggtttgttttttgtttggagtctcactctggcaccaaggctggagtgcagtggcgtgatctccgctcactgcaacctctgcccccacaccacagcctcccgagtagctgagattataagcgcctgccaccgtgcctggctaatttttatatttttactagagacagggtttcaccatcttggccaggctggtgtcgaactcctgacctcgtgatccacccacctctgcctcccaaagtgctgggattacaggcatgagtggctgctcatgttttgttttgctggccaattgttttgttttgaatgtaatttcctctagcctttttcagggtctttatcctgttctctcttatattttctgcttctgtgttttgattttaattatccccattggtttcatctctccagttttaaaggaagagcaaattaccacccagtctccttttcagagtgaaactaataaaaagttgttgataaatgccagggatcacaaggcccacaggccacatccaacaagtggcctgtttttgcactgcccacaagctaagagtgtttttacacttacaggtttgtttaaaaataagcaacagagatcttggtggccaataagcctaaaatatttagtaattactctgtttctttacaaaaacttcgctgactcctgaatatgctgtttcaatttccaagattacttcaaggctcaatctgagcccccgttctgtgtttataatttctctataggtgatctctgacctgtgtatagcttcactaacaacctctgtgtagtcagctcacaaacttacatctatcccaagcctctttctccagactcatatatccagcagctatatctttatgtagctatcccagagacaatgtacactcaagtatactaaaaactaaatttaggatcatctccaagactgatactctttaattctctttttttctctcaatgaatgactaaaccgtccagccagaaataaaagaaacttggaagctgtccctgaatcatgcttcttccttactatcgtgactaaacccaatacgttttaaccatgaaatctcttaaatctacctattgctccatatctaccagtttatcctcctacaagctttcattaactcttgcttgaattactgattgactaactagtgtctctagatcccctctttaacatctccagtccactttccgtatcacggctagaatgatagttttgaaatacaagtctaattgctttacatcctgttcacacacagtaatgacttccctggtcttgaagtatatatttttttaatttgatccaccaggctttgcatggtctggctcctgttaatcttgcaaggattactttgttttattttgtttgtttgtttcttgattgcacttgtagtgggctgcttccagccctctatatgctcttcccttggcagtatttgaggcctgtatcttctttcgtatccttttgcatatttaatgctgtttatccctagagctaaactcagaccttttctgacctccctgagtggctcaaattttcctttttttatgctctcattgcatcttacatctttctttcatagcagccattacaatgataatttctcatttattggtgtgatgagtagattaatgcccatctcctatgcttttatgttggattaggatgaaactaccacatgttcagtattctgtcctcagcaccaattactgtacctgatacagatactgagaatttgaaaacagaagttagattattgatggtgcaaattttcttgcacataggaggaggtcccagatagcagtggtaggaatttgctgaggatagggagtgggacccgagaagagagctactttatgatgcagtggaccaagaaagatgccttcctttttatatgttgcagattggttatacaagtgttcagttcagaaactggttgtagttatctcaaatattgaaagtggtgaggtcctggaaagatggcagtttgatattgagtgtgacaagactgcaaaagatgacaggtaaataggaattacattatttctactttgatatattttttttcaaaacttgtttttattactaattgagttctaattgtattgaactagttttatataaaatatagtttgtttctaatttatattttctaagatatcctcagtcacctatggaaaagaattgtgctcagtttagcatatcattgatttgtatatataatataattttaacataattgcctttagtctaaatcagtagttttcaaacagtatttatggtgatatatacaaaactacacatgatatactagatgaaccatttaataattgttctaagatatttttaactataaggaatgatattagactcacacaatttaagatgtagctctgctgtacttcctttaatgccatctacttcctaagacacttcataaatttctgaaggttccagactccctggaagagaaatgcattgtcctaggcatgctcttctataaactgagaaccatttcttatagtgaaatgtagtttgcttctgaaggctttggtgtattttaggaaatttttagcttataaaataatttgatatacaatttaatgttttatttgagaaaataggaaattagacatttaggcattactaaaaatgctgaaatgattataccaatacatattttagatatcacttatttttatttcaagagatgctgaagtttcctgaacttgaagtgattggcaaattttctagtcatctgatactaaatgacctgacactaagaccagctctaaaagatgactggcaggataaatgaagtaataaggatgaatgttgtgcctactaggttgtaggtctgaaggatactttcactcacattttttacaaacctcctttctcaaataagccctgcttatttgatgttgagagcatttaatcagataaataatctaaccactatgtttgaaataatttgttaagacctgaaatgaattaattgatttgatttttttttgacagtgcacccagagaaaagtctcagaaagctatccaggatgaaatccgttcagtgatcagacagatcacagctacggtgacatttctgccactgttggaagtttcttgtaagtattatacaacttcttgttgaattaaattgattggcaaaaagactaagctactgccgtaatcacccctttattaaattttgtcttatttatcagatttatgtaatataaattgaaggaaaaacattatcatgcaaaagtaatgtatcgtagtctccctttccacagggagacccacagtgaatacctgaaaccatggatagtatgaaccctatataatgtttttttcttatgcatacatacctatgataaaatttaatatgtaaattaagcatagtaagagttaataataaactggaacaattataacaatatgctggcatcactattcttgtgctttgggaccattattaaataagataagggttacttgaacacaatcactaaattgcacggaagttagatacaatattttctttactgaaataaatgttcattgagcaaaataaattaactagtgattggagaccaagccaaatgaccttttccagcagtgagtggttcaaaatagaagagaggcagcaagattagttttacttttagaaaataatatacttcaatgatcttatccccaatttaggttcatttgatctgctgatttatacagacaaagatttggttgtacctgaaaaatgggaagagtcgggaccacagtttattaccaattctgaggaagtccgccttcgttcatttactactacaatccacaaagtaaatagcatggtggcctacaaaattcctgtcaatgactgaggatgacatgaggaaaataatgtaattgtaattttgaaatgtggttttcctgaaatcaagtcatctatagttgatatgttttatttcattggttaatttttacatggagaaaaccaaaatgatacttactgaactgtgtgtaattgttccttttatttttttggtacctatttgacttaccatggagttaacatcatgaatttattgcacattgttcaaaaggaaccaggaggtttttttgtcaacattgtgatgtatattcctttgaagatagtaactgtagatggaaaaacttgtgctataaagctagatgctttcctaaatcagatgttttggtcaagtagtttgactcagtataggtagggagatatttaagtataaaatacaacaaaggaagtctaaatattcagaatctttgttaaggtcctgaaagtaactcataatctataaacaatgaaatattgctgtatagctccttttgaccttcatttcatgtatagttttccctattgaatcagtttccaattatttgactttaatttatgtaacttgaacctatgaagcaatggatatttgtactgtttaatgttctgtgatacagaactcttaaaaatgttttttcatgtgttttataaaatcaagttttaagtgaaagtgaggaaataaagttaagtttgttttaaa

SEQ ID NO: 32 - DNA, 14649 bp, Homo sapiens
ggcgggcccaaggagggagtggaatggccgcgggcggctcgacgcagcagaggcgacgcgagatggcggcagcttcagcggcggcgatctcaggtacttgagcccggcctgggcaaggcgggtaccgacgtctggagtttagtgggagttatgtgtcggagtgtggtccaggctctgcgggttgtcgcggagaggcggccatggcgcaggggcggggagagggggacggtgagagtgtggggtcgcgagccggtcgccccgcctggctcctgccttctccctgtttcctgctctccccttgggtcagtagactcgggtctccggtccaggctcttggcttgaaccccgcgcactttttctttgtgagcttcggtttcttcgtctgtgaaacgggggtcatggcctcatccctggagatcacctgaataagcaagagaagagtggcggacgctctagccacgaggacgagaagaagggagccggaggcgtgtattgggaagggttctgtgtgggacatggtgtttgggtgcagagacatccctgagagatgcaagaggacgggctgaggaacagacccggctgctgctgggtttgagttggcagcgtaagatgctctgcgattacaggaaaacgaaataaaagactaaaatttcctttcactctagcatggaagtgaatgctattttagggttggaaaggctgttaggacacccaaaatcttgtatgtgagtatttgtttacatgtgcctctctaacccggagacttaatcctcgttagtgatgatggtgagcgccatagtaattcactggagccctcgttagcctcgtggggaaacagacatttaggagaatgcctaacacatgtagagctcttgctatgtgccaggcacagttgtaggcattttatggtggtgaaccatttattgtccacacaatgctatcaggttgttactattactgtctttgttttacacaggaaactgaggttagtttgttcagagttaacacaactagtaaatattggggcttgaattcgctctcaaggagtctgagtgtagaacctctgctcttaaccattatgcccaagtacatgttatccctgctggctgagcacagtctccccttacccttcgaagatgcactgtgtccggtgcatggtagatatgaaaatgcctgaatgaataatgtcccttcctcgaggaatttacagtctgtttcaatagagtgtcacatacgtagatgtaatacgaaacacaatgagagatgtgtataaactgagggtgtggaatctgaagtaagcccttgagtattctgggaggacttcattaagggagtgaatgatacttgagatgggtttcaaaggttggataggagtttgccaggccttgactaagaagacaagaacagcaagtgttttcttatttatgatgtaagatgctctcttagctcaatttcctcatcaataaaagggagaagagtgaatgaaatttaggaattgtgaaagaagggaaaattaataattgctagcctggtccaagctcaaggttgcttttatcatgaaagggctagactcttgtgcagtaaataattgtttacatgtggccctcccctcttccctcctaccctggactgtgagccctggggcaggaatggccgtgagccattttcatgatggaaatgaacaagccagtgattagtagtttattcactaaatcttaatttttttcagcaaatacttcttgagggcctactctgcgccaggtgttggggttagaaaggtgagcaggataaaacttgttctcacagttggcagtcaggtggagaaagtgacaaacacgcaatagtggggtgtgacaaatgcttatggaggggctaacatgagctgtggttgcacctgataaagccttagtgtctaccaggaaagggtttttggttttgttttttaagaggagttaaaatgtgtttaccttagtcactccagggtggggtggggagcaatgcagatattctagggagagagattaacgtggacaaaaatccaaaggtgcaagagaacttggagttttgtaggaagtgaaggaaattcatcatgactggtaacttacactgcaaggaaggaaacagagggaatgactagagggcagggagacaccttgctaccaccagcaaggaaggctgtaaagaccatgaccttgggcagaggtagtgcagtgggagtggagagaagtggacttgttcaagagagatttaaagagatagacttgacagatgttaatgatgaactgatgtgggaggtaagagacgttggagttaaagactcccacttttggggttggtgccattcatttacatcagagatcaaaggaggaggctgcagagagatggggaaggagggttcagtttaggacaggtggagtttaagaggagccgtcggctgggctcacgcctgtaatcccagcattttgggagaccaaggtgggtggatcacgaggtcaagagatcgagaccatcttggccaacatggtgaaaccctgtctctaaaattaatcaaaaattagctgggcgtggtggcgtgcacctgtagtcccagctattcgggaggctgaggcaggagaatcgcttgaaccgggaggcggagattgcagtgagccaagagcgccactgcactccagcctggcgacagtgagattctgtctcaaaaaaaaggagccgtcagggcagccgttcagaacgtgggctgcagttgagagctcttgtgcagaacgtgcaataggacttatcagctgtaagatgttactgaagccaagagggcgggtgacctgcctatgaaatgaatctgagtggtctcagctcggggcaactttgtccctcacaggacatttggagatgtctggagagatttttagttgttacaacttgagggtgagggtggagaatgctactggcatctagtaagcatatgctaacagtctaaatgcacaggacagccccacaacggaattagccagcccgaaatgtcagtagtgctgaagttgagaaatgctggtctagagaaaggatagacggatcctaggatgaggagtgaacagaaaactaggtaagacaaccaggaaggtggggggcatggaaatgaagggaaaagtgtgtttcccaagagtgtcgcatacttctgggaggtccaacaggattgaggctgagtatgcctactggatctagcactagggaagtcatgggtgaccctgctgaatagtgagggcagaagcaagttgcagggatggaggagtgggtagcaagagaaagggtgtaataataacagctaaggactgagcagttgctgccaggcactgtgctaaacattgtatgtacattattactttgaatcctcacattcttatgagatgcaaagatgaaggggctaaggaggctgaggagggttcatataaagcactttggagttagatcttcatttgaagctgtcagtcactagctgttgaccctgggtcagtcagctaacccctctatactgaggtttcctcatctggaaaatgggagacggacattaaaaagcacttactggcctttcaccaaataccagataatgttctaagcacttttacatgaatcaccttaattactctcctaacaacctaacaaagaggtatttttattcccattttgcaggtaaggaaattgaggcactgggatggaaaataatttccctaggttacttagctagctgtaaatggcagagctgggatttcaacccaggccattttaccttgaatgatgaacctacctactatgtgctagtcactgtgctgccactttatctggcacttatttcaattatcttttttttttctgagacacagtcttgctctgtcacccaggctggagtgcagtggcgcaatctctgctcactgcaacctccacttcccgcattcaagcaattcttgtgcctcagcctcccaagtagctgggattacaggcgtccaccaccatacctgactaatttttgtatttttagtagaggcagggtttcaccaccacgctggtctcgaactcctgacctcaggtgatctgcccaccttggcctcccaaagcgctgggattacaggcatgaaccactgcgcccggccaaattctcaaaaagcccaaggcccacccccaaccttattttacagacaaggaaaccaaggtccaaggtcacaagctaataaatgtcagagctggaattgaagtccacttctgtctgaccagagtctacactctacctcattactgacttccccttccccttagattgatcactgcgcttccttaagtgcttctacatctgccatctttctgttctcccaaaacatcctgtgaaagcaggcagaggaaggtcctgcacatatttttgacaagtcagtgcacctcagttttctatctgcacacatgcatctgcaggtttttacctgcttgctcctgactttcaggattgccatgaggaacaaatgagaactagatgtccaagcgctttgctaccataacgtgagaaatggtattagtagccccatttatcagatgatggaatggaggttcagtttttgaaacagcccgtctgcttatgggcatgccttacttaggtgtaagattctttgtaggggtcatctgtctgccttttcgtcttgctgtttctgtgttggctacgtataccagccagccttttgccttctgcgaggcctatggctcctagcaaccagctgctaccaccagcaaggaagggaaagagctgccaggagctttcccagttggtacataataaggaagcaatacagcatcctattaaaagcagatttttagaggggaagagatctaggtttgaattccactatgagctacagtatgttatcctccaacgtaaaatagagtaatactctccttagatattttcagctcatttaacccccacaaaaatagagggcttttctttttttaagttttatcttcattgtgttttctgatgataaaaataattcagttgccaattctaaaacaaaacaaaacaaaaaaaacttaatcatctgaagcaaattcagggttaagtttacatgagagaagaattgcatgtcggtggtttttgcagaacccacataattccccatcaagagaagatcatcattaacagtttgcaggggtgggtgggtctgtgagtatacatacgtctcaatacatattagaaaccccagttaagaaatggaggtacaggctgggcagggtggctcacacctataatcctagcactttgggaggccaaggcaggcagatcacttgaggtcaggaatttgagaccagcctggccaacatggtgaaaccctgtttctactgaagatacaaaaactagccaggagtggtgttggggacctgtaatcccagctactcgagaggctgaggtgggaggatcgcttgaacctgggaggtggaggttgcagtgagctgagatcatgccactgcactccagcctgggtgacagagcaagactgtctcaaaaaaaaaaaaaaaaacacacacacacacacacacagaaaattctggcagttcgctctctggtttaggtttcggtcagatgtcaacccttttaatccttagaacaaccctgtgaggtgctggtctacttcacccttggcaattcaaaacatgtcctgggccaggcatggtggctcctgcctataattccagcactttgggaggctgaggtaggaggatcgctggagcccaggagttgaagacaagcctgggtaacctagtgagactccatccctctctctctcttttttttttttaagtgcccagcatcacctgggagcttgttagaaatgcaaaatctcgggcatcaccccagggagacggagaccaaatccacattttcacaagatcctccaggttatttgtgtatacattacagtctgagaagcctgctatacacctgctgcacttgcttgtagagcagggaaggcactgaggccaagcttaggggtgtccacaacatgaccagggcagaatgagcttctccaacatgagctgtggcccccagcccgcccagcaaagttggtccctgcttcttctgctaccaccatacttcatgtctaaaagtgatcttctctcctccaggagctggtcgctgtcggctaagcaagattggagctactcgtcgtccacctccagctcgcgtaagggtggctgtgcgactgcggccatttgtggatggaacagcgggagcaagtgatcccccctgtgtgcggggcatggacagctgctctctagagattgctaactggaggaaccaccaggagactctcaaataccagtaaggttcaggccactcctcttccctcatgccatcacctccctctcctaggcctgcccacgttcccctgcctccccaggatccttgctccctccttagcaccgctttgttccctgagccttcactgttcacttaggaaatgttgacaggtgcccccatgatgggccctctctgggatactgtagggagagatgagaggttgaatcaaacatacattactgtgcacagagagggaggagcaatgagggtgagcaggtgagccccaagtagaggctgggggacatatcaggagggttggcggaacacagacctgccagccagcctacccaagctgcagctgggtagtgtcagagaagaccacccagatttggggacagaactcagaagggcagctactttataatcctactggggatttaaagttcaaactccttggcctgtttttctaggcgggggctggcaaaccatggcctgcaggtcaaatctgatcaggagtaagattttcagtaaataaaattttatcgtttatttacatattgtctatagctgctttctgactacagtggcagagttgagtagttgtaaaaggaacacatggcccacaaagcctaaaatatgtacaatctgcctttttacagaagtttgctagctcccatactaggccgttaacaatttgggcttcagtttctttccagcctcattccctcaatatatattaaactccctgctgtggcctaagctgcacttctccaccagaacgcagtggataggtgattggtatgtagagtctagttcagtcataagcagcatcctctattttccccattatggtgtaaaatacaatgttctacacatgtagccatttgaaaaagactgggaagccttgcttttttgctattcttgattctcagaatttctttctttggtcaaaatcttccttccttgagcagaatcagttactcctttgagagtgtgttcttatcttcgtttcctaaatcacagcaaagtgtggatatctatcctaccagactgaaaaactccaagagcagggatatcagatctatctctgtattcctaacaccaatagagagatgaggatggagtaggtgttaggtggatgctttttaaggtctttgtacaagaaaggggatagagacgttctcttaaatccaaggtccagatgagagtagaatcccttacccacccccaccccactccaccccttacacacacacacacacacacacacacacacacacgctaatttctttctttcttcctgcaggtttgatgccttctatggggagaggagtactcagcaggacatctatgcaggttcagtgcagcccatcctaaggcacttgctggaagggcagaatgccagtgtgcttgcctatggacccacaggagctggtgagggagccagaaaagaaacagctatgggtcagaaagggctggggaaacggagaggaaaacctcacagttttctccactctcttcccagggaagacgcacacaatgctgggcagcccagagcaacctggggtgatcccgcgggctctcatggacctcctgcagctcacaagggaggagggtgccgagggccggccatgggccctttctgtcaccatgtcttacctagagatctaccaggagaaggtgaggccccgtgctggttgggagaggagcaacaaagggtcaaagtaagacctggttctagaacatgaagctctgctgtagcagggaggtaaggtgagacctagaaagacagagactggggtagcagatggtacaactccgagaatagaacagagaaaggaaactgatccccaggaagaaacagcctctctatggagaattgcccttccccttcactgcttacacaggtattagacctcctggaccctgcttcgggagacctggtaatccgagaagactgccgggggaatatcctgattccgggtctctcccagaagcccatcagtagctttgctgattttgagcggcacttcctgccagccagtcgaaatcggactgtaggagccacccggctcaaccagcgctcctcccgcagtcatgctgtgctcctggtcaaggtgaggccgcagacaggggcgaggacctgggaagcccaggagcctgagctaagcacgagacctttgttcttacccccaggtggaccagcgggaacgtttggccccatttcgccagcgagagggaaaactctacctgattgacttggctgggtcagaggacaaccggcgcacaggcaacaagggccttcggctaaaagagagtggagccatcaacacctccctgtttgtcctgggcaaagtggtagatgcgctgaatcagggcctccctcgtgtaccttatcgggacagcaagctcactcgcctattgcaggtcaggcccacctgtctcagggaagaaggggctgcagaaggaggttctcaggcctgctgtggggtggggaatagcagttgaggcataggaaggctgggcttctgacccacccactgcctggtctcaccctcaggactctctgggtggctcagcccacagtatccttattgccaacattgcccctgagagacgcttctacctagacacagtctccgcactcaactttgctgccaggtccaaggaggtgatcaatcggccttttaccaatgagagcctgcagcctcatggtgagaactgggggaggcaggagtggaaacgctgggtctggaaattagggagtttgttgaaaccaccaagcatcagcacagaggctgaccacccccaatccctctctccaccccatcctccaatcatctagccttgggacctgttaagctgtctcagaaagaattgcttggtccaccagaggcaaagagagcccgaggccctgaggaagaggagatcgggagccctgagcccatggcagctccagcctctgcctcccagaaactcaggtgagcagtggggccttgggtgtatccccttcctgatgtatggcttagcagcagagctgcaatgcccgtcagatccttgagcagagagctgtgatcttgttcctctcccattaaattcaccctaggccggatgcggtggctcactcctgtaaccccagcactttgggagactgaggttgggtggatcacctgaggtcaggagttcgagaccagcctggccaacatggtgaaacctcatctctactaaaaaatacaaaaagtagccggatgtggtggcatgtgcctgtaatcccagctacttgggaggctgaggcaggagaatcccttgaacccaggaagcagaggttgcagtgagctgagattgtggccattgcactccagcctgggcgacacagcaagactccgtctcaaagtaaataagtgaattcaaccctggctaggcacggtggctcacgcctgtaatcccagcactttgggaggccaagacgggtggatcacctgaggtcaggagttcaagaccagcctggccaacatggtgaaaccccatctctactaaaaatacaaaaattagccaggcatggtagtgggcacctgtaatcccagctactcaggaggctgaggcaggaagaattgcttgaatctgggaggtgaaagttgcagtgagccaagatcatgccactgcactccagcctaggtgacagagcaagactgcatctcaataaataaataagtaaataaataaattccccccaaattctactccattgaatcactaaagtctaagattaatctctcctcagtgctgctgccttggggacctaaggaggcctcctcctggggatcctttccattttccaacccctttagccttcagcaaaacttctcactttgggacagctgtttcaaggatgagcatttttgcttctggttcaaggagtgatctggatcagatctttcagatccatgagagcaaagcaaaggagacttggaagagctgtcctgctgagaccatctggtctgtgtgtcagtgcccagcttctccatgactctccggggagccagctgctgtcctaactgcgtctaccctcaatccagataaagcctctaaactaagtcctttgtgtcacctcctgccccaactccaatcaccccacctcatggcccagtatgtactaatcctcaggtcatctctgttcaggggtcttgctttctgtgtctggccacttagcccttgcgctattccctccaccccccaggagccagttgcagttttaactttgccctgtttctacccctagcccaaataaagcctgtgaactactaaacagaggtgacctgaggtggccaagggttagtgcccactctgtcccagggggctactgtagttaaggaagatgccacacacaagaagatgcttgtgcactcatgaccccatctctcagtcttgtctttcccaaaccatctgtcagcactccccactgctgtgtgcacccagaaatgtgcacaggtaagctgtcagacaggcactctgagtaaggggaagctcagagttgggcacatcaaacccagcagacccagagcttgggggcctcacaggagagcaagtcagatgggaacatcagtatatgataccaggtggagaattcagaatcaggaaggagtagctgctgctgctgtgagagtcaggaaggaagagatgacttctagtgtttgcccacgtatgttctgatcctgtttttccaaggcactagcatggaaagcacaggagtgtccctgtcctccaggagccagttcacagcataggaagggagatgcattgttaagcttggcgtcatgggaaaggtggcatcaaactgacctggaaagattattgatacagatgtgaggaggtgtggggcaagattccaggcaaaataaatgaatgttagacgttgctgactgggcgcagtggctcacacctgtaatcccagcactttgggaggccaaggtgggtggatcacttgagcccaggagttcaagaccagcctgggcaacatagtaagaccccatctctacaaaaaataaaaaaattagctgggcatggtggcatgcacctgtggacccagctactcaggaggctgagacagggggattgcttaagcctcaggaggccaaggctatagtgagctgtgatctcaacactgcactccagcctgggtgacagagcaagaccctgtctcaaaaaaaaaaaaaaaaaaaaaaaaagaatgttaagccttaccgtgctcagagtcagtcaggactgcttgaacaggccttcccagctgcccacagcagggaagcttggcagctgaggtcttcggtggatttcaaagccctgctaaagatggcatcctctgtgatgttttccgcaactgctcctccaaatggataggcactgtcctggctgtcaccttattatggtctcttgatttcctcagtagacagtgcctccagggcagggcagtgtcttaggtctctcatacctggcactcaagtgttcgcctgatttcctggcatccccgagcagtcacttcacctgatgaagacactgcacccagagaaactggatgcctagcaagttaacattaggttctggagctacaggatataccaagttaaggtgtggtgaggggagtcctgctgctgtaggtggtgatgagggaggaggtaggtggggagcaacttctttttctgctcagccccctacagaagctaagcagcatggacccggccatgctggagcgcctcctcagcttggaccgtctgcttgcctcccaggggagccagggggcccctctgttgagtaccccaaagcgagagcggatggtgctaatgaagacagtggaagagaaggacctagagattgaggtacgtgttttagggatgtgggagctggattcctattggccttgagaagcaatccttggatcttcagacagggaaggacactcaggctggactagagtccagttttctcccaataccggaagttctccagcttctgcttgaatgtccttaacatggctgaactttgacagacaattgagaccagatgtgagggtgagaagaaaaagttcaaagtaaaagcaacaaatgttaaacattacatttcctaaagcccagctcaattaattgaggactgtgcttgaaaagcctttcccttcaatatttgcagaggcttgttccacctctgggtagccccctaatcacagaaagcccttaattatgttaggctccacctgtctcctggtaacctcccactggtcctagccctgccctctgggggctcagagccttgcatactcaccctggtaacccactcccttcaggctgccctggagttgggtctggatcacatctccctgatcctttccaacagaggcttaagacgaagcaaaaagaactggaggccaagatgttggcccagaaggctgaggaaaaggagaaccattgtcccacaatgctccggcccctttcacatcgcacagtcacaggggcaaagcccctgaaaaaggctgtggtgatgcccctacagctaagtaagtttgactccaggggctggggggccaaggcagctgagatcctataagggaggaagtgttaggagcagctgtctccatgtcattcatattctcccaccacataccagtcccagggaggggtgaggaggctctgaggcagtgctgggggtgctctgccctcgggtgtttaggacagtgggatggacaaacgagtagaggattgaagataatgcaagactgactgaaattcctttaaatgcgggtataaaaaaggtcatgtggaaacacaacaggttaactctggatggaggggagctggggaatcagaaatggaagaatcgaagggctaccagggagggtgaaaagtaccctttgccctgactccaattctcgattcctactttcagttcaggagcaggcagcatccccaaatgccgagatccacatcctgaagaataaaggccggaagagaaaggtgaaagtagctgggggcttaggctacacctggagcccagaagtaagggggagtaggctctagggggaggagcgttggccttggggttaaacgaactggatgatggccgccagctactaacagacctcaacttgcttacccctggaatgtggtgatggatggttccttgcagggcatttagggtggaaggcagtgatgtggatgtacctcgcagagcggatgttccactgtgtagcctggcttctaccctctacaagcttaagagggaaaacttagggaactatgacctaagcagtcaagcaagaaaccacacatatgcacatacccagaatcgaacaccactagaactacccaaaaactgagatggttgggggaggtatcatttattcatattactttctcccatgtactttttgaaagacagcttattctttcccttttagagatgagggaccagatttaagagcttattttgtgctttacattcattaactcacttgatctccacagcaactccatgagaagggtgctaatattaccactgggtactgagtagtacctctctttcactagttgcataataagaattaacccagagagtgacctgagggcgggattttggacacacttgacaagagaggaagaggctggagcgcaggaggtagctggtgctgggctcctagtcttggcagaggagcccaaagcacttggctgccctgcgtgtcactcatctccctttgcctcccagctggagtccctggatgccctagagcctgaggagaaggctgaggactgctgggagctacagatcagcccggagctactggctcatgggcgccaaaaaatactggatctgctgaacgaaggctcagcccgagatctccgcagtcttcagcgcattggcccgaagaaggcccagctaatcgtgggctggcgggagctccacggccccttcagccaggtagcagcccactggactgggggagggcgggggcgggggagaccgggtacccccgagaccctgtcccctatcgatcctgtcccgccaggtggaggacctggaacgcgtggagggcataacggggaaacagatggagtccttcctgaaggtgaagtcacggccctgcccctcctctgcctgtcctgcgccccgcgcccctctctaacgtcgctgtctccctccctcctgtgttgcaggcaaacatcctgggtctcgccgccggccagcgctgtggcgcctcctgaccgtcgtctcctcactccgccttttcaaatttttgtataaccccgtgttgtgtaaatacagtttttgctccggtg

SEQ ID NO: 33 - DNA, 15219 bp, Homo sapiens
gtggcccctgagtgctgggtgggaccgcggtgactgaacctagaaggtggagaggaatcgtcctcggtgcccagaggcggctctgcagccccgtgacggcgaccactgctcccgggccgtgcttccccaagtagtccgatggcagcggctgtgccgaggcgcccaactcaggtaattgtggtgccttctgtgccctcaggtcaccccatcgtcacccaggtcctaaaccagcgagggagcggctcctgctcgtgggtctgtagccggtacccggcgtaggaacactgaggcgctcacaggaggcctctccttgtaaccgtccagtgggttcacgttgccagctgcctagacagagccgatttatgaagactggggaattgcgatggagaaatagtaattcacgcagagccgtcctgctgttcgggagacaggagttttattattcaaatcagtctccctgagcattctgggatcagagttttcaaaatttggcgggtaggggcttgggaagtggggagtgctgatcagtctggttggagatggattcatagggggttaaagtgagtttttcatgctgttttctgttctgggtgggatggcagaactgattgacccagattaccggtctgtgtgttgtccgctgatccatccagtgcaggatctgcaaaatgccccaagcactgatcttagatattggggaaaccagccccacaccacccagcagataccccgagtcctgcggagacaaaggagttagaaagagacagaatacgcatttaaaaggcgggtccaggtggccagagcattggaggcttcctggcggcccagagctcttgggctccacccagtttattggtttacaagctctttgttcttatggctgattggagggggaggaagcgatcaggaaaaggattaatcagtaaaggagaactcgtgagtcattccataagatgtaaagcactggccgtttctgtgaatttccttgaacaaaggcgtgtgtctaaactacttaagatctttaacttaactgaaacgggtggctgcgggtttcaggaggagccaagatgtttgattatgctccactgcttcaagggagtgtgatctccctgagcaacccatggaatgctgctgaagagttatgctctcggggcataaagacatgaaggcaataaggagacttttctcctcagaggccgcccatggcttcccatgggtgtctcacacaggggagaccaactcaactagcaccccagaaactcacattaggttttacaatagtaaggttatcttcaggagcaacttggggaggttcagactcttggagccagaagctgcatgacccctaaaccgtaatttctattcttgtagctaatttgttagtcctgcaaagacaggctggtccccaggcaagaaaggggtcttttcaggaaagggctattatcaattttgtttcagagtgaaaccatgaactgaattcttttccaaagttaattcagcctatgcccaggaatgaaaaaagacggctgaaaggttggaagcaagatggagtcggttaggtctgatttctttcactgtcataatttcgtcagttataattttgcaaagtcggtttcacctgtttctgacaccagtgggatgcagtggggagagtgacaggcacaggtaggggtgcaggcaatggcctgcagatggacagagctggaaggatggaacctggggttcacaggcatctgtcaggaacaacgtgtgagatggagctcttcctggtagagcaagcaggccaggggctgtgcattcatcatgaggattctagaagccatggagagttttgaagaaaggagggacatgatccaaatccaggcttttaagaagtttcccaaaggccaatcaaaggaagaacatcatagagagagaggatgaggactttggggccttgggaggttgaatccgttttgtagatcacatagatggtagagatgacattttgcactgagaaaagcaggtcagacaaccagccttagggttacctggttccagggacaagaaagggttcagggagtcctgagcttatcaaatcctgtgacatgtttgtaatgtctgcctttcccctcaggcactcctggctgcagaagcacttagggaacccacacagggaagtggagggtgttccattccctcattggtcctgacgccatctacaggttctctagcttgtggtgtcctgggactcttaagtgccatttttttcagtcctttgatccgaggaccctggagaatctctgaagccaggataccaagtccatgacaggttatatggaggtattcccatttctgtcaaccaatgtaaacacccttgtaagattaacccaggatttgctaccaggttgtgaaatgcttagagataaaacggatcaaagtcaggaggtgatattaccacagttctacctggctacaggcttcatctggctggaccttgttgcatagactgtgggttgagggaagaggaagaaaggtcagagataaggctcctgccataatccaggtgagggttaatggatcagataagtggtaaatcacatgggtctggattcaggattcactttttgtaaagagacagctaggttttcttttttttttcttaacgtggaatttcagtcttgttgcccaggctggagtgcaatggcgcaatcttgggctcactggagcctctgcctcccaggttcaagcaattctcctgcctcagcattcaaggtagctggcattacaggcacccaccatcatgcccagctaatttttgtatttttagtagagacgaggttttaccatgttggccaggctggtctcgaactcctgacctcaagtgatcgtcacatctcggcctcccaaagtgctgggattataggcatggaccaatgcgcccagccgagacagctaggcttttttttttttttttttttttttttttttgagacggagtttcactctcttgtccagcctggagtctagtggcacaatctcagcccactgcaaccttcacctcctgggctcaagtgattctcctgcctcagcctcctgagtagctgggattacaggcatgtaccaccacactcggctaatttttctatttttagtaaagtcggggtttcaccatgttggccaggctagtctcaaactcctgacctcaggagattcgctggcctctgcctccccaagtgctgggattataggcacgagccaccatgccttgcagacagctagattttctaatgtggatgataggagcatgaaagaggaatcgggcatgagcccaaggtttttgatcttagcagctgtaaccatgcacactgcttcagctgagatgacgttggtattgacataatattcactgtggatatccagagggttgttttggccatatgaagaatcagagaccaataagtggtggcatcaaatcgataactagacatactggatggggtatctgggagggtgttgatactggagacatccaatatatgaaagctaatgagtgaactatgattagttatgggtccatttaggaggacatgcttcagattatggtggtaaatcttttcagggggcagaaaggtgtgattacaggctgaggactggatctcttacttacgtcctcaattgatgttattgggcttcctaaacacctgagagggtgtgagtgaccatcataacaggacatttaatacagtagagtttggaaggggacatagacatccaaagagataatagagaagagatagatgcatgcagaagcacaggagtaattcagggaagatgacacttaggcctgagttggtgccaaagttgtaacttttttgtttttttttttttttcagatggagtttcgctcttgttgcccaagctggagtgcaatggtgccatctcggctcactgcaacctccacctcctgggttcaagcaattctcctgcctcagcctcccaagtagctagtattacaggcacctgccaccacagcaggctaatttttgtattttcggtagagacagggtttcaccatgctgaccaggctagtcttgaactcctgaccgggtgatctgcctgcctcggcctcaaagtgctggaattgcaggcgtgagccactgtgcctggccagttgtaactatttatcactgtctggactcataaacattttgagatgactttgggagtgcctggggagtttcattcagcctggtgcatatgggcagtgaaaaatatgctcatctgtgatagtagatgtggtttggttcacaaatccaggggctgggctttaaacggcattaggtggacagaggagggttgctacagctgaggtctcagctggtgcagcacaaaagtgaaatagggccatggctatctgaagccatatgtggttctgtgtggctatggagtcattccaggagacgttcacaggatgatttgggattaccactgctattgtaaaccatggaaattctgtgttaatattggatgctatttgtatttgtcaagcatagtctggatgcttatccacattttggtataaggccagaattgaaggcccaatatgatgtgtcactttgacatcttgtgaaagtgggacaaccttaaaaggtgtgagtacaaatctcattcccactctgctctcttgaataatgtatcctagcctaacagcccgttttatcaaggtgataaggcagggttccaggttgttatattttgtggtgggtttcaattccatccctaccagcagagttatggaaacaaaccattgcatattcccaagggaatcatgggccgttataccctcttcatcttgtgaaataattttatttgtaggcgctgggtgtggtggctcacccctataatctcctcactttcagaggccaaggctggtggatcacttgagaccagaaattcaagaccagcctggccaacatggtgaaaccccgtctctactaaaaaaaaaaaatacaggccaggcatggtggctcaagcctggaatcccagcactttgggatgctgaggtgggtggatcaggaagtatggagatcgagaccatcctggctaacacagtgaaaccccgtctctactaaaaaaaaaaaaatacaaaaaattagccagctgtggtggtgggcacctgtagtcccagctactcgggaggctgaggcaggagaatggcctgaacctgggaggcagagcttgcactgagctgagatcatgctactgccctccagcctgggggacacagcaagactccgtctcaaaaaaaaaaaattagccgagtgtagtggtacatggctgtaatcccagctacttgggaggctgaggcacaagaatcacttgaacctgggaggcggaggctgcagtgagccatgattgtgttcctgcactccagcctgggtggcagagctagactatgtctcaaaaaaatcccccaaaaataaacttttacttctggggatgccagagaggggctgaaggttggggaaactctggtgggggtggccatgggcatgtgtctgtacagtataaagaatgatatatatttaatgagagcgaggttgtctgatggactcaggcagctgccttgggctttacgtgaccttggatatcgctgttcagaagggggtgtgggctttttttgttttttttttttttgagatggtgtctcgctctgttggccagggtggagtgcagtggtgtgatctcggctcactacaaaccccgcctcctgggttcacgccattctccggcctcagcctcccgagtagctgggactacaggtgcccaccaccatgcccggctaattttttgtatttttagtagagacagggtttcaccatgttaaccagcatagtctctatcccctgactgcaagatctgcccgaatcagtgtcccaaagtgctgggattacaggcgtgagccaccgcacccagcccagaagggagtggacctttttatgtcaggacctcagcatggatacctatttgtccacctacttcttgttgctgatggcatttgaccagcaggcccatgaagagacaaaggcaccagtggatgtggtttcaactccgtgttggggaccttgggaggaggatgggcaagggtgggtgtgtgggagaggtgggttgtggtacctcagcagaggggctgcttgtggtttcatctgtcactatcatagcagggcactgtgacctttgaagatgtggctgtgaacttttcccaggaggagtggtgtcttcttagtgaggctcagaggtgcttgtaccgtgatgtgatgctagagaacctggctctcatatcctcgctgggtaagttgctcacgctcacctttgtgacctgagctagtgttactgttcccctgtttttcattgacaggactgtctttctcacctaaggagcctggacacaggttccttctgcacttctctgtgtaagttgtgtggttcgtaggagtaaggtgtgtgtattgccttttcctctcctgttttttttttttttctgagacagtgtctcgctctgtcacccaggctggagtacagcggcgccatctcggctcactgcaagctccacctcccgggttcatgccgttctcctgcctcagcctctcaagtagctgggactacaggcgactaccaccacgcctggctaattttttttgttttttagtagagacgaggtttcaccgtgttagccaggatggtcttgatctcctgacctcgtgatccacctgccttggcctcccaaagtgctgggattataggcgtgagccaccacgcccagccaccttttcctctccttaagcagctccaacacctgctttgctccaggctcccagggaaggagtcagagtcaggagtcttataggcaccttaatgtatccactttgcctgcctctggctgtcaggtgactgtccaaatcggtagctcttgtgtgcccaggttctattaacacttccttcctctatctgacaatgctttgtgcctccctgtgccaagaattgccttcattgacattgtcactacctacatagaccatagaccatagactcttcttgcaagaccctgcttaggaattcttttgtaatacttaccttactctcctgtgggctgtcaggtgcttagttgtcctgagctagtgttggctgttcatctctgctatctctcctttcatagttacatcgtcgggtcctatgtactgggtgtgagatggagagtcctccatgtttgacaagatgtggttcaattcaggctcatcacgataggctcaaagggagcctgtccctcaggagtgccatgctgggggagggcatgacttcaggggtttatccaaatcataccagaaaccatttacatttgccaagtatttttggggcaatatgagtaggcacacactatttgtctttttctccccattgttgagagtttcacatgtgttagttctgtaccttttcatttctgcagtgatatccaccccagcactaatactcacatttctggactccacatctcacccatttttcttttgctttcatctgcagttgtctctgatattggtgtattgattacgtattaggaagtgtatgcccatggttaaaccatctatgaccacccctgctgtgttgtactcatgttttcttggtcttcacatgtttctatatatatatagatgtatatatatgtgtgtatgtgtatatatatatatgtgtgtgtgtatatgtatatttttgagagagagttttgctcttgttgcccaagctggagtgcaatggtatgatctcggctcagtgtaacctctgcctcctgggttcaagcgattctcctgcctcagcctcccaagtagctgggattacaggcacatgccaccatgcctgactgactttttgtatttttagtagatacagggtttcactatattagccaggctggtctcgaactcctgacgtcaggtgatctgcccgcctcggccttgcaaagtgctgggattacaggagtgagccaccgtgcccggcccatattcttctatatagcactcacatgtcatcaggagataaggtcctgtacacaacttgtttgtagaggaaggagctgtagaccctgcctctactccctgtgttgcatatatgcttgtgctctttacatcatgaagcctcctggattctgtgacctttatagcccaggaattctaagaagccccatctttttttttttttttttttttgtgattgagtctcactctgttgtccaggctggggtgcagtggcgtaatcactgctcactacaaacctctgccttctgggttcaaatgattctcctgctttagcctcccgagtagctgggattacaggtgtccacaaccacatccagctaatttttgtatttttagtagagatggggtttcaccatgttgttcatgctggtcttgaacttctgacctcaggtgatccacccgcctcagcctcccaaagtgctgggattacaggtgtgagccaccatgcccagccagcagccccatcttcaacttgaagccaacattgtgttcctgcaaatatttctatagattaattcctcaatttgtgagacgtacttgtgggtgggctgtgccttcccgccggaggtactttgcacttgaccagcattttcttgctttcaggttgttggtgtggatcaaaagatgaggaggcaccttgtaagcagagaatttctgtacaaagagagtctcagagcaggactcctagggcaggtgtttctcctaagaaggctcacccctgtgaaatgtgtggcctcatcttggaggatgtttttcactttgctgaccaccaggaaactcatcacaagcagaagctgaacaggagtggagcatgtggaaaaaacttggatgacactgcataccttcatcagcaccagaagcagcatattggagagaaattctacagaaagagtgtcagagaagcatcgtttgtaaagaaacgtaagctcagggtgtcacaggagccatttgtcttccgcgagtttgggaaggacgttctgcccagttcaggattgtgccaagaagaagctgctgtagagaagacagacagtgaaactatgcatggcccaccctttcaggagggaaaaactaattacagttgtggaaaacgcacaaaagccttcagcaccaaacactcagttattccacaccagaaacttttcactagagatggatgttatgtgtgcagtgattgtggaaaatcctttagcagatatgtcagcttcagtaatcatcagcgagatcacactgcaaaaggaccttatgattgtggagagtgtgggaaatcttatagtcgaaagagcagccttattcaacatcagcgagtccacactggacagacagcttatccctgtgaggagtgcgggaaatcttttagtcagaagggcagccttattagccatcagcttgttcacactggagaagggccttatgagtgtagagaatgtgggaaatcttttggtcaaaagggtaacctcattcaacatcagcaaggtcacactggagagagagcttatcactgtggggaatgtgggaaatcttttcgtcagaagttctgctttattaaccatcagcgtgttcacactggagaaaggccttacaagtgtggagaatgtgggaaatcttttggtcaaaagggcaacctcgttcaccatcagcgaggtcatactggagaaaggccctatgagtgcaaggaatgtgggaaatcatttaggtacagatcccacctcactgaacaccagagacttcacactggggaaagaccttacaattgtagggaatgtgggaaattatttaacaggaagtatcatcttctggttcatgagagagttcacactggagaaaggccatatgcgtgtgaggtatgtgggaaattatttggcaataagcacagcgtgactatacatcagaggattcacactggagaaaggccgtatgaatgcagtgaatgtgggaaatcatttctttccagctctgcgcttcatgttcataaaagagttcattctggacaaaagccttataagtgcagtgaatgtggaaaatccttttctgaatgttccagtctcattaaacacaggagaattcacactggagaaaggccttatgaatgcaccaaatgtggaaaaacatttcagcgaagctctaccctccttcatcatcagagttcacacaggagaaaggccttatgagtgcagtgaatatgggaaatcgtttgctgaagcatcccgtctcgttaaacacaggagagttcatactggagaaaggccttatgagtgctgtcaatgtggaaaacatcagaatgtctgctgtcctcggtcttaagcgacttcgtgttgagatggagtcttgttctgtcacccaggctggagtgcagtggtgcagtcttggctcgctgcaacttgggcctcctgggttcatgcaatcctcctacctcagcctcctgagtagctgggattatgagtacacaccaccacgcccagctaatttttgtgtttttagtggagatggggttttaccatgttggccaggctggtctcaaactcctgacctcaagtgatccacccaccttgactcccaaagtgctgaaattacaggcatgagcctctgcacctggccttcattcttttcgtattgcttagaatatgacatgctgaaccaggcatggtggctcatgcttgtaaacctgatgctttgggaggacaaggtggttcattggaggccaggagttagagatcagcctgggcaacatagccagacctcctctctacaaaaagaaaaaagaatgacatgcttcttgtttttgtctgttataaatgaaactgctatatttgaatgcagttgttcatgtaggtatgtttcactatggtaatatggtggtgtgcagtgcctgagtcacgtgatagattaaagtacaactcttttttgagacagagtctcactctgtcacccaggcgggagttaggtggcatgatttcggctcactgcaacctctgcctcccaagttcaactgattcttctgcctcagcctcccgagtagcagggattaccggtgtgcaccaccatgcctggataacttttttttttatttctattagcaatggggtttcaccatgctggccaggcttgttatgaactgacctcaagtgatctgcctgcctcagcttctcaggtgtgacctactgtgcttggcctaatgtacaactttttaagcaatgccaaactatgacttaagaatgaaattattgctcatttgtatatctatctaccatcagtgtccaagaatttctgttctatcttaccaagagggagtatggttagtatttgaaattgtttattattttaataagtggttataacttttgagtcagtggtttatgttttgcattttttttgttttgagacaaagtctcgctctgtctcccaggctagagtaccgtggcacaatctcagctcattgcaacctctgcttcctgggctcaagcactctgcccacctcagcctccagagtagctggaaatacaggtatgcaccaccacaactggataacttttgtattttctgtagagagggttttacctttttgcccagtctgatcgcgaactcctgggctcaggcgatccacttgcctaggctccaaaagtgcttggtctacaggggtgaggcaccctgcctggcctcacctgtaggcttgttttttaaaatgaattttatctatttcccatttcattaatatatttaaaaataatgaaataacaaagacgtatgttggacttcattcattcttcagtgatgtcactttgctgcaaggaatatttggttttcttttttttttttttttccagatggagtctagctctgtctcctaagctacagtgaagtggcatgatctcggcccactgcaacctccacctcctgtgttcaagcgattctgcctcagcctcctgagtagctgggactacaggcatgtgccattatacctggctaattttatttatttattttagtagagatggggtttcaccatgttacccaggctgctctctaccttctgagctcaagtgatccacctgcctcggcctcccaaagtgctgggattacaggtgtcagccactgtacctggctgaatacttggttttcagtaccacaagaactatgagctggttatccacttcatgtggaatcataagcgtcccaaagtgacaatacatatagattgccaggcagtgaaacagttaagatgccaccatagctttcttttcaacatctttctaagattaccttactatttcttttgttccaagtttgtacttcctcacagttctcacatatggaaaggatacacactttgtagaaacaagaactttatgttatccaagttctaggatagccatgagctccaattatctcagagctctgagtcctctactcaatacccattgagatttatgtgttctgaggcttttgtcttctagctacttacttcattctccatgggtaacgtcattcatccacattaactaatttcctcactccaagctcttttctagagataatctccagtccctgtgcagaaactgtcattgcactttctgctgaaatggcagtttcttctcagcaaggtgagattatggaatccagaatcttttttcaggggtcacatgcccatttccccacttgcatgaatgtcgacactgcagccacagttttggccgtaaatgtgaatttggcaagtaaccactgttcccagggaaatgtcccaatcagaagaagattatctgggacactgatactgacagggagatgggacattctgagggacccggaggcagggtgccacctcctcaacttccctgagggctgcctagaatctgtttcctctcactctgaattattcttcctcttatggctgaccaaaaacatggaacctcacaaagtccactgtaacagctttatatttgtgaagtgaagaacatgaagacagtttcaagcaaagttattgagtggacactttgtgttttttttgagaagtctcactctttcacccaggctggagtgcagtggcacgatctcggctcactgcaactccacctcccgggttcacgccattctcttgcctcagcctcctgagtagctgggaccacaagcgcccaccacgtcagcttaatttttttgttttgtttcttgagacagagtcttgctctcttgcccaggttggagtgccgtgtcgcaatctcagctcactgcaacttctacctcctggattcaagcacttctccttgcctcagccacctctttagctgggattacaggtgcgtgccaccacacccagctaatttttgtatttttagcagagaccaggtttcaccatgttggtcaggctggtctcaaactcctgacctcgtgatccacccacctcggcctcccaaagtgctggaattacaggcgtgagccactgcacctggcctgtattcttttctttagtagagacggggttttactgtatttgccaggatggtctcgatctccagacctcgtgatccgcccgccttagcctcccaaagtgctgggattataggcgtgagccaacacgccctggccacttcttgtctttgcaacattttttagatatgtatttgtgttttttggggagcttaatttgctaatggaatctctgttattttcctaacatgcttggtggatacaagagttaagacttcctgtcccgtttagtgtaacaaaagaaagttaagaaatgtggataaaagattgtaagttagaaatggcaagataatcagctatatgaagaatcttggccaggtgtggtggctgaggcctgtaatcccaccactttgggaggctgaggtgggcggatcacaaggtcaggagttcaagaccaccctggccaatattgtgaattcctgtctctactaaaaatacaaaaattagtcgggcatggtggcgggtgcctgtagtcccagctactcgggaggctgaggccagaaaatcggttgaacctgggaggtggaaggtgcactgagccaatatcacaccagtgcactccaacctggtgacagagagacacatcatctcaaaaaaaaaaaaaaaactcaatccataaatgttatactttataactttataacagcatgttatatgggcttagatattatccctaaatttttttttttttttttttttttgagacagagtctcactctgtcacccaggctgaagtgcaatggcatggtctcggctcactgcaacctccgcctcccaggttcaagtgattctcttgcctcagcctcccgagtagctgggcctataggttccctccaccacgcccagctaatttttgtatttttagtagagatgggctttcactacgttagccaggctggtctcaaactcctgacctcatgatccacccccctcggcctcctaaagtgctgggattacaggcatctgccaccgcactcggcttatccctagaaatcctatgatagcatgatgtataggcacctaaaggcatggcacttgagaaatgtgaataagattgtaagttacaaatagcaaggtacagtcagatgttaacagtctcagcccctaaatgtcaccttgtattacagcatgttatataagcacatacaggcacatacatgaaatagtgatacttcattctcagtaatatcttcatccttctcactggaaagatctttgatgatttttaatcaacataggagtttcaatgatatctagaagtttaaaagggctcgttcaaacaaattatgaccacacacactgaagagtatgtttgtctcttgtggtgtaaatttttttttattacaccaaattatgttcacacaaaacctttgtaatcagggggaattaaagagccttcctggaaaatggaggttgcaatcagccgagatggtgccatcgcactctagcctggggaatagagtgagatcctgcctcaaaaaaaacaaaaaaattctttattttctccataaactacagtttatataagcaaaagtttcagtactaagcaattttagtctctgcagtctcttgtcttgaattaatacaacttttgttaattctcttatgaagttaatcttcctgcttgtatgtgaattaaatatatgtcaaactttttttgtacaaaaga

SEQ ID NO: 34 - DNA, 46558 bp, Homo sapiens
ggtcaacgcctgcggctgttgatattcttgctcagaggccgtaactttggccttctgctcagggaagactctgagtccgacgttggcctacccagtcggaaggcagagctgcaatctagttaactacctcctttcccctagatttcctttcattctgctcaagtcttcgcctgtgtccgatccctatctactttctctcctcttgtaggcaagcctcagactccaggcttgaggtaagtccgcagccgtctccgccacggaatcacggagaccccattgtcccccttagggtccagtcgggcccccacagacagaggttgggagggccgaatggggactatcgcgagttacgagacccgggttctttctagtcaggagtctcgagctgtgtggcgtggaacaagtcaaaatcctctcttcattccatctttaaggtcctaaggttgcctctcgtcggtgaattcaggttctaaccttaagccaggctgtgaatcacccttcggggttgcccctcttccagtgttgattcgcctggctggaaagggtggaggagtttaggaaagctgagggaactgtgatgtaccgatttagatgacgttttcctcctagctaggttttgtttttctcctggtgagaattcgaagaccatgtctacggaactcttctcatccacaagagaggaaggaagctctggctcaggacccagttttaggtctaatcaaaggaaaatgttaaacctgctcctggagagagacacttcctttaccgtctgtccagatgtccctagaactccagtgggcaaatttcttggtgattctgcaaacctaagcattttgtctgggtaaatatacttttatttttacactgtattgcctttgctatttccaaacagttgggtttgtttgttggtttgttttcaattatcccggctcaaaggtcaggctttaagtctcaactctgcccttgactgtgtaacccttttgagtctcaccttcttttctgtgacaagaaataatctcagccaggcgaggtggctcatgcctgtaatctccgcactttgggaggccaaggagggcggatcgcctgagtctaggagttcaagaccagcctgggcaacatggcaagacgccgtctctacaaaaaatattaaaagttagctgagtgtggtggtgtgcacctatagtcccagcaactcgggaggctgaggtgggaggattgcttgagcccgggaggtggaggctgcagttagccaagatcgcctcactgcacttcagcctgggaaacagagtgagactctatctcaaaaagaaaagaaaagacaaagaaataataatcgcttcctatcttactaggatcttgtgagaatcaaatgatgtgataactgggaaaagtctttgaaaaccgctgcattacgagtcggtcactttattagtattaatattagtgttattgcagttgtactttgaattctgatcataccatgtctcaactagcaaagagaagtagtacctgagaaaaactagggaccccagggagaaatcaagcctgtgttcatagtgctcaggaccgggaatgtggagtcaagatccccctcggccaataaactctgggcctcatttaaaaaaaaaaaaattatctgtttcagtatgttggtaaggagaaaataaagtacagattatggtagtgggagatttttctcagcccagtctgatatatttcccaaaagcaattagatttatttggacactgttcagatgatctgatagtcattaaggggtgtttcaaatgaacaggcttggccaggcgttgtggctcacacctgtaatcccagcactttggaaggccgaggtgggtggatcacctgaggttaggagtttaagaccagcctggctgacatggtgaagccccatctctactacaaatacaaaaattagctgggcgtggtggcaggcgcctgtgatcccagctatttgggaggctgaggcaggagaatcgcttgaacccgggaggcggaggttgcagtgagccaagatcgtgccactgcacttgagctggggggacagagcaagactccactgcaaaaaaaaaaaaaaaaaaaaaagaagaggatgacatgatctttgacttttaaggatataataatctaatgggaatttcgatgtactattatgtctcaacagaggaaccccaaaacgttgcctcgatctttcgaatcttagcagtggggagataactgccactcagcttaccacttctgcagaccttgatgaaactggtagggagaagggagataaaggcctcaaagggaagaataacttttaagggagaaaacagggaaggaggatagagacggaaggtggtgaaagtataaaaagaatctgcctagagagatggaattttgtgggtaactagaggatttttgagaatgattaagccaatgggaagagaaagataataacactaataggagctactttgcatatgaaaatgttagacaagtaggaatatattttgttgactgattaatggtgggaatgaaagtatagtcattaggatatgagaagttttgtgcctcagtctaatctcagcagaggcaaagaaaccagcataaagaaatatgttgttggccaggtgcagtggctcatgcctgtaatcccagcactttgggagggcaaggcgggcgggtcacgaggtcaagagatcgagaccatcctggccaacatggtgaaaccccatctctactaaaaatacaaaagttagtttggcatggtggcacgtgcctgtaggcccagctactggggaggctgaggcaggagaatctcttgaacccgggaggtggaggttgcagtgagccaagatagcaccaatgcactcccgcctggcgacagagcgagactgcatctcaaaaaaaaagaaatatgttgtcaactaatttttatatgttttatatgaaatattccaaaaggaatgtttcataagttaaccttccagaattctaatttcagattttctgagtgataacctttcttttctacccataagaaaaaaaaaaactccataggtagcatagtgtagtgtttcccaacacttgatttcttttagtgacacatataaattcttacgtttctgtgaaattgtaccttgtaccatgaaatgggtaccaatcgagaggctttgtattcaaaagctcagtccttgaaattaatacggcttactggtaatgaagaaaatctgaaggaaaaacaggatgcatggacaagaataactccttttactgattctttatatttgattgcaggtcacctggattcttcaggacttcaggaagtgcatttagctgggatgtaagttctgttgttaaatgaaccccacacaaaagccttttagcactggtcatagagattttatcctgtgcagactctgcagagtacaaaacctttcatactgggtataagtgggctttgaggcctagttccttaccttgaacagtttctaagttttccacatctaaatagtgttgtgaaaatgaaggctattcattttaaccatcataatcagaagtatctataaggaaatgaaggaaaatggtatactacacttatgtataggcttttatttgtatgtgaaaggtgctgtatcttagtaattgaaagtacagagtggccggacacggtggcttacatctgtaatcccagcactttgggaggccaaggcaggcggatcagttgaggtcagcagttcaagaccagcctgcccaacatggtgaaaccccgtctctactaaaaatacaaaaattagctggatgtggtggcacatgcctgtaatcgcagctacttcggaggttgaggtaggagaattacttgagcccaggaggcggaggttgcagtgagccaagactgcgccactgccctccagcctgggcgacagagcgagactccgtctcagaaaaaaaaaaaaaaagaaagtacagagtataagctctggaatcagtgtgtggattcctggcttactacttcattcaccagttgtgactctgacaagttttttttaacttcattggaccttaattttttttatttgtaacgtggagacaataatagcatttctcataaagtagctattgtaaggagtaaataaactgtgtatctagcacataccaagcattttacttatgtatttatttttatttttgagatggagtctggctctgttgccaaggatggagtgcagtggtgccatcttgacttactgcaacctctgcctccctgggttcaagcgattctcctgcctcagcctcccgagtagctgggattacaggcgtccaccaccacgcccggctaatttttgtattttagtaatacaaaaatggaggcttcaccatgttggccaggctggtcttgaactcctgacctcaagtgatcagcgccccacccccacccaccccttggcctcccaaagtcctgggattacagatgtgagtcactgggcccagcttgaattgctttaaatgctctaacccagatagataatgaaatccatggagggaggatagaaattaatttttttttttttttgagatggagtctcgctctgttgccaggatggagtgcagtggtgcgattttggctcactacaacctccgcctcccgggttcaagtgattctcctgcctcggactcctgagaggctgggactacaggcacatgccacgacgcccagctaatttttgtatttttagtagagacagggtttcaccatgttggccaggacggtctctatctcttgacctcgtgatccgcccgccttggcctcccaaagtgctggaattacaagcgtgagcccccgcgcccagccttttttttttttttttttttttgagacggagttttgctcttgttgcctaggcttaagtgcaatggcgcgatctcggctcaccacaacctctccctcccgggttcaagcgattctcctgcctcaggctcccaagtagctgggattacaggcatgcgccaccatgcctggctaattttgtatttttagtagagacgggtttctctgtgttggtcaggctggttgcgaactcccaacctcaggtgatccgcctgcctcgaactcccaaagtgctgggattacaggcgtgggccacagcgccccgccagaaattaaatttttttaaaaagttagccccggccgggtgcggtggctcacatctgtaatcccagaagtttgggaggctgaggcgggcggatcacgaggtcaggagatcaagaccgtcctggctaacacggtgaaaccccatctctactaaaaatacaaaaaattagctgaatgtggttgcaggcgcctgtagtcccagctactcaggaggctgaggcaggagaatggcgtgaaaccgggaggcagagcttgctgtgagccgaggtcgtgccactccagcctgagtgacagagccagattccgtctcaaaaaaaaaaaattagccccaatacactgtgctggaaaattagtaaattgtaaattgtataaaactcgttcatctttggaacatgttatatggttatgcaggcaaaatgagggtcttatccccaggatgtcacttgagtcttgatatttaccacagagaataccctatgtattgttgttggaagagacatatcaactaggaatagggctcctagaatgaaatagaaaaatgttgggatgcaccaatccactgaagaataatcaaacagtatttgggactaacctgacaggcagtttgttttaatctgcaggaatcatgaccagcacctaatgaaatgtagcccagtgagtagcctctctttttttgggttttgttttgcttttcaggtgggaggcagagggtttccattgcacctgtggcttgaggatgctggacgttctcagcaaactctcttttttaggcacagcttctttgtagcactccgaatggtttggaccgtggccatagaaagagagatgcaatgtgtagttcatctgcaaataaagaaaatgtgagtgtttaatggaaacctagatatattggcagttttattttttgagtgaagaaacttggtatcataatgagacatagaactgtttatacctcgtatgctagacaaggaaactgtattactataggggagaaaatttctttgtttttgttttttcttattaaagtttggccctaggacagacacccagctccaaatcttccacagtaggtcatcattatttctcatgttcagttgatcattttgaggacaaaaattacccttactgtagtgtaagggatttaggagttttttgtttgtttgtttgtttgttttaacaggtagggataacttgcataacttgttcatggatttttttttaccactttacatgcaagtgtagattaatttcttatttcccccttagtctagcttttaagcccttattccgaggaggccatggtactttttatctaaaccttaggccatccgtcgttccaagttaaatctagcctctccggagccacctcatcactaagatagttctgtatctaatccctcatctaagccccttttctagacatcgttttttcttccctgcctcccatccctttccccaaatcattaccataaaagatagctgctcttcttttcttacattgacttaagataaactcatgttttcggctgttcttatcagttttttcttgatttaatactgtccttctaatctccatttataatcactttttattcatttatttttgaaactgagtctcgctccatcgcccaggctggagtgcagtggtgcaatctcagctcactacaacctctgcctcccgggttcaagtgattcttgttcctcagcctgccaaatagctgagactgtaggcacgtgccaccacggcccagctaatttttgtgtttttagtagagacggggttttgtcttattggccaagctggtctcaaactcctgacctcaagtgatccacctgcctcggcctctcaaagggctgagattacaggtgtgagccactgcctggcctataatcacttttttttctttttttttggtgagacagagttttgctcttgttccccagggtggagtgcagtggtgcaatctcggctcactgcaacctctacctcctgggttcaagcgattttcctgcctcagcctcccacgtagctgggattacaggtgcgtgccaccacacccagctaatttttgtatttttagtagagacagggtttcaccatgttgaccaggatggtcttgatctcctgacctcgtagtctgccctcctctgccccccaaagtgctgggattacagccgtgagccaccatgcccgacagcatcaatatttttaaagtttttttttttcctctccctagaaataagggtctcactatgttgcctaggcaaatcttgaactcctgggctcaagccttaaggttttgatactttctccgattcatttctaaaaaagttacaagaatttacattttcattagcaatccaaatctcatagaatttacttatttatttatttatttattttgagacagagtctcactctgtcacccaggctggagtgcagtggcgcagtctcagctcactgcaaccgctgcctccctggttcaagcaattctcctgtctcagcctcctgagtagctggaactacaggcgcatgctgccacgcccagctaattttttgtattttagtagagatggggtttcaccatcttgcccaggctggtcttgaacttctgagctcaggcaatccacttgcctcagcctcccaaaatgctaggattacaggtgtgagccaccctgcccagtcttctcatggaatttgttttttttttttttttgagatggaatcttgctctgttgtccaggctggagtgcagtgggacaatctcagctcactgcaacctctgcctcccgggttcaagagattctcttgcctcagcctcctgagcagctgggactacaggcgtgtggcaccacgcccagctaatttttgtatttttagtagagacggggtttcaccatattggccaggctgatttgaactcctgaccttgtgatccacccacctcggcctcccaaagtgctgggattacaggcatgagccaccatacctggacttctcatggaattttttaaaaaattactttctgctgagcagtctagtttgagggaaaatgctaattaggccagatgttgtggctcatccctgtaatcccagcactctgggaggctgaggtgagaggattgcttgagtccaggactttgagttccctagctggggaacacagcaagaccacatctctaccccaccccccaaccaaaaaaaagaaatggctgggacttggtggtgcatgcctgtagtctcaggtactctggaggccaaggcaagaggatcgcctcggcccaagagcctgaggctccagtgagttataattgggaggattgcttgagcacaggagtctggggctgcagtcagctgagatggagactcagtctcaaataaataatacacacacacatacatacatggtaaaatagtttattttatgttaaaaataattagcaggccaggcatggtggctcatgcctgtaatcccaccgctttgggaggctgaggcaggtggatcacctgaggccaggatttgagaccagcttggccaacatggcaaaaccctgtctctactaaaaatacaaaaattagccaggcgtggtggcacctggctgagaaacaagaatggcttgaacctgggaggcagaggttgcaatgagctgagattacaccactgcactccagtgcagtgaatggacaggtgacaaagtgagactgtctcaaaaaaaaaaggaaaaaaaaataaaaataaaaataattagtagtggctgggtgcagtggctcacacctgtaatcccagcactttgggaggctgaggcaggctgatcacttgaggtcaggagttccagactagcctgggcaacatggtgaaaccccatctctactgaaaaaaaaatatgaaaattagccagggccgggcgcggtggctcacgcctgtaattccagcactttgggaggccgaggtgggcggatcacgaggtcaggagatcgagaccattctggctaacatggtgaaaccccgtctctactaaaaatagaaaaaattagccgggcatggtggcgggtgcctgtagtcccagctactctggaggctgaggcaggagaatggcgtgaacccgggaggcggagcttgcagtgagccgagatcgtgccactgtactccagtctgggcgacagagcgagactccatctcaaaaaaaaaaaaaaaaaaaaaaaaaaattagccgggcgtggtggcaggcatctgtaatcccagctacccaagacgctgaggcaggagaatcagttgaacccaggaggcagaggtttcagtaagccgagactgcaccactgcactccagcctgggcgacagagcgagactctgtctcaaataataataattataggccgggtgctgtggctcacgcctgtaatcccatcactttgggaggccgaggcaggcggatcacaaggtcaggagatcgagaccatcctggctaacatggtgaaaccctgtctctactaaaagtacaaaaaattagccagtcgtggtggcgggcgcctgtagtcccagctactccggaggctgaagtaggagaatggcgtgaacccgggaggcggagcttgcagtgagccaagatcgcgccactgcactccagcctgggcgacaaagcatgtctctgtatcaaaaaataaaataaaataataataataattagtagtgatttcatgtgattattatccatgcgtaatttctctagtgtcttttgtgcccttataatactggggtcttaacttacccaggcattgacttgcctttcatagaccatggactccagagatttggattattatttctaatctcaaccctgagggaaagctattttaacatattctatcctatgaagataaagttgatcatggttttttttttttttttttttttttttttttttgagacagagtcttgctctgtcaccaggctggagtgcagtggtgcgatctcagctcactgcaacctctgcctcctgggttcaagcaattccactgcctcagcctccccagtagctgggactataggcgtgcaccaccacacccagctaattttttgtattttagtagagacggggtttcaccatgttggccaggatgctctcgatctcctgacctcgtgatccacctgcctcggcctcccaaagtgctgggattacaggcatgagccaccgcgcctggccactaagttgatcatgttttatttaggtttttggtttctaggatggagggaagacctggagtatgttcaattattggatagtcttatatgtgattttttttaattgcagtaaaatgtacataatatttacaattttaactatttgtgagtgtgcagtctagtgacagtaagtatattaataatgtgagactatcaccagaactcatttccagaattttttcattattcaaaacagaagctgtatacccttaagtgataactccccatccctgtttctgcccagccaatgataacctctattttctgtgtcagtgaatttgactattctagatacctcatatgagtagaataatattatattttgtcctttcatgtgtgtgtgtgaggtctcactctgtcacctctgctggagtacagtggcacaatcataactcactgcagcctcaaactcccgggctctgattattctcccacctcagcctaccaagtaggtgggactgcaagtgtgtgccactatgcctggctacttttttttttttttttttttttttttttttgagacagagtctcactctgtcacccaggctggagtgcagtggtgcaatcttgactcactgcaacctttatctcccaggttcaggtgattcttatgccttaacctccctagtagctgggattacagacgtgtgctaccatgcctggtgaatttttttgtatttttagtagagacggagtttcaccatgttggccaggctggtcttaaactcctggcctcatgtgatctgcccacctcaacctaatttttttgtatattttgtagaatcagggttttgccatgttgcccaggctggtctcaaactcctgggttcaagagatccatctgcttcagcctcccatagtgctggggttacaggtgtgagccactgcgtccagcctatattttcatttagcgtaatgtcttcaaagttcatctatgtcatagcatgtattagaatttcatttcttttgtatgtatatatcatattttgtttatccattcatctgttgatggacattttgagttgtttccaaccttttggccattgtgagtaatgccgttatgaacataggtgtacaaaatctgcttgagtccttgcttttattttattttgtgtattttttttttccaagatggagtctttgccctgtcacccaggctggagtgcagtggaacgatcacagctcactgcaacttccacctccctggttcaagcagttctcctgcctcagcctcccaagtagctgggattacaggcacatgctaccatgcccggctaatttttgtatttttagtagagatggggtttcaacatgttggccaggctgctctcgaactcctgacctcgtgatctgctggcctcggcctcccgaagtactgggattacaggcgtgagctactgcgcccggcccctgcttttaattcttttgggtatatattcagaagtagaattgcttgattacatgataattctacatttaattttttgaggaactgccatgctattatccatagaatgcctctgcacccttttacattcccaccagcaatgcacaaacacttgttatttcttataatggctatcctaatgggtataaagaagtatctcttgcaattttcatatgcatttccataatgattactttgttgagcatcttttgatgtgcttatgggccatttgtatatcttctttggagaaatgtctattcatgtcccttttgattgttattgttgttgttactgagttgtaggagttccttatatattctgatattaatctctcatcaaatataagacttgcaaatgttttctcccattttgtgggttgccttttcattcccttaatggtgttctttgatgcacaaaagttttccattttgatgaagaccaatttatctgtttttttctttcgttacctgtgcttttggtggcattatccaaatccagtgtcatgaattttttcccttatcttttcttctaagagttttatagttttagctcttacatttagaactttgatatattttgaatagtttttaatgttgtcaatatacttgacaggacaatggaaacttggtggacagtgaaatgaaatatttgggcagtcccattactactgttccaaaattggataaaaatccaaacctaggagaagaccaggcagaagagatttcagatgaattaatggagttttccctgaaagatcaagaagcaaaggtaaagtgttctgtggtagtatctttgtattcttcatattccttcattctgttaaaagaagaactagacaaattaaacttaggagagtttatttgagcaaaaaaataactagtgaatccagcaaccctcatagccagaacatgttcagtaaaactccagtttgccatgtggtcaggcagtattatggacagaaaatggaaatgaagtacagaaaatagaagtgaggtacagagacagcccagttggttgcagccttgagtttgccttatttgaacatggtttaaacagttgattgcttgtggttgactgaagctcagctgctgtgctttcctgagactcagctttttgatacaaaagtatacttctaaattaggctttcagttagtttaagtactaagttaggttgcaacttggtatataaagactcaagtacagaggcatccccaggccaaatttagtttaattaagaattcattcttcttttttttgttgtttgttttttttaagacagattctcgctctgtcgcctaggctggagtgcagtggcgccatcttggctcactgcgacctcctcttcccaggttcaagcgattctcctgcctcagcctctcgagtagctgggattacaggtgtgcaccaccacacccgggtaatttttagtatttttagtagagacagggtttcaccatgttggccaggctggtcttaaactcctggcctcaggtgatctacccacctcaggcttccaaagtgctgggattgcaagcgtgagccaccatgcccagccaacaattcattcttgaataaacattttatgcctgatatgtatgagtcactctactaaatgctagagctacagagatcaacaagatgtgataacctatctttatttatttatttatttttgagatggagtcttgctgtgtcacctaggctggagtgcagtggtggtatctcagctcactgcaacctccgtctcctgggtttaagtgattctcttgcctcagcctcccaaagcacgccatcatgcctggctaattttttgtaattttagtagagacggggttttgccatgttggccagactggtctcgaactcctgacctcaagtgatctgcccgccttggcctcccaaagagctgggattacaggcatgagccaccacgcctggcgtaacctatctttagactgtagggttacctgactgataggttatcaggtcactacagaaatcttcttactgctggtgaacaggttccagtcaatagtttgagtggatcaccatcaaagtaatctaggataagtaatgtctccaggataatggtaatgtataaatgtatagaatatacctaacattacttttcaggtattttataatacagtcttttgtttccttttttctttcccatatcactgatagatatacctgaagcatgtgggttatagcctatatgctgatatgccaaagatagtttctgaggcatttagctttttttggtttttggtttttggtttttttttttttttttttttttttagatagacagggtctttctctgtagcccaggctggggtacgtggcacaattaaagttcactgcagcctcaatctccccaggctctggcagtcctcccacctcagcctccaagtagctgggactataggcacatgccatcatacctggctaattttttgtattttttgtagcgatgtggtttcacaatattgcccaggctagtctcaaactcctggactcaagtgattcacacaccttggcctcccaaagtgctgggattacaggcatgagctaccatgcctggcctacatttagcatttctaaatcagctttgttgctttgaaacaagtagggctatgggtttgtctttaaaatttattcatttcacaaggccagtatggtatagtggagttagaacagttgcattctagtcctcatgcttttattttttttaattatttaattaattagatagggtcttgctctgctctgtcacccagactggagtgcagtgttgaactcctgggctcaagtaatcctcccacctcagcctcctgagtagctaggactataggtgcataccaccatgcccagctaatttttaaaattttttgtagagatggggtcttgatgtgttgcccaagctggtttggaactcctgcgctccagcaatcctcttgcctttgttgcgggatctttagggtgttgcttttctggccagaaacctttctgcccagtggtgcctttgcctgagttgttgtcctgcgtcgaggtaagcagacaagtagagggttagcaagacgaagagaagctttattgagtgttagaacagctcagaggagacccacagggggcagctcctctctgtaggcagtttgtcttatcccgtattcagctctcagcagagaggaggccctggagtgggtggctcctctctgcaggcaggtcctccctgttgatttcccagctttcagcagacagcatagctcctctctcctctttggttgtctgatcttttctccatcctctaccctgctctggctgagcctgggccttttatggacctcagaggggagaaagtgcttcctgattggttcatggactgtgagaaaaggcagcacaaatccccatccagtgggtgggactagcagcccggtccccagcctttaagccctccccgtcctgaaggtggggacttacaggaacctcccttctacccaggagcctgtctgtctctctcagcagtccatggcaccaggctgctcacaccaaggtgcacctaaaggccagcactgaccaccctcagtccctacttggcttcccctcttttgcttctccgtgcccaaattctagagggggtcaaggtggcagggtgctgccctgagggtgcacacacagatccgcccccggactgtaacagcacctggacttgccccaaccccactctgagattggagtgggtgccaagagcagagagaagtggggatatgggggtggtggggaggccttcctgggcccccaagggtgcaggctgcagagactattaggtcctgcacctgggagggcagctgcagctgcacccgggaaggcagggatcctgcctgctcccggcccccacaagaccacagggaggctcggatctgcagccacaacttgggcggctgcaagcccacccaggagggcagggcttctgcctgctccgtggaacaggaggcccaggttaacagctgcagtttgtgtagctccagcagcaccaggggagctcctgccccaactcagaaggggaagggctcccgctagctccatggatcatgcagccctatccatacctctctgctgcagccagtttgatgacagcagcaagccctctggagttgcagctgccaacaccttggcctctcaaagtgctggaattacaagtgtgagccaccgtatccagcctcattcttttatttacttggtggtatgactgttcacaagacaaccacttgacctcagtttttaatttataaaatggagagcatgataaaacaactacctccttaataggcttgttgtaaataaaatattaaaagcagtttatgtcctcatcacatacacacaaatggtaactgtgtgatgaaggatgtgttaatgaatttcattgtggtaatcctcatgtaatatatacgtaaatcattatattgtactccttaagtatatacaaattttatcatttatacctccataaaatagaaaaaaaaatttaaagagcagtttgtaatacagtagtcctctgttatccacagagaatacattctgagaccccccagtggatgcctaaaattgcagacagtactgaaccctatatataccatgcttttccctatgcatatgtacctgtgatggagttttttacttaggcatagtaagagattaacaataataactaataataaaatagaacaattacaacaacatactataataaaaattataggaggctgggcgtggtggtttatgcctgtaatcccagcacactgggaggccgaagcgggtggtcaggagtttgagagctgcctggccaacatggtgaaactccatctctactaaaaatacaaaaattagctgggcgtggtggtgagcatctgtaaccccagctactgggctggctgaggcagtagaatcgcttgaacttaaacccaggtggcagaggctgcagtgagccgagatcgcaccgctgtactccagcctgggcaacagagtgagactctaactcaaaaaaaaaaaaaaaaaaaagtgctggctgggcatggtgagtcaggcctgtaatcccagcactttaggaggttgagatgggcagatcacctgaagccaggagtttgagaccagcttggccaacatggtgaaaccctgtctctattaaaaataccaaaaaaaaaaaaaaaattagccaggtgtggtggcgggcacctgtaatcccagctacccaggaggctgaggcaggagaatcgcttgaacctaggaggcagaggttgcagtgagccaagatcgctccattgcactccagcctgggcaacaagagtgaaactctgtctcaaaaaaaaaaaaaaaaaaaaaagtgctataggctgggagcggtgactcacacctgtaatcccagaactttgggaggtcaaggtgggtggatcacctgaggtcaggatttctagaccagcctggccaacagtatgaaaccttggctctactaaaaatacaaaaattagctgggtgtggtggcaggtgcctgtaatgccagctacttgggaggcttaggcaggagaatcacttgaacccaggaggtggaggttgcattgagccaagatcacaccgttgcactctagcctgggcaacagaatgagactccatctcaaaaaaaaaaaaaggtgctatgaatgacaggacgatttgaataaaggacagcactttgagaggccaaggcaggtggatcacctgaggtcaggagtttgagaccagcctgaccaacatgttgaagcctcgtctctattaaaaatacaaaaatttagctgggcatggtgttgggcacctgtaatcccagctactcaggaggctgacacaggagaattgcctgaacccaggaggcagaggttgcagtaagctgagattgtgccgctgcactccagcctgggtgcgacagagcaagactccatctcaaaaaaaaaaaaaaaagaaagaaagaaagaaagaaagaaagaaagaaaaagggacataggtgtttgggaggatattatttttgactttaccctgagtaactggagaaatggtgacaacagtataatgaatttgaaaagaagggtggattcagcgggaatagatgtgttctgttttggacattgagttatagatgctaaggaggaaatttagatggaaatactaaatgaggagttgaagctatcaggatgagaaatgtacatttctggggcagctgtatagaggagaaaatggaagctaatgactctaagtttaaagtgaagagaaaggctgggaagaaagagcagtagccactgtgggactgataatgaagtagacacatataggaataatattagccaggaatcagaaaggagagatctaggacacaaatacaggtggcacatttatatattaattctttttatacattttttgttatggtaaaacaaaatttacaattttaatcatttttaagcatacagtttagtggtattaagtgccttcattttattgtgagtgtacttacccatctctaggatttttttattaccccaagcagaaattctctctttttttttttttttttttttttgtgagatatagtcttgctctgtcgcccaagctggagtgcagtggcgcaattttgtctcactgcacctccacctcctgggttcaagtgattctcctgcctcagcctcccgcgtagctgggattccaggcatgccccaccgtggccggctaattttttttgtatttttagtagagacaaggtttcaccatgttggccaggctggtcttgaatatctgacctcaggtgatctgccctcctcagcctcccaaagtgctgagattacaggtgagccactgcacctggcccccaagcagaaatgctgtaccccataaacaataactccccatcttctcccccttccccagcccctagtaaccactattctattttctgccctctatgagtttgctctaggtacctcatataaatggaattttatcatccttttatctctggcatatatctcatagtgtaatgttttcattggtaatcagtgttgtagcatgtatcagaatttcattctctttaaaaaaaatcagttttatgttaaattgtaaaatgcacataacctttatcatcataaccattttcaagtgtatagtttagtagtattacatacattcccattgttgtgtaaccaatctccagaactcttttaatcttggaaaactggcactctgtgcccataaaacaacttcccattttccccttctcccagcctctggcaaccaccattctactttctataaatttgattattctagatatctctgataagtggaatgatacagggtttttttgttttgtaactggcttatttcaactagcataatgtcctcaagctttatctatgttgtagcatgtatcataatttcattcctttttatggcagaataatattccattgtatgtatatatcacattttgtgacatttgggtttccatcttttggcaattgtgaatattgttgctataaaaattggtttacaaatatctgtttgtgtccttgctttcagttcttttacttttttggagacaggtctcactcagttgcccaggctgcagtgcagtgatgtgatcatggctcactgcagccttgaactctttggctccagcagtcctcccttctcagcctcccaagtgactgggattacaggtgtgagccaccacacctggccctgctttcagttctttagggtatatacccagaagtaaaattgctgggtcatatggttattctgtgtttaattttttaaggaactctcatactgttttcatagcaactgttcattttacattcccaccagcaatgcacaagggtctcagtttctccatatcatagccaacacttgttatttcctgattttgatactatccatctgatgactacgaaatggtatctcatcgtaattttaatttgcatttccctaatgattagggatgttgagcaccttttcatatgcttcctggccatttgtatatcttctttggagaagtgtctattcaagtcctttgcccattttttaattgagttgtttcttttgttgttgttgagttgtagttctttatatattctggatatcaatcccttatcagataaataatttgcaaatcttttttcctattccgttggttgcctattcactatgttgattgtgccctttgttgcaaaaaagtttttaattttgatgaagtctaatttatccactttttttgttgcttgtgcttttggtgtcatatctgagaaatcattgccagattcaatgtcatgtgcctcccccaaccccctcccctttttaaaagaaaatagtagggacagggtctcacccaggctggagtatagtgatgcgatcacatagctcactgtaacttcaaactcctgccctcaagggatcctcccacctcagtgtccatagtagctagtactacaggcatgcaccaccacacctggctaatttattttttgtagagatagagatgaggtcttgctgtgttactcttctggtctcaaaattctggcctcaagcgatcctcttgcttcagcctcccaaggtgctgcgattacaggtgtgagccattgggctcagctccctatgttttctttaaagagttttatagttatagctcttaagtttaggtctttgattcatttcgagttaatgtgtgtatatggtataagagaaggctttaactttgctctttgggacaaagaacaaagcagtgttggctacaatatggagaaattgggacccttgtgcattgctggtgggaatgtaaaatccagttgtcccaccactaattgttgaaaaaactctcctttcttcattgaatggtcttggcacccttttcaaaaatcatttaactatatatgcaagaggttatttcttggctgtgttccattccattggtctatatgtctgtctttatgccagtgccacactgtttactgcagctttgtagtaagtcattttataaatctttaatttcacaaatcatccttgaatatattctcctttatggaaaagttaaaacataacagctaaggataactaaccctatctgaccaccattcgaagtccctattgaaggaaagggctcagtgggaaaagttaagagcatgtgagtcagtggagcgcagtggtctgagaagtagcctctggggccagactgcctggattcatagcttgactctgccacttttagatatatgactgtaggtgagtcatatgatctccttgtgttcaatttcttgggttgttgtcaggatcgaatgagttaattacacataaaacatgtagagcaatacttatcaattaatagtacttaactattattgtgtagtgtaagtgcttaattattgtagtatacgactaaactatgtggagttatgaagaaggctgataggtgaggggatgctcaatggccttgatgtcctccgcaaagtaaacattgaagtaatctgatgattcagaggagagtgcgaggcgagagtcttaaaagtgtgtgaagaaggttataattgacttttggagactgtggaattactaaaagcctagtaagatgatatttgtaaggtcctatgagggcattatcaggtagacatgcatggcacttgttcgaagtgtcttcctacaagaatgttctggcctggaagcgagattggagactttggaactccagggatgatagtaagggttgaagattgccaatggtggatgaacaaggggttgaggaagaataggtatggtgaaggcagcagaaaagtcgacgatgattcaaagcctggctaaaaagccagatatcattaggtggactcagtaaagtaagagcagtaatgtgattgaaagttgctgagaaggtagaaagtggctggtttagaaagttttgagagctaggctgggagcagtggctcatgcctgtaatcctaacactttgggaggccgagacaggtggatcactggagatcaggagttcgagaccagcctggccaacatggtgaaacctcatctctactaaaaatacaaaaattagccgggtttggtggcaggtgcctgtaatcccagctacttgggaggctgaggcaggggaatcgcttgaacctgagaggtggaggttgcagatcacaccactgcactccagcctgggtgacagagcgagactccatctcaaaaaaaaaaaaaaaaaattttgagagccaggggaggttttagttagtttgagggcatgccatgtttgagctcttgatagtataataatagatgatgattgcagttgtttttatttttatttttttattttgttttcttaaattcccctcacctccccccatcgcccttttattttgagacggagttttgctcttgttgcccaggctggagtgtgatggtgtgatctcggctcactgcaacttccgcctccagggttcaagagattctcctgcctcaacctcccaggtgggtaggattacaggtgcccaccaccacccccagctaattttttgtatttttagtagagatagggtttcaccatgttggccaggctggtcttgaactcctgatctcaggtgatccacctgctttggcctcccaaagtgctgggattacaggcgtgagccactgtgcccagtcaaatttcctgttttaagaatgaagtatttttatgttttttttttttttttaataccagtttgttgagagcctgatgtggagttctagagaagcttagtggaagtattgtgaagtcatgctctccaaagtgttgtcagtggacattgtaagaatgtggaaaatacaatgggttttagtattgaagacagtacagagactagaatggaaaggaaaaatgagggccacgcaataacaagagctcccatttattgactacttagagtatagtaggcaccatgtgctaagcagtatacatccataatcacatttcattctcatatccaccctgaaatatgactgttgtctccctttgaggggagcccattgggtcatgaggtaaggtgtgatacccatggttacatagttagaagcagcagagccagggtttaaactaagatctacctgaccccagagcctgtttttagcaattttcccaggtaattctgatatacactaaattttgagcgttatgttctataacatagtattaagtcctattttatttttaatttcattggtttgtgggaaaacaaaaccaagatacaatctgaagaaggcaggatgggtgttgggagaattgacagtgaccttcctaaaacataaaacagttttgaggacttgctgataatgggcagtagatctatagaaaaacagtgagttgggaatagtcggcatggggaaaaggtttctagggcttccgaaaaaaagagcaatgtaaaatgaagatttaggatcacttttacaaatatgttagtcttcacatttgcagaatgttgtaattaatatagttaagtctcagctggtattaacttagcaaattgaatttaatgttaatttaaaaaatccttttattttctatttcattgttgaaaacttgtctaagttatgttgatctgcttttatgaaattaagtacagtacagtgaacataattgaatctttctctggtgattgaagatctttcatagtctcagaaatatcattctgaattgcataatatagacagtatagaagcatggacttaaaatagattgaccccaggaaatattctggaacaggttttcccaacccgtgggccatggatcaacacaggtccatggcctgttaggaaccgggccgcacagtaggaagtaagaggtgggccaggccagcgagcattaacacctaagctctgcctcctgtcagatcagtggcagcattagattctcataggaggcaaactcttttgtgaactgcgcatgcgagggatctaggttgccggttccttgtgagaatctgagaatctaactaatgcctgatgatctgaggtgaaacagtttcatcctgaaaccatatccccacccagatccatggaaaaaaatgtcttccacaaaactggtccccagtatcaaaaaggctggggaccactgctctgaaagttttgtttaggtggaagagtggcatagggctatgagtatttatttgatttttgttttaagagacagggtcttctatattgtccaggctgatctcaaactcttgagctcaagtgttccccctgtcttggcctcccaaagtgcattttgatggtctttgaaaaatatttggacaatagagccttgacagaaaatttaaataattaaataaaaaatgttttaaaattgtccttttatgggctcattttcttagattgtaactcttatgcagtcattttctctttctttttttccttctttctctttttctttttttttttttttttttttgtggcagtctcagtctgtcttccaggctggagtgtagtggcgtgatcagggctcactgcaggtcacaacctcctgggctcaggcgattcttccatctcagcctcccgagtagctgggactacaggcacatgcaaccatgccaagctaatttttgtagagacaatttcaccatgttgcccaggctggtcttaactcctgggctcaagtgatctgcctgcctcaccctcccaaagtgctagggttacaggtgtgagctaccatgcatggccataaagtcatttttgattgatggcccatcctataagaatatgcatagcagtaggttttaggttacaaaagggatagggggctgggcacggtggctcatgcctgtaatcccagcactttgggaggccgaggcaggcagatcccttgaggtcaggagttcgagaccagcctggccaacatggcaaaaccccgtctctactaaaaatacaaaaattagccaggcatggtggcatgcacctgtaatcccagctactaaagagcccgaggaaggaaaatcacttgaacctgggaggcagagattgcagtgagctgagatcgtgccgctgcactccagcatgggcaacagagcgagactctgtctcaaaaaggaaaaaaaaaagaaaaggaatagggatttttttttgttactgttttacctctttgatgttaaatggaaaaaaaaaaaataggccaggcacattggctcacgcctgtaatcccagcactttgggaggctgaggtgggcagatcacctgaggtcaggaatttgagaccagcctggccaacatgatgaaaccccgtctttactaaaaatacacaaattagctgggcatggtggtatgcacctgtaatctcagctacttgggaggctgaggcaggagaattgcttgaacccgggaggtggaggttgcagggagccgagattgcgccactgcactcctgcctgggtgacagagtgagaccctgtctcaaaatataataataataataataataaacggaaataaatagatacttgtataaagcagtgacctccttggagattgtcgtaaccttagtgatttttcattcatttctttacttaaaaaatatttattgagtacttgctacatgttgggaagtgtgctaggcactggtgatacgatggtgaacaaaacagactagaatttatattcttgtcagggatgcatcaaaacaacaaaaatttttttcaagttaatagatattctagttagagttcttggttgcaaataatagaaactgattctagtttcctcaagcagaaaagggatttttctggagggtactgaggaactcagaattacaaggaaggctggaaaacaaagtaaggcccagccaaaatactattccaggaacattgagctcaggatgccaccacttgctggctagacactcaatgccaccgttactggcaccctgccatggaacatgatcaggcttgctgctagatagactgtgctgctcatggatatttgctaccacctagtatattctctactgtgatgcagccaccataaaaagtctggaccaaccctttgctttttgagcttctttaaggttgaaaatcccaggcaggaatatctagttggtcacaagggcatggaaaagggaatatctgtctcccattggccacctcatgaggaggcaggactgcctctctaactttagattttactgaaacagtatgttaggcagccaaattgtaaatgtctgccataacagacaaaataatttagattttgggctgggtgtggtggctcacacttgtaatcccaacattttgggagtctgaggcagaaggatagtttgagtcgacaagtttgagaccagcctaggcaacacagtaagcccccatcgctacaaaaaaataaaaattagccaggcatggtggtgtgcccctgtagtcctagctactccagaggctgaggtgggaggactgtttgagtctagcagttcaaggctacagtgagccatgatcatgcctgggcaatccagcctgggtgacagagcaagaccccatttctaataataataataataatttagtaattgcaaatagtccaagtgtaatgatggaaacaaaatgaggtctgaaatagaggctaacaaaaggaaatctttaaatggagaataataagggaagatctccacaagtgggagatatttggttaagaatcgggtgatgaactctctgtttgcctgggactagaatgttctaggatatggggcttccattgctaaagctgggaaagtcccggacaagctggtattaagttagggccactctaattgtgaaggaatcatatatgacaagagtagaggcaggagcatttcatgaagaaggaatgttgcaggtacagaggccccaggtggaaaaggtcttcacatgttggagggactgagaagtcagtgaatgagaggagtgttatgtgagctgggaaagaataagtagtcaggaggtagatcacgcagggtctttaggctatggtgagtgtttggattctattctaagtacaatgagttgctactgaagggagggctttaggcaggggaataatatggtctgatttgttttgtgaagaccactcttgttgatggatggggaacagattagaaaggattaagagttggaagtcaacgggtggtttggctttcacctgtaatcctgtcaatttgagaggctgaggcaggagagttgcttgagctcagtagtttgagaccagtctaggcaacatagcaaaacctcatcactactaaaaataaaaaaatgttagttgcatgtggtagtgcatgcctgtagtcccagccacttgggaggcagagacagtaggattgcttgagcccaggaggtcaaggctgcagtgagccatgatcgtgccactgcattccagcctgggcaacaaagggagaccctgcctcaaaaaggagaaaaaaaaaaaaagagttggaagcaggtaagagtaggagccattgtgttagtcctagctacagttggtggtagcctgaactaaggtgttgactatggagacagagaaatggatgcattcaaaatatattttgtctgcctgcctcagcaacatgtctctacaaaaaaaaaaaaaaaaaaaaaaagccaggcatggtgtgtatgcctgtagtcccagctactcaggaggctgaggtgggaggatggcttgagcccaggggtttgaggctgcagtgaaccacgatcacaccactgctctccagcctgggcaacagagcaagaccctgtctcaaaaaaattaaaaaagtaaaaagatacatagatatatatattttggatagagaatcaacaggacttgaagggttgggtgcaggctgtgaaggaaggatgagatcaaggatgactttagtcatatgcagtttgaagtgttttgttgtgaagagaaaacagatgctatcagaagaaaactgccttcttttctcaccagatacagcaatcaatctccttttatacccatataatctgcagtcgctcttgccacagagcacgaagtgtccctgctcctatctaaagcccttccttcacactgtgtcctattcattcattcattcatttattcactaatgccagagatacagtagtatctgagcttacattctagttatgaggaaacagacagacaaatacatttgtaatatggcagatggtaaaaatactatggtgaaaaagcaaagggagattatagggagtccctggattggagtagggcagggtgagagttgttatttttgataggttgcataggtcagaggagacttatttgagagtgacgtttgagcagacatctgaaagagcgaggaagccaacaagcagatgtcaggaggaatgagtcattcccagcagaaggcaaagcaagtgcaatgcccctgaggtgagtatgcttggcgtgtttatgggacagcaagaaggccagtgtggctgaagcggagggagcaagtggagaagggtagaaaatgagggcagagaggagttagcagaaggacagatcgtgtagggccttgtaggcatttgtaaagactgcaaaaaccgagtcagatggaagcatctcctcatgtgtactactgcagtatttccccactcctatattaccaattttcccttctactagaataagagttctcaaattttttggtcttagaactcctttgtaatcttaaaaattacttacaaccccttgccttacacctgagcttagagaaaagcattcagctttttatacattgagtatgatgttagctatacatttcttgagaagcccatcatcaggttgaggaagttcccttctatttcctagtttgccaggagattttagcaggaacaggttttttgtttttgtttttgtttttaaagagacatggtctcactctcttgcccaggctggagtgcgtggcacaatcacagctcactgcatcctcaaactcctgggctcaagagatcctcttgcctatgcctccccaagtagctgggactacaggcaaacacagtcacccctggctagttcttttttttttttttcccctatagagatggggatctcaccattttgtccaggctggtcttgaactcctgggctcaggcaacccctctgcctcagcctcccaaagtgctgggattacaggcataagttaccctacccagcccttttctctgtatctattgagataatcaagtgagttttttttttaatctgttaatatgatgaattactttttttttttgagatggagtttcgctcttgttgctcaggctggagtgcaatggtgcaatctcagctcaccacaacctccgcctcctgggttcaagcgattctcctgcctcagcctcccgagtagctgggattacaggcatgtgccaccacgccttgctaattttgtatttttagtagagacggggtttctctatgttggttagtctggtctcaaactcccgaccttaggtgatccacctgccttggcctcccaaagtgctgggattacaggtatgagccactgtgcctggcctacgtttttgaatgttaaacaaccttgcaatcctgtgataacctcacttggttgtgacatatgatccttcttatatgttgttggatttcattgctaacattttgttgataatttttacatcggccgagcacggtggctcatgcctgtaatcccagcactttgggaggctgaggcaggtggatcactcgaggtcaggagatcgagaccagcctggccaacatggtggaacccccgtctctacaaaaaaatacaaaaactagccgggcatggtggcacacacctgtagtaccagctactcgagaggctgaggcaggagaatcgcttgaatcagggaggcagaggttgcagtgagctgagatcgtgccactgcagtccatcctgggagacagagcgagactctgtctcaataaaaaggccgggcacagtgactcacacctgtaattcccagcactttgggaggccaaggcaggtggatcacctgaggtcaggagctcgaggccagcttggcctacatggtgagaccccatctgtactaaaaatacaaaaattagccaggtgcagtggcacacacctgtaattccagctacttgggatactgaggcaggagaaacgcttgaacccaggaggcagaggttgcagtgagctgagatagcaccactgcactccagcctgggtgacagagcgagactccatctgaaaaaaaaaaaaaaaatttttttttttttttgtgtacctctatgttcatgagagatattgatcttcagtgttttagcttttcatgttaatgttttggtattggtatcagtgtaatgctagcatcatgaaatgatttgcaaataattccctctttttttttcaattttctggaagagtttatatagaattggttttatttctcttttagatgtttggcacgattcaccggtgaagccacctgggcctagagttttctttgtgggaatgtttttaacaaattcaacttactttacagataggaactactcagtttaactgtttctttttgagtgagtttggtagtttgtgtctttgaaggaatttgtccattttaattaggttgtcaaatatagtggcataaagttgttaaaaatacttccttattagcgttttagtgtctgtagaatccatagtgatgtctctcattcctgatattggttatatgtgtcctctgtcttattcctgataagtctgggtagagatttatcaatattgatctttttaaaaaatcatcttttggttttattgactttctccattgtttttctgttttctattccattgattttgcactctaatctttggatactttgagttcaatttgatcttcatgtttagttaaggttgaagctaaggtcattgatttgagacctttttaaataagggtatttagtactttagctgcatctcacaaattttgatatgttgcattttcagttttattcagttcaaaatactttccaatttccttttttggtttcttttttgatgtaggggttacttagaagcttgttatttaattatttgcaaatatttgaggactttttgaggacctcatatttgaggacctttctgttattgaattctaatttaattcgattgtcaagaatatattttatatgacttaaatccttttaggtgcattaagattggtttttatggtccagagtatgactcagaacatcttggtaaatgtttagtgcaacttagaaaatgtatagtctctattcttgagtagaatattctatgtatgtcaagtaggtccagtttatttatattgttgaacacatctatatgcttattagttttctgtctattaatctatcaattttttttttttgagacagagtctcactctgttgcccagaatggactgcagtagcacaatcacggctcactgcagcctcaacctcctgaacacaaacaatcctcctgcctcagcctcccaagtagctgggactacaggcatgcaccactgtacccagctaatttttgtatttttgtagagacagcgttttaccatgttgcccaggctggtcttagactcctgagctcaagcaacccacccgtcttagcctcacaacgtgcagagatgagtaatcatatggtttttgtcatttattttattgatctggtgggatacggtggctgattttcagatgttatatcaaccttgcatttctgggatacatcctacctggtcatggtttcagtcttttgttttgttttgttaattggagttggggcggtgcctcactatgtcgccttgaactcctgtgtgctccagcaatccttccacctccgcctcctgagaagctaagactaccggtgcacaccactacacctggctagtttcagtagtttttgtcttgttaggaattagtccatttcatctaagtggtctcatttgttggcacacagttattcactaatatttcttcatgatcctttttatttctgtaaggttggtagtaatgtcccactttccattcctgattttgataacttgagacttttttttaattgttcaggctaaaagtttgtcgatttttgctgatcttttcaaagaaccaacttttggttctgttgtttttctattctcttaagttctgctctaatcttttttatttccttccttctgcttgctttggatttagtttcctcttaggtgggagtttaggtaattgatttgagatcttcttttttattttaggcatttatagctttaaatttttttctaagcattactttagctgtatcccataagctttggtatgttgtatcttagttttcattcatctcaaagtattttctgattttcctatgatttcttcattgacccattggttattaacaagtgtgttatttaattttctttttcttttctttctttttttttttttttttgagacggagtcttgctctgtcccccaggctggagggcagtggtgtgatcttggctcactgcaacctctgccccctgggttcaagcaattctcctgcctcagcctcccaagtagttgagattacaggcgtaccctaccacgcctggctaatttttgtatttttagtagagatggggcttcactctgttggccaggctggtctcgaactcctgaccttaagtggtcctcccgcctcagcctcccagagtgctggaattacaggcatgagccactgtgcctggccttttttttttttttttttttccagacagagtctccctctgtaacctaggctggagtgcagtggtgcgatcttggctcactgcaacctgtgcctcccaggttcaggcaattctcctgcctcagcctcccgagtagctgggactacaggcacccgccaccacacccagctaatttttgtatttttagtagagatggggtttcaccatgatggccaggctggtctggaactcctaaccccaggtgatccgcccgcctcagcctcccaaagtgctgggattacaggtgtgagccaccacacctggcctatttaattttcataaatttgctaattttccagattttttctgttaactgatttctaattttattccattgtggtcagagaacatattttgtgtgatttcaatccttttaaatttattgaggcttattttattttattttatttttattttattttatttttgagatggagtctcactctgtcaccaggctggagtgcagtggcacgacctaagctcactgcaacttccgcctcccaggttcaagcgattctcctgcctcagcctcctgaatagctgggactacaggcatgtgccaccacccccagctaatttttgtatttttagtagagacaggatttcaccatgttggccaggatggtctcgatctcttgaccttgtgatctgcccgcctcagcctcccaaagtgctaggattacaggtttgagccactgcgcctggcgaggcttattttatgttcaggcatattgtctattgtgagaatgtgccatgtgtactggagaagaatgtgtattctacggttgttgggtagagtgttctctaggtgtctgttaggtctggttggtttatagtattgtttaaattagtttttgaggtttctaaaaatggtatcactgggtgtggtggctcacatctgtaatcccagcactttgggaggctaaggcaagaggacatttgagccccaggagttcacaaccagcctgggcaacaaagagagaccttgtctctacgaaaaaaaaaaaaaaaaatgcaaggtgtggtggctcaagcctgtagttccagctacttgggaggctgaggtggaaggatcacttgagcctgggatgtcgagattgcagtgagctgtgatcatgccactgcactccagcctggatgagagagtgagaccctgtctcaagaaaaaaaaaaaaaggtaccatactaaatgtggctgtctcactggctgccttgttattctcacccagggccattgcatttgttgttccttcatcctagaactttcttccccaaggcaatgcatgattttcttcctcatttcagtctctgtgcatatgtcttataaggacctttcctgacagacttcccaacccctgtgtttttcttttcatccttctttgttttgatttatgccatttatcactatgtgaaaaagtacagagtatatttattagtctacttctttgtttcttttactcttttgttcattgctatgtcacctagtaggtactcaaaacgtatcaagcttccaaatgtgaatttggaagttctgaagtcagagcagaggacttgactaaagatagaaatttggaaatcattagcttagagtgaaaatttaaattcacaggtagaagaaattacctatggctagagggaggagataaaagagaaaagggccagggcctggccctgatgaatccagcatctattagaggtttgataggtaaggaggcctaacaaagaaaattgagaaggagcagaggagagggcacagaggtagaagcatcatagttcttctagtgtaggggctgcctgtactagaaataaagaactaggccgggcacagtggctcatgcctataatcctagcactttgggaggccgaggtgggccgatcacttgaggtcaggagttcgagaccagtgtggccaacacagttgaaccctgtctctactaaaaatacaaaattaaaaaataataataatggccaggcgcggtggctcacgcctgtaatcccagcactttggcaggccgaggcaggcgaatcacgaggtcgggagatcaagaccatcctggctaacatggtgaaaccccgtctctactaaaaatacaaaaaaattagcctggcgtggtggcggatgcctgtagtcccagctacttgggaggctgaggcagaagaatggcgtgaacccgcgaggcagagcttgcagtgagccgagatcgtgccactgcactccaccctgtgtgacagagcgagactgtgtctaaaaaaaaaaaaaaaaaaaaaaagtggccgggcgtggtggctcacgcctgtaatcccagcactttgggaggccgaggcgggcagatcacgaggtcaggagtttgagaccatcctggctaacacggtgaaaccccgtctctactaaaaatacaaaaaattagctgtgtgcggtggcgggcgcctgtagtcccagctactctgggggccgaggcaggagaatggcgtgaacctgggaggcggagcttgcagggagccgagatcgcgccactgcattccggcctgggtgaaagagcgagactctgtctcaaaaaaaaaaaaaaataattaataataataaaataaaaatacaaaattagccaggcatgatggcgcatgtttgtgatcccagctactcaggaggctgagacaggagaatcatttgaacctagcaggcagaggttgcagtgagctgagatcacgccatttcgctctaaactgggcaacacagctagactctgtctcaaaaaaataaaatacaaatacaaaaattagccaggggtggtggtgcacgcctgtaatcccaactacttgagaggctgaggcaggggaatcgcttgaactcaggaggtagaggttgcagtgagctgagatcgtgccactgcactccagcctgggttccagagggagactccatctcaaaaataaataaataaataaataaaaataactaaaagagtaggaggtgccattaaagccatcaaaaatggagtagctaacttaacggaagccgacatgaggttcagaaagataatgtggctagagaagtgactgtcagatgctgcaacatgaaggctgttgatagccttgacaagagcagaagagtggtgcagacagaagccgggctggcttatgtgtactcaagagtgtgtaggccagtttataaaataataattattcaattcagtttataaaataataattatttaattaagccttttaatagaatctgcaggttgaatctagtaagttttcctcccttctttttggctttctcagtgtttaaaaactcccatatttggaaactctctggtgattccttaaagattgaaaatgggtagatgttgaatgctatctaagccagatgatcctgggatcttcccacaccagcttctgggaactgggaaacttctaactagctagacagaactaaagtaccatcttcattatctctccatggcctagcacttatatcctttgcaatcagttgacatttattttcatgtaagtgtataggaaagaagtagcttgctctttccttttttttttttttcttaagagaagacaggatcttgcactatcacccaggctggaatgcagtggcatgatcacagctcactgcagcctcaacatcctgggctcaatcgatccttccacttcagcctcccaagtagctgggactacaggtgcacgctaccatatctggctaattattgtattttttgtagagacaaggtttcaccatgttgcccaagctggttttgaactactggactcaagcgatttggactcaccttggcctctcaaagtgttgggattacaggtgtgagctaccatgcctggccgctgaagtagctgtttctgtttgcgaaagtagttttctgctatcatttatttttgacatcttgtccttggactatatgcagatgttaatcaccttaattatcactatattagctaccagaaacctaaaacattgaaacaagggaatagagatttgagaaatagacctatgcatatatgtaactggtaattcagccaagatacaaaataatcaaatggagaaagtacagtctttttaacaaattgtgctggagcaattggaaatccatacgttaaaagataaaagtactttaacccataccgtacatcatatattaaaattaacacaaaatggatcatagctccaaatctaaaaccttaaaccataaagcatctgaagaaaggcctggcacagtggctcatgcctgtaatcccagcactttgggaggccgaggctggtggatcacctgaggtcaggagttcgagatcagcctgaccaacatggtgaaaccccatctctactaaaaataggaaaattagctgagcggggccaggcgcggtggctcatgcctgtaatcccagcactttggagggccgaggcgggcagatcatgaggtcagaagatcgagaccatcctggctaagatggtgaaaccccatctctactaaaaatacaaaaaattagctgggcatggtggcgggcgcctgtagtcccagctactcaggaggctgagggaggagaatggcatgaacccgggaggcagagcttgcagtgcgctgaggtcgcgccactgcactccagcctgggtgacagagcaagactctgtctcaaaaaaaaaaaaaaaaaaaaaaattagctgagtggttgggcacggtggctcacacttgtaatcccagaactttgggaggctgaggtggatggatcacgaggtcaggagttcgacaccagcctgaccaacacggtgaaaccccgtctctactaaaaatacaaaagttagctgggcatggtggcaggcacctgtaatcccagctactcgggaggccgaggcaggagaattgctgaaacctgggaggtagaggttgcaatgagccgagatcgtgccactgcactctagcctgggtgacagagctagactccatctcaaaaaaaaaaaaaaaattagccaagcatggtagtcagcacctgtaatgccagctactccagaggctgaggcaaggagaatcacttgaacctgggaggcggaggttgcaatgagccgagatcatgccattgcaccccagcctgggcgacagagtgagactctgtctcaaaaaaaaaaaaaaaaaaatccaaagaaaacggagacaatttttgtgaccttgagttggcaaaaatttattagatacaatgcttaaaaatggatacagactgggcgtggtggctcatgcctgtaaacccagcactttggtaggccaaggcggatggatcacttaagcccgggagttcgagaccagcctggacaacatggtaaaaccctctctctataaaaaatacagaaattggctgggcatggtgatgcgcatctgtagtcccagttactcaggaggctgagttgggaggatcgcttgagcctgagaggcagaggttgcagtgagctaagattgtgccactgcactccaaccagagtgacagcgagaccctatctcaaaaaaaaaaaaaaaaagataagtttcaattagctaattaattccaaactcttagtaatatggctcttagcataattattatggtgtgttctagagaagccccttttgaaatcctcatctagctttcccctgccttctcaggggaaaattgaagttatatgaagtcctgtctgtcatggagaccaggcaccctactcctcagtgcctcaccatatctcctttcctaccctacctttggttgatccattcatgcatcactggcttcgtggccttgactgtatctcttggcttcttccttttgggctttggcttctgctactgcctaattatttctccatcttccaagttaggcaaccaagagagggaacctgattggcctagattatttttgcttattctagaccactaaatagatgtgttcaaccagcaatatggtccagtcatcagtgtctggggggtagggtggatggggacatagggcgatgtttggaaggagtctaagggtacgtataatgtggacggtaccatcagctggtatcacgaacaagaggtaggaccatgtgtgtgataaacaacataatatccatagctgtcataaagcaaaatgttgttattcttatttcgttcttccagaaaccattgatcatcaagctgccttccagttatggctctcttattgtatagcccccctcctaaatcagtccataacaggtagtgcgataagtgtttagagaaggagcttttgcctgttctctaggtgagaggtagagatctcaaagtatgtggcaacagaggatagaattgtggattagttggaaggtgttatcagaggtcatttgatagaccctcaactctgaatatagcacccaaaccatgcctttcaaataaacaacagtctatcctcttatactttaatctgttcctgtgtaagcaattctcaaggctagttcttcatgacgtttgagccacttttttttccctgatgggtttcatagtatccatcctataatggtcagcatgctatttgattttagtgtgtccttttttcttgcatgatgcttcttttgctatttttcttcttggcttttcatctttaggtttgttgaggtccttaaatcctgattgtcaatgtcctaggatcccagagacaaaatggacttatgtttttttttttttttttttttttggtcacataactggagggactgagcttgtgtttgctttctgttagaagaactggtgcatctaagacagtcagctgcagaatttggtttggctagttaagacgtccatggagatggaatatcatgcagtccaggtagaaagatattaacgggcctatgaagacaggttgcctacccaaggcttctcaaacttgagaaatcacctgggcatcttgttaaaatgcagattttaattcagtaggtttggggtgtggcctaacatctggaaacctgcatttcaaagaagctcccaggagatgttgttgctgcaggtctgcagacacacttggaggagtaagaactagggggtttaatattcccaaacaggtgagcagaagtggcctatatcgctccccgtcgatgccagagaacttgaacaggccaagactgaagcaggtggaaaaattcaaggacaacacaataccagataaagttaaaaaaaagtatttttctggccaaggaaagctcaggaaggtaagaactttttaagatgaaaatcttgttcatcttctatctcatgtctttgcttttctggtatgaggattgttttattatgccttttttgtcttcttcctctttacttttactttttcctctttgttctttccatctttctgtcttttctacatctgtatccacgtgaaatatatatatatatataaaatatttatataacatagatacataaagtatatctatattgtacttttagaaatgttgtcataggccgggtgcagtggctcacgcctataatcctagcactttgggaggccgaggcgggcggattgcctgagctcaggagttcaagaccagactgggcaacacggtgaaaccccgtctctactaaaatacaagaaatcagctgggcgtggcagcatgtgcctgtagtcccggctactcaggaggctgaggcaggagaatcgcttgaacccgggaggtggaggttgcagtgagccaagattgtgccactgcactccagcctgggcaacagagcaagactccgtctcaaaaaaaaaaaaaaaaagagaaatgttgtcatcataccgtcttcccaaccctttttcttaagatctgaaagaatacaagggaactttggtatggatattttactgctgttttacatgcagtctgacagaaacaacatcatatagcaggttggttttgtggaaagcaacttctgaaaaacttagcctttgtcctttaccctccccaactttaaaaaaattaaatagatgggaggatcacttaaggtcagaagttcaagaccagcctggtcaatatagcatgaccccatctctaataaaaaaaaataaaataaaaaattaaaattctaaaatctttggatattttataaaatcaacttatttatttatttatttattttcccctgagatggggtctcactctgtcacccaggctggattgcagtggcatggtcttgactcactgcagcctcaatatttatttattattaaaaataataaataaacaaatggagtctcactctgtctcccagactggagtgcagtggtgcaatcgtagctcactatagccttggcctcctgggctcaagtgatctccctacctcagcctcccatgtagctaggattacagatgtgcgccaccatggcccactccatccactggtttttaaacctttaacatgaggattgggtgtggggtgggaatcttgtcatcttcagggcttatgtttaaagaagacagtctctctgtgtgacattactatcactcagatgctggaggaagattctaaccaggggcacctgattggtgatttttccaaggtgagtttggctacacccatcctgtatttcagtgagtcattttggatctgaatcttctctgtttgccgagaatgcctggtgtaaatatgcatcctcaccaagtactctttggtaacctgacagtgctctagtggtagatccaggccctaagcctttccagagagaaagtatttcttattcttctgggaagatccagaacaggggaaagtatgagactttttaccttttttctgtttaaaaacatattttaaaattatgtaaataatacttggttgttacagaaaaagtagaaaatgaagaaatttatcccaaactttattaaccagggtaatattgcttagtatatactctttttttcccccctactgtctgtgtaattgcagaaggtacatattcttacagatttttttctgtgttttcacaaacacatatacaaatacagtttttgcttttctacaaaaacagtttatattgttttgttatctgttgtttttcctctcatttaataattatatcaggggcatcttttttcatattaataagcagttatgcttcattctttctttttttaagattcaaggtcttgatctgttgcccaggctggagtacattggcatgatcatagctcacttcagcctcgagctcctggcctcaagaaatcctctctctccttggcttcccaaagcactgaggttacaggcatgagccaccatgcccagcccatttcattttaatagctccatattatttcttttttttttttttttggctgctcataatttcttcataaatcccttcttgtaagatatttggttttacaattttttcttatgaatgataccaagatgaatatatttgtagagaaatctaaaacttcgtacacatccttgatttgttctttaggatcagttcttagaaatggacttgatgtatatgcactttatagagacactgatttttttgaaggcctctggggttttaagggtcacttggaaagaaggacaaaataagggtctttgatctcaaacttgggtgtggaatacttgctgttatttcagctcttgtgtatttctaggtatgtgcgctgccaaccgtgtcagggaaacaccaagatctgaagtatgtcaacccagaaacagtaagcagatttctggagatggtaactggttacataagctaccatctggtctcttctgtccctaaaatgcccatttccatttgtatttctttcactgtgttcactcacacaggctccttattcaactgaagttatattgaaggactcatttttttccccattcttctctctccttcgtttttagttaaacaaatgatacatagtttttgtaaaagggaaaaagggaggggtcaggcatggtggctcacgcctgaaatcctagcattttgggaggctgaggcaggcagatctcaggcacttgaggcagggaattcgagaccaccctggccaacatggcgaaaccccatctctaataaaaatacaaaaaaattaaccaggcgtggtaatgtgtgcctataatcccagctacttgggaggctgaagcacaagaattgcttgaaccccagttggggaggttgcagtgagcagagatcgtgccactgtactccagcctgggcgacacagcgagactgtctcaaaaaataataattacttaagaaaaaagggagaaagaaaggaaaataaaaaatcacacacaagaaatggtctcaattaaggtctcaattagggtgaccatgcaccctcgtttacattttacaatcccattttcatctattagtgagggtaattattaatagtgtttgctttcattctcaaaagtctcccagtttgtacaaaaattatttggtcaccatacccacaatctcatcaccagagataaccactagtcatattttcctatggccttccagattttattttatttttagacatggagtttcgctcttgttgcccaggctggagtgcaatggcacaatctcggcttgctgcaacctctgcctcccggaggtcattctcctgcctcagcctcccaagtagctgggattacaggtgccagccatcacaccgactaatttttgtatttttagtagagacggggttttactatgttggtcaggctggtttcaaactcctgtcctctggtgatccaccctcctcagcctcccaaagtgctgggattacaggtgtgagccactgcgcccagccccagattttattctagcatatgttttatagaaatgggatcatgggcctagcacagctcacacctgtaatcccagcactttgagaggccaaggcaggcgaatcacctgaggttgggagttcgagacgagtctgaccaacatggagaaaccccgtctctactaaaaatataaaattagctgggtgtggtagcgcatgcctgtaatcccagctactcgggaggctgaggcaggagaattgcttgaacccgggaggcagaggttgcggtgagccaagatggcaccattgtactccagcctgggcaacaagggcgaaattccatctcaaaaaacaaaaaaaaaggatcatgatgaacgtatagtattgcaatttgcttagtgagacattatagacatctttctatatcaataaggtatctatattatcattttaatggctatataatgccgctctattctactgacatgtacaatttattttaccaaacccctattattgaatattgaagttatttctaatatattgataatataaaacaatgctgagatgaatataattgtgcctacatctttgtgtacttttcctgtttacttaagatgttagaaattgctgagtcaaagtgtgattacatttatttgtatatgtatttacaaagttcccttcagaaaggctgaaccaatttgcactcctacaagtagcttcagtttcttccttcctttaggtatcaacctttcccttccatatcctttcctgaaagacttactttcttcctttttgatggtgggtagggaaccattttgcatttcttcctgcaatttcaagctctctagctgctgcctctgccactgcagaagtccttgggcatctcctgagtccagccatgcctatccccagatgggtagcctgaatatggttttccttggtatcttgtcagtgccagctattttggttctctaaaagggccacttcctgtttcattctcttttgtggagtggggctgaatcattgccacatatcaaatatggggtgactttggaggctggacatacagtggacagaacaggagtatgcttgtaaggaactgtgtcattgacccttctctccctcagagtggcagtgagcagaatattcagtcattgtttctgtccaggtggctgccttactgtcggggaagttccagggtctgattgagaagttttatgtcattgattgtcgctatccatatgagtatctgggaggacacatccaggtgagacgacattgtggccattagtaggggagggctggagataactctttattgagaagagtctgtggacaaaggggtctatgaactctagagtcaggacaaagattacatatttgaagcacctcaaggctgaggtcctcattgttttaattctgtataccttaagcaggttactttccctttccctcctagatctatctccctcttttctgtaggagccaaggggtcctacctagaaataaaaacattaatccaaggactgaagcactttgcaaacacttactattcatgaacattcctcgcagtgatctctatacttccagtggttcaggtctataaacatttattgaccatctacaagctctatgccaggcgttcagggtatatacagagatatacttagacccctgccctaaaggtgcttatagtccagcttttctggtccacattatcccaggttggcgtctcagtcatttctaagtattggcactgtctataagcccctgaggaaatacttactaaaattcttcttctacagggagccttaaacttatatagtcaggaagaactgtttaacttctttctgaagaagcccatcgtccctttggacacccagaagagaataatcatcgtgttccactgtgaattctcctcagagaggggcccccgaatgtgagtgtctaaatggggtctggcgggtgatggaaatggattttgagttggacttcccacaccagttcagacagagactgactggattctacagtttgaagaatgttagggaggttgaaggaagacgtttctaaaattgaaaagtttgaaacaataaaggaaaagggattgagaatgaggctgcagtggaggaaaggaggaagggtggtactacttggacctttttttgcaaacacagggagattggaaagtcctttttgaggttggcaatagtctactcctctcccccctccccagtgaatggcccctgggatcctgaccttgtttctttccaccccacccatctctgggttctctctaaaggtgccgctgtctgcgtgaagaggacaggtctctgaaccagtatcctgcattgtactacccagagctatatatccttaaaggcggctacagagacttctttccagaatatatggtaaagggtggggcatgcggggagccaaactttaacaactcaactcccagggcctgcaaagccttcagagaagaaactgctgctcctccttagccactgccagcagcagcatctctattatccttcataggtagagttcaggagtctagagaatcccttactctgttccttacctttcaggaactgtgtgaaccacagagctactgccctatgcatcatcaggaccacaagactgagttgctgaggtgtcgaagccagagcaaagtgcaggaaggggagcggcagctgcgggagcagattgcccttctggtgaaggacatgagcccatgataacattccagccactggctgctaacaagtcaccaaaagacactgcagaaaccctgagcagaaagaggccttctggatggccaaacccaagattattaaaagatgtctctgcaaaccaacaggctaccaacttgtatccaggcctgggaatggattaggtttcagcagagctgaaagctggtggcagagtcctggagctggctctataaggcagccttgagttgcatagagatttgtattggttcagggaactctggcattccttttcccaactcctcatgtcttctcacaagccagccaactctttctctctgggcttcgggctatgcaagagcgttgtctaccttctttctttgtattttccttctttgtttccccctctttcttttttaaaaatggaaaaataaacactacagaatgag

SEQ ID NO: 35 - DNA, 3638 bp, Homo sapiens
agttctcactgagacctgtcaccccgactcaacgtgagacgcaccgcccggactcaccatggtgagtgcggcccggccggggtcgcgcctgtcccctaattgcccctctcctttgggggacacttcttccaggcatgctcggggacctccaccgggcgttccgggtctccaggaggtgcgagggttttgcatcctccctccccaaccccctcctggtgactttggccgagccgtatagttcaccttcggtggctggggttggggcttggggtggagtgcgactcttcagtaacagagaggaacccttcctggcactctgctcctgccttacgagcatttgtgtcccgactctgtatgagagtcacgcgggcccgcgccccgtcctttccgcgggcaaaagaagacgggtttggctgccctcttacatccccagtccctggtcctcagcactgaccgagcacgtgcttggcgctagaaggtggaaggggtcaggttacctggtgccgcatccccctttcctctgtgtatgcattccaactatccacagaaccaccccccccccgtgactcagcaccccgcgtctgagctgagagggttggtgggaacggggttcggcctcctgaagcgagctggccctctccagccgaagcccgggtgcgcggatgggcagagacagctggcgctgagcactgcgcgggccgaggccaggttggggggaggggagagaggtgcatgtagggggtggtatttatagcccaggagcgggggccgaaacccaatccccgctttgggctgggaaataactgtaaagactccagagggagagcggatgtagggctgggctgcaggatggcgcccatcctgcccgggacaaggcgggtcacctctggggcctcaccgcaggttccacttcctttctgggtatttggaaaccgtcaccccgccatttcggtgtgggaagagcgcgcgggccctgccggactttagtgctttaggggttaatttcgggctgacagggacggagcctaaggcagtgagcgccccagtaccctcaaaccttattgctggcccctgctgtctgagcttacaagcattaccgccgctatttccgtgcgggctgacacgggagatgaaagtggtgaagacacccagggtgcgggggtggaggtggggagaggagccagatgggattgatccccagagccagatgggatttaaaggtgagggaggagggcatcctgatggcgtgtggtcagttgatgccagattggatggctgagacacctctgcagcttacaggaaagaaagagggaaagggttctatgaattctagctgttcatactcaaagcaaataattaatcaagtggggggggggcctctagctgtaaacccatacctctaggaaaccttttgtcatgtggagccacagtgctcacttgacagattccccactgagaagtgggctaagaggttggcctgcattgctgggtgcctccaggtggggagtcctgtacctgggagcccgggcaggctgctactctcttctcacctctgcccagccccaaccctccactcttgccaactgagtcatcctagctggtagatgatagggtggaagagagactcgcaaggtgaggacttgtggatgtggggctcatgctgtgtcccctctctctatccctcagcgtgaatgcatctcagtccacgtggggcaggcaggtgtccagatgggcaatgcctgctgggagctctattgcttggaacatgggattcagcctgatgggcagatgcccagtgacaagaccattggtggaggggacgactccttcaccaccttcttctgtgaaactggtgctggaaaacacgtaccccgggcagtttttgtggatctggagcctacggtcattggtgagaggaagtggggacaaaattgaagggggtggagcatgactcaaagcttctccctggagagagagggtatttagaccaggcattcctagccctgaaaattcctagccgtacttgaagctgcagaaggcaagctgatctgagactggcctgggcagctggtctgggtttctctcacactctggtatctcaggctggcaggaggatgagtccttccatgcatctggccacagctaccaccctgggggaggaaggtccctgctgagcatagctttgtggtttttgcccttccagatgagatccgaaatggcccataccgacagctcttccacccagagcagctcatcactgggaaagaggatgctgccaacaactatgcccgtggtcactataccattggcaaggagatcattgacccagtgctggatcggatccgcaagctggtgagagtgtgtcttgggagggagggaacttttgagactgtgctaatggtcaggaatattttttttcagatcctttcaggaggtcatctctaactatacatggtctcgagtgtggtgctgctatggcatcctcagtatttgccctgactgctgatgtatcttacgctttatggagccaggtgatagagtccctcaggcccctcccctacctaaactgttctttctcgttcttgcctttcagtctgaccagtgcacaggacttcagggcttcctggtgttccacagctttggtgggggcactggctctggcttcacctcactcctgatggagcggctctctgttgactatggcaagaaatccaagctggaattctccatctacccagccccccaggtgtctacagccgtggtcgagccctacaactctatcctgaccacccacaccaccctggagcactcagactgtgccttcatggtggacaacgaagcaatctatgacatctgccgccgcaacctagacatcgagcgcccaacctacaccaacctcaatcgcctcattagccaaattgtctcctccatcacagcttctctgcgctttgacggggccctcaatgtggacctgacagagttccagaccaacctggtgccctaccctcgcatccacttccccctggccacctatgcaccagtcatctctgcagaaaaggcataccacgagcagctgtcggtggcagagatcaccaatgcctgctttgagcctgccaaccagatggtaaagtgtgatccccggcacggcaagtacatggcctgctgcctgctgtaccgtggagatgtggtgcccaaggatgtcaacgctgccattgccgccatcaagaccaagcgcagcattcagtttgtggactggtgccccacaggcttcaaggttggtatcaactaccagcctcccactgtggtgcctgggggtgacctggccaaggtgcagcgtgccgtgtgcatgctgagcaacacgaccgccatcgccgaggcctgggcccgcctggaccacaagttcgacctgatgtatgccaagagggcgtttgtgcactggtatgtgggtgagggcatggaggagggtgagttctccgaggcccgtgaggatatggctgccctggagaaggattatgaggaggtgggcatcgactcctatgaggacgaggatgagggagaagaataaagcagctgcctggagcctattcactatgtttattgcaaaatcctttcgaaataaacagtttccttgcacggtt

SEQ ID NO: 36 - DNA, 22977 bp, Homo sapiens
gcgtccggcgccgagattcaaactagtggcgggaggctgtgagctgagcggtggggtctgcgtacgcctggagtccttccccgctgtgctcagcatggaccctatccggagcttctgcgggaagctgcggtctctggccagcacgctggactgcgagacggcccggctgcagcgagcgctggacggagaggaaagcggtgcgtgaggcgggcggccagggcacggtgcgtggggtgcgccgcgggcggaggggcgtggcgagtggacggtatgtcccacgggaaccgccaggcactgacggcgtggacggctgccaccgaggcgcagggcgggtgctgcgcgtctcactgctcggcgtttggcgttagcgtagctcccgggcctgtttatggtttattcctaggaacccttgtcgcgtgtccgttttagacccatgtacaaccccacggctctcttgagataatgaaagtagcactattacgttataaacagagacagcagcacttaagaataagaacctaaattaacagattgagctcataatacatatactaatttatacgtgatatgctttcgtcacatacaatatgtgtgcttgtcagtaaaataccatgtaaacctaaacagtttctcttagaatcaagctatttaacgttctttacacaatactttacacatatagtgacttttttctcactcacgtggtccacagttgcagtaaacctctgtgtttttcccgctaaaccatgttgccaacacaaacactagtactcaacagtgctggggtttaaaaaaatatgtgtatataaataaagcaaaattcaccattcccctttttattagagattttttaaattgttgaaaaagtagttcagattttggaattatttcataaatgtcataattgtaatgtgctttaaaatattacaccctgcagactacttttactttaattatataatgaatgatctccagtcacttgaaaatgtctatttctgcccggcgcggtggctcacgcctgtaatcctagcactttgggaggctgaggcgggcggatcacaaggtcaggagatcgagaccattctggctaacacggtgaaaccccgtctctactaaaaatacaaaaaattagccgggcgtggtggcgggcgccggtagtcccagctactcgggaggctgaggtaggagaatggcgtgaacccgggaggcggaacttgcagtgagccgagatccgccactgcactccagcctcggcgacagagcaagagtccgtctcaaaaagaaaaaaagatttggccgtgcacggtggcacacgcctgtaatcccagcattttgggaggccgaggtgggtggatcgcccgaggtcaggagttcaagaccagcctggccaacgtggtgaaacctcgtctctactaaaaatacaaaacaattagctgggcatagtagtgggcgcctgtaatcccagctactcggaggctgaggtgggagaatcgcttgaaccctggaagcggaggttgcagtgacccgagatcgcgccactgcactccagcctgagcgatcttagactccatctaagaaagaaaaaactatcttcagatggtcatcaggaatgtgaaaagacatcaatttcattagtcatcaaggaaatgcaaatttcattagtcatcaaggaaatgcaaattaaatctcaatgtagtacagttgcatacccagcaggatagctaaaacgaaaaagagaaaattaccaagtgtttggaaagatgtggaacaaatgcgctttttgttgttgttgttgttgttgttggagcagtacgcactttttttttctttttttaaaattattatacttttaagttctagggtacatgtgcacaacgtgcaggtttcttacatatgtatacatgcaccatgttggtgtgctgtacccattatctcgtcatttacattaggtatatctcctaatgctatccctccccccttccctcaccccatgacaggcccaagtgtgtgatgttccccttcctgtgtccaagtgttctcattgttcaattcccacctatgagtgagaacatgcggtgtttggttttttgtccttgcaatagtttgctgagaatgatggtttccagattcatccatgtccctacataggacatgaacttatccttttttatggctgcacatggtgtatatgtgtcacattttcttaatccagtctatcattgatggacatttgggttggttccaagtctttgctattgtgaatagtgcggcaataaacataagtgtgcatgtgtctttatagcagcatgatttataatcctttgggtatatacccagtgatgggatggctgggtcaaatggtatttttagttctagatccttgaggaattgccacactgtcttccacaatggttgaactagtttacagtcctaccaacagtgtaaaagtgttcctatttctccacatcctctccagcacctgttttttcctgactttttaatgattgccattctaactggtgtgagatggtatctcattgtggttttgatttgcatttctctgatggccagtgatgatgagcaggaacaaatgcacttcttatgcactgctggtgggagtgtgaactgtaaaaatcatgttggaaaactagcagtatttactgaagttgagcatatgcataacatataatccagcactttttctgagtctcttaacatacagaaatatgaatacgttggtaccaaagacatgttctaggaagttcaaagcaagagtattcataataattccaaactaggcacaatccaaagtgtttcaacaatagaataaataaatatggtatcacgcagtggaaatgctacacaataatgaacatggattagattacgaacgtggaagaatgtaacagttgagtgaaagaagccagtcgcaaaagagtacatattgtttgagtccattaaatcaagttcataagtgacaaaactacttcatggcgttagaaatcagggtaaggtggctgggtgcagtggctcacgcctataatcccaacactttgagaggccgaggcgggtggatcacttgaggtcaggagttcaagaccagcctcaccaacatggtgaaacccccatctctattaaaaatataaaactagccagatgtagtggcgcacacctgtagtcccagctacttgggagactgagacaggagaatcgcttgaatccgggaggtgaaggttgcagtgagccaagatcgcaccattgcactccagcctgggcaacaagagcgaaactccatctcaaaaaaagaaaaagaaatcaggctaaagtttacccttgtggggaagggagagactataagagggcttctagagttctactaaggctctgtttctcctttttcttgagctgagggccagttgtgcaggtatgctcattttataaagttcattaaactatatacttaggatttgtatgcttttcagtatgtatgttatacagtcatgttacttaatggggatacattctgagcaacgttaggcaattttgttattgtgcgaacatcatagagcatatgtaacacaaacgtagatgatatgacctactgcatacctaggctgtatggtgtagcctgtcgctcctaggccacaaacctgtatagcatgcgactgcattgaatactgtaagcaactgtaacattatggtaagtatttgtgtatctaaacataaaaaaggtacggtaaaaaatatggtattatcttatggtaccactgtcatatgtgatctgtgattgaccaatgtcattataaggtatatgattgtatactattctttttcttcctccttttccttacatttattggacttcttttctttcaatattcatattgaagactttgaagattatccaatgagaattttatatgaccttcattcagaagttcagactctaaaggtatcactcctacaatattgatttattatttttctgtggcgagtaatttttttatcctaaatagatttagtcagaagttagagaaattaaaatgtactttctttattcataaaaggatgatgttaatattcttcttgataaagcaagattggaaaatcaagaaggcattgatttcataaaggcaacaaaagtactaatggaaaaaaattcaatggatattatgaaaataagagagtatttccagaagtatggatatagtccacgtgtcaagaaaaattcaggtttgaataacttcattttatagcatttgttttagtattgaagaaacaaggcagcatgattaagacaactgtagccttggctatggtttttagttctagctctgttgttatctgacgcttatttgataaatatttagtcaactctcactgtgtggtgtgcttttggagtgctaatcaggggtgtaatataaaaacagtccttgttctcctttccaaaatgccaaatgaaagctagcacaatgctagatttagcacatttaggctagatggcctatttaaatgaaaaactacaagataaatcttcaaaacttgggataggtggtttctagttagccctgccaataaaagctgagagacctcgaggcatgttatttcatttttcttgttcacagtgttctcttctatagaaagagatattggctataaaatttgacgaagtccttttttgattctaaaattttaatgaagggcattctatcatagtggtttagaatttggagtcaaaatgcctgagttcaaatccgtattccaccacttaatagctgtattattatctttgtcaagttacttaaccttgtgcctcagtttctcatttgtaaagtgggaatgtttagtatatctatctcatgagattgtataaggattaaataagataaagttgcttacagcagttcctagcatgtcagtcacccaagattaattattaactgttactgttatgcccatacctctgaatgactaacttcagtgtcttcatttcttttttttttttttgagatggagtctcgctcagtcgtgcagtggcgcgatctcggctcactgcaagctctacctcccgggttcaagccattctcctgcctcagcctcctgagtagttgggactacaggggcccgccaccacgcccagctaatttttttgtatttttattagagacggggtttcactgtgttacccagaatggtctcgatctcctgacctcgtgatccgcctgtctcggcctcccaaagtgctgggactacaggcgtgagccacagcgcctggcccagtgtcttcatttctgttattaaattgaacaagtatgtattgaggatgtgtgtggcaggtaagttaaacagtccatgtgagacgggcacagtggctcatgcctgttaccccagcagtgtgggagattgaggcaggaggatcacttgaggccagggctacataatgagactctgtctctacaaaaaattcttttacaaaattagctgggcatggtggtgcacacttggagtcacagctattcaggaggctgaggcagaagggatcccttaagcccacgagttcaaggccacagtgagctactatcacgccactgcactccaacctgcatgacatagcaagaccctgtctcaataaataaaatacatacatacatacatacatacaaacaacccataccaccaccaccaccccccacgtggaatcatagaattcagttgactttggtgtgaaagagccacagattcaaatacgggctccaccagttattacatgcgtgaccttgggtaatttctctaagttgctttttcctcacttataagatggggataataatatctccctatggagtagtgataatgatgatttattaatctctgaaatgacagcactgtgataaatacatcagtaggtttttggaactcttgtagcaagaactttctgttctcaaaagtaacagaaagcataatgccaaaaacaactcagtgactcagaagctcttcaaaggaacaaaaactatgaaatcaaaatataaaactttagagatttaaactcaagacttttaaaacaaaacaaacaaacaagaaagtatataaccggccaggcacggtggctcatgcctgtaatcccagcactttgggaggccaaggcgggcagatcacctgaggtcaggagttcgagaccagcctagccaacatggtgagaccctgtctctactaaaaatacgaaaattagctgggtgtggtggcgtgtgcctgtaatcccagctactcattaggctcatacaagagaattgtttgaacccaggagacggaggttgccgtgagctgagattgcaccaccacactctagcctgggtgacagagcaagactccatctcaaaaaaaaaaaaaaaaaagtatataacctattaatggttgagaaactgtatatctttgaagtgctctcctattatttttctcaactaggtgttttatataggtgttccagactaaggatacaaacttatctttatatagcagtctttgctatttagctgaggcatctggaagttacgaatctaaaataatatcatactctgtgttaaatctggaacacagttgattccatactgtcatgaaattttaaaatacagtttcaggccaggtgcagtggctcacgcctgtaatcccaacactttgggaggctgaggcaggtggatcacttgagcccaggagttcaagaccagcctgggcaacatggcgaaaccctatctctacaaaaagtacaaaaaattatctgggcatggtggcacatgtctgtagtaccagctgcctgggaggctgaggtaggagaatcacctgagcccagtgttgtgggtgtgactagctggggctagtgtctcaggtggtaaaggaatttaccaagacagttgtaggtagagaaaggcagatttattagcgaaagtatgaaaatacattgcaaggttgcaatgggcagtacagcagagaaggggctgtctgcaaagaggcagaggctgaagggaagttttatagggtcatgctggaggcgggctaggtacagaacaaggttgttgtgaccaggcatggtggctcacatgggtaatcccagcacgctgggaggccgaggtgggcagatcacttgagctcaggagttctagacctgtctaggcaacatggtgaaaccctgtctctaccaaaaatacaaaaaattagctgggcatggtggtgcgtgcctatagtcccagctttggaggttgaggctgcagtgagccgagattgccactgcactccagcctgggggacaaagtgagaccctgactcaaaaaataaaaataaaaaaaaaaaggaacaaagttgttgtgcctgcaggttgtttgtgattagccttttctcagaacagttgttcattgttcgccccaacctggggccttcccccattgttgcctacttatctgtgattgtgccactgcactccagcctgggcaacagtcaaagctacagaaaatatattctgatgctcactgaagtctgagaaagaaaaaaaaaaaagaaagaaaaaatattatgaaaaactagtaaatcacattaaggatgtaagaaaattggacttttatttgtgaatattaatttttcatcttataacacttttaacttgctttccttctctaatgtataatcacaatgagatatgggtgcacaagagatacatgtcagaactttattaaagggacaattgaaataacatttcagctgagtgtggtggctcatgcctgaaatcccatcactttggggggccaaggcaggaggatcatttgagcccaggagtttgacaccagcctgggcaacatgatgagaccccactctacaaaaaaaaatttttaaaattagctgagcatggtggcacacctgtagtcccagctaccccaggggctgagatgggacgatcacttgagcccaggaggtcgaggctgcagtgagctgtgatcacacctctgtactccagcctgggtggcagagcgagaccctgtctcaataaatactaaataaataaaatgtttagacaattggaacttttgctgatttgggaaatttcagataagctgttttctgttgtttttgtaaacgtgaaattttccattttgagtttgaccagaatattctgatttttcctcctagtacacgagcaagaagccattaactctgacccagagttgtctaattgtgaaaattttcagaagactgatgtgaaagatgatctgtctgatcctcctgttgcaagcagttgtatttctgagaagtctccacgtagtccacaactttcagattttggacttgagcggtacatcgtatcccaagttctaccaaaccctccacaggcagtgaacaactataaggaagagcccgtaattgtaaccccacctaccaaacaatcactagtaaaagtactaaaaactccaaaatgtgcactaaaaatggatgattttgagtgtgtaactcctaaattagaacactttggtatctctgaatatactatgtgtttaaatgaagattacacaatgggacttaaaaatgcgaggaataataaaaggtaagcagctctgttaaaaggcatattttatctagctttctaaaccttttgtatttattgattttttttccagaagaaataaaatgtttcagacatttttgctttaaaaagttttcagatatttatttatttattttatttcaataggttttaggggaacagatggtgtttggttacatcaataagtttttttttggtttttttttttgtttttttttttcgagacggaggcttgctctgtcacccaggctggagtgcagtggtgcgatctcagctcactgcaaactccgcctcctgggttcacgccattctcctgcctcaccctcccgagtagctgggaatacaggcgccagccaccacgcctggctaatttttttgtatttttagtacagacggggtttcaccatgttagccaggatggtcctgatctcctgacctcatgatccgcccgcctgggcctcccaaagtgctgggattacaggcgtgagccaccgcgcccggccaataagttctttagtggtaaggttttcagatactttatattagagatcttctcaaatcaccaatactatcaataaagtgtgagctgtcagtttcttcaggtgagagactatagaagtgataagggcctgaaaaaaagatatttgtagggatagaagaggaaataagattaaaggggtaaaattagtaagaacttgtgattgatttgctatggagacatgggaaaaggggatgatctaggataaaccccaagtttctgttttgttgcttgggatgatgttagaacaagaaaagaatacctggagtatggggggataggtgatgtgtttacatgttggttttgacattgttagtgcctcttcatgcttaggcattctaatatcagtttaaagctcagtgaagaattcagtgctaaactagatttgggagtcattagcatggaaatggtgattaaaaccgtaagagttacaatgaaaataccacttatcaaagtagccaagcaatgtctatagataaatacttatcattaaaaactgttactattaaagaaggataacaaacattcctgtcaaagaaaaaaaccccacaactctggggaaaaaaacactaaagataaaattttaatccaaaagatttttaaaagagtagaattgataaacctaagaactggtccttatctaaacataaatacaaataagagcattaagaactaaggactatattgtgtgttttgtttgtttgttttgttttgtttttcagatggtcttgttctatcccccaggctggagtgcaatggctcgatctcagctcactgcaacctccaccactgggttcaagtgattctcgtgcctcagccacctaagtagctggaattgcaggcacacaccactacatttggctaatttttgtatttttagtagagacagggtttcaccatggtggccaggctggtcttgaactcctggcctcaagtgatccacctgcctcggcctcccaaagtgctgggtttacaggcgtgagccactgtgcctggcctatgtttttatttttctaagctatcagaaaatatcgtaggttatagtattgggaaatttgaaaatttcagatatattaaagttttagaaaataatacaaaatgataaaaattgacttgaagtagaaaacctgggtagaccagtaatcagagaagaaaactgaaaagttatcagataacaggccaggcacagtggatcgcttgacattaggagttcaagaccagcctggccaacaggatgaaaccctctctactaaaaatatgaaaaactagctgggtttggtggagggcgcctataatcccagctacttggaaggctgaagcaggagaattgcttgaacccaggaggcagaggttgcagtaagctgagatcacgccactgcactccagcctagataacaagagcaaaactctccaaaaaaaaaaaagttatcagataacaagctccaaaaagctctgagcatagatggtgttctggaggaatcctttctaatgttatgtcatgtcatgttattgttttgagacaaggtcttgctctgttcccaggctggagtgcactggggcaatctcagctcactgcaacctctgcctcctgagtttaagtgattctcgagcctcagccacctgagtagctgggactgcaggcatgagccaccacgcctggctaatttttctatttttagtagagatggggttttgccacgttgcccagactgctcttgaactcctgggctcaagtaatccacctgtctcagcctcccagagtgctgggattacaggtgtgagctaccacgcccagcctaacatcattcttgatgttctggccagtgtaatgagataggaaataagaaatatttctgtgttgcacttctaggccattttgtacctaggcaactcaagaaaatcacatgaaaaacgtatagaaataataaaattcaagtaagaggctgaaagaagatatatattttatatagttacacagggcaactatttctttctttatgtatttatttatttatttatttatttttagagacaggttcttagtctgtcacccaggttggagtgcagaggcatcatcatagctcactgcagcttcgacttcctagactcaagcagtcctcctgcctcagcttcccaaggagtaggtgggactacaggtgtggaccaccatgcctgcctaatttttttttttttttaactttctgtaaagacagggtctcactgtgttacccaggctagtctctaagtcctggcctcaagtgatcctgaaggtatttttgaagtaaagatgattcagtaagttatactggaacaattagttaactggaaaaaaaatcaagtcatctctgcctcaagtcaacataaaatatagatagatcaaaaagataaatatttagataaattatttaaaaaataaaagaaaatatagataagttatctgtttaaacagtgaaagcgtatactgcaattaccattatgtttgtaattgcaagaaacttgtaaattaattgacatgattagacatcttaacgatatttgtttattctattcagaaatatggaagggaacatgagtcaggcatggtgattcatgccttagttccacctgcttgggaggctgagctgggagaatcacatgaacccaggagtttgaaaccagcctgcgcaacatagctagatcccgcctctaaaaaaataaaaataaaataaatagactggaacatgaagcatataaagggcaaaaaataaaccaagaaaataattgcactgagggctgttacacacatactaataagaaaccactaacaccaaaagcagcctaggcaatggacaggaatagatacgactaataaatattttaaaaacagttttgtctatcaaaatagtacaaagcatatttgttttaactgttagaagagtacaatgaaacgtgtgttcatatatcattgtcaggaatgtatcatggaaagagttgattcttaactgtttaaaaccttttacctaggtaaatgactattttacctctacgaaaacttaacaaacattttggcacagtggtgtttattacagccttattttaaatggggagaattggaaagaaccaaaataactaacaggagaaagtagataaattatggcatgacatcaaagctagaaatcatactaaagaatatggatagatttaatcacatacaaactttaaaccactgtatcataaaatatttgaccaatgacgaagcaggaaaagtgttataacatgataaatatatgtgcatatatatgttatatagatacataacaggttttaaaaacccatatgcagtaattagtgaaagacagacatcccaatttttaaaacaagcaaagacatgaattaacaaaagaagaggccgggcgtggtggctcatgcctgtaatccaaacactttgggaggccaaggtgggtggatcacttgaggtcaggagttcgagaccagcctagccaacatggtgaaaccctggctctactaaaaatacacaaattagccgggcgtggtgacgggcgcctgtagtcccagctactcgttaggctcatagagaagaattgtttgaacccaggagatggaggttgcagtgagctgagatcgtgccactgcactccagcttaggtgacacaatgagactccatctcaaaacaaaaaaaccccagaagaaatacaattgaccaataagcatatgaacacttttagccttgcaggtaatgaaggaaattcaaataaaaaaatgagatgtcatttttcaactatccagatgcatatttggctaaaacatatccagatgtttttatttccaagttttaactaggcttattaatgttaagagagagaataccaaaaaagacaggttatattcagtgttgataagacataagaaaatgcttttataatgctggtggccactggtgaatctttcttagggaaaattgtcagtgtatataaaagcctttatgaaattttacttaaatgaacaaattcaaggaaaacaaagtgtgcatatagtgttatatatataacactattatttcatttatagttcaaaagttcaaaagcacaaaaattatattaagagtacacaagtagttaaagtaccaagcaaatctagacagaaatttccctctgtagggcagagatgggtaccaagttgggaagcttccatagaggactacacaggtactagtagtattctttctttctttctttctttctttttatttttagagacagggtctcactgtcatattttggttctttccaattttcccctattataaataagctgtgataaatactactgtgccaaaatgtttgttgagttttcttagaggtaaaatgactgggtaaaaggttttagacatttacaaatcaactctttccatgaaacattcccaccacccaggctagagtgcagtggcaggatgatagctcactgcagctatgaactgggttcgagtggttcttccacctcagcctgctgcgtagctgaggctacaggtatgtgccgcaactcccagctaattttatttttttttattttttgtagagatggggtcttgctatgttgcgcagcctgatctccaactcatagcctgaagagatcctcccactttggccctgcaacaggcataagccactatgcccagcccttttatttttagaacttttgtacaacatatatattcttttgtatatgtgccatactgtatacacacttttaaaaaaatgttttacacaatgaccaggtgtagtggctcacacctgtaatccacacctgtaatcccagcactttgggaggtcaaggtgggtggatcacctgaggtcaggagttcgagaccagcctggccaacatggtgaaaccctgtctctaccaaaaaaatacaaacattagccaggcgcagtggtgtatgcctgtagtcccagctactcgggaggcttaggtgggagaatcacttgaacctgggaggtggaggttgcaatgagccgagatagcaccactgcacttcagcctggtggcagagcaagaccatgtctcagaaaaaaaaaaaaaatgtttacacaagatgttaaagacagcatgggtcattatgtttaaattcaaaactggaaacttgtaagtgaaaatcaatcctgaactatcttgtattcagtgatattctctttataactattttacagacatctgtgtaactggctaggacaatgataatcatatgacaggatcagtcattttagtcttaaaaaaatggcaagtttttaatctatatgtgtacactggttataaaattccactttaggattttgaagtcccaggagttacatagttccctttttgaactaataagttgaacttagtggtccttaacctttttgtaccatggatatatattagaaaaaagaaaagaatttgtttcatgggacttctgtaccataaagcataactgaatgtttgtccaaacttgatatttagtaaggttaaatttttttcccagagattgaatgttaacttttttaaccttgtaatttccctatgaatcacaccagtgaggaggccatagatacagaatccaggctcaatgataatgtttttgccactcccagccccatcatccagcagttggaaaaaagtggtaagtataagaatcaagttacttctcaggaacatttttcccaaactatctttgaacaaaattgatttcatcatcttagacattctaatagttttcttcatctgtttaattcctaacattggattacattaagtaccatttcattcagcatgattttgtccaagagaaagaaaattttctggtatgtttttaatactcttgattatgttcaatatctgtcagcttgttattaacattttaatttgaaacttacatattcaccaatattttgatgtagagccttagtactttttcttttaacctattgattagagttgtacattatcttatataaaccacgcacggaatacatcagctgccaatttaaattttggtttcttttaaatagctcagtaacttaaagaaaattttcatacagtgttttcatatttgtcccagcaaacatgaaaacattggtgttcatgaaaaagcaagataaaaaaatcctagagttttatgatttttttgttttgttttctttgagacagggtctcactctgttgcccagactggagtgtagtggcacgatcttggctcactgcagcctcaacttcccaggctcaagcaatcctctcaagtatccgagactataggcacacaccacgacgtccagctaatttttgtattttttgtatagatggggtttcgccatgttgcccaggctggtcacaactgtagacaactcattgcaacctccgcctcttgggctcaaccagtcctcccacctcagcccccacgtagcagggactacaggcttacaccaccatgcccagctaatgtttgtatttttttggtagaggggtttcaccatgttgccaatgctggcctcaaactcctggactcaagcgatctgcccaccttggcctcccaaagcacttcatcctttttaattgataaatagtattctactgtatatatgagccatattcatttgctgattaggaggtagtgttttcattttttattattataggcagtgccttaaggaaattttcccttgtgcatatgcgtgtttctcatatctaggagtagaattgccaggtcaaagggcatgcacatttttacttattctagaaaatgctgaatagtcagctaagagtagctgttaagatttatcttctcactagtggtattgagttcctgtttctccgtcttttccagtacttgatgatttttagacttcagatattttgccagtcagattgtttttctaacatatttaccttttctctttgttgttttttaaggttgcctcgatgatactatgtgttctagatagcaattgtctatatatgcatgggtctctcttgtctatatatgcatgggtctctcttgttcttatctttaatttttccatccctggttaatgttacactgtttttaactactgtacctttggagtaagtcctgccatcttggaagacaagtgacctgttctccgtcttcctcctcctttgtcagaagtttgataattttcttcataaaggttttacaccatttttaatagatatatttgtaggtatcttgtctttcttgctactgtgaaaagtatcttttttcaaattatatgtgtaatagtttgttgcttttatgtttaatatatattacaacacaactatttgttattgtgtattactcttgcatccttgctgaattttagtagtgctaatgataattacatatgtaaatatgagattttcttcctgtccagttaagcatactatagttatagttttttaatgaccattttatgtgtcttttagatgccgaatataccaactctcctttggtacctacattctgtactcctggtttgaaaattccatctacaaagaacagcatagctttggtaactttccataaaattgaaagccacagtctttctcctaaagactcaaatacactactgcttgcaggctcaaagagtctgtttagaagacatggatgaatccagcttttagggatgtatttacagtgcatttctggagggtagcttggcagcataaatcaattgctctaaaaaatatttttcatacctttaaaccatatctctgaattttttctaaggcaaattgggacaaagatttaaacaagttatagagtaaggaacagcattatttataagcacaaaacatgggaaacagtataaatatcgaatgatatcaaagaactaaaacacagcaaggcatatccataagatcaggtgttacatatactatcatgttttgaaaaacagatgagagcatataaaaagaatgttttcaagaaatattaatcatatggaaaatgatgtgtgtgtatgtacacacacacatatatatacacatattttaaggaaaaagtggatagaaacagcagtgtagttatctctgggtgataaattatgggtgattttgtgcttttttcccctaaattttaccaacaaataaatttaatcagatttcatcaaatcaaaaccttatccctctttagtcagtatggtcacttaaccaatgctatagaaaaccaatactgtattagggtatccaatagaattttctataatgatggaaatgttttatagtctgcactgtccaatatggtagcctctaatcacgttattgagcactgaaaatgtggctagtatatctgaagaactaatatttacttctttaaattttatttaattttaattagcttaaaatttaaagagccccatgtggctgtggctactatattggacagtgcagctatggatgaacacagggctgtgttatcagttgaagtatcaggttatctgcctgttagtacctgccatttacaattcatctactccttatgttcacgtggaaggtaccctactgaggtgacactctatcgtctctctctcttaactctgacctgagagagatgaagcgacttacccaattggctgatttagcatgaataatctgcatactaaacttacctctgatctgctttcttccttttgggagtgcatgtggtaacatttgttcatgctgtgattttcgtctgactacactcactgttgcctgagatggggtgggagtatccatctaaatctttggttcattctatatagttatgacattaagcgtttttttggtttttgttttgttttgttttgtttgtgacggagtctcactctgtcacccaggctggagtgcagtggcgcgatcttggctcactgcaacctccgcctctgggttcaagcaattctcctgcctcagtctcctgagtagctgggattacaggcaggcgccaccacacctggctaattttttgtatttttagtagagatggggtttcaccatgttggcgaagctggtctcaaactcctgacctcatgatcggcccacctcggcctcccaaagtgctgggattacaggcatgagccaccacaccttgctgacattaagctttaactcagcctttattagtaatgagatgatattttgtcctctgtatgccatttgttcttgattttgtttagaacttggtcagagaagatggggcatatgggagcctattagagaccccaatagaagtaacaaatgattaactatttttatttactacattatgttatattaccataatttaatggtctatttttattcaataggtatccacaaattacccattatcaaaaacaaatagttcatcaaatgatttggaagttgaagatcgtacttcgttggttttaaattcagacacatgctttgagaatttaacagatccctcttcacctacgatttcttcttatgagaatctgctcagaacacctacacctccggaagtaactaaaattccagaagatattctccaggttatttttccaggctatttttttttttttttgctgatattcttttcaatatgaaatatttaaagacctgaaactgcatataaactgtcttatttatcattgggctagtgtgctaattttggtgatgagagaatctaaattctgagctgtcaggaccttattttctaattcttgttcaactgtggtttccatgtcgatcatggttccattagaagtgttgctggcaaagtcagaaaagtcatttaccctacaatttcccagagccagggtatcatgaataacataccagtgtttcttgaacttgaaacttcttggacctcagtttaagaaacactgattgatgtatgttagaatatagtcatgtgctgcataacattttggtcaatgatggactgcatatgccacagcagtcataagattatgatactgtatttttactgtacattttctgtgtttagatacacaagtgcttatcactgtgtagcaagtgcctgcactattcaggacagttacatgctgtacaggtttgtagcctaggagcaatagtctataccatatagcctaggtgtgtggtagggtataccatctaggtttgtgtaagtactgtgatgttcacacatgatgaaatcacctaatgcatttctcagaatgtatccctattgttaagtgatgcctgactgtatctgattctttagtatttaacagcagttaccattggcctactaatgacttataacaactgccaattctaaataaccagtctgattctttgacagtccccctccttaataggagttacagtgtttggcaattattacttacacgtgtggaattctttttttttgttttttttttgagacggagtctcgctctgtcgcccaggtcggactgcggactgcagtggcgcaatctcggctcactgcaagctccgcttcccgggttcacgccattctcctgcctcagcctcccgagtagctgggactacaggcgcccgccaccgcgcccggctaattttttgtatttttagtagagacagggtttcaccttgttagccaggatggtctcgatctcctgacctcatgatccacccgcctcggcctcccaaagtgctgggattacaggcgtgagccaccgcgcccggcccacgtgtggaattcttaatagccattctagaagtcttcctgacttatggagacccatgagaaggataaatcacttcggaaaatactcagatgccattagaactgactcatgctaggatatcaataaagtacttgttatccttttttctctgtcttttctgcttttctggaagatataataaattgcatgaagaaggagcatcttctgtctttatgaaaattatatagtttccacttccctatggttgcttcatctctccttatttctttgtaaaaggaaggaagccttatatttactatatcacccctttatgcatgaaaaaattatagctgatacttcatgttctcctttcataatttttataattgatgaccttccttttgagcattcgttttacatctttcctttgtgtattttccctaacatctttgttaaggcttaatttcctctcagggatatattgctacttgttttcactaacctcagtcagaatacattttaagctttaaaaatcagtccttcacatccaagttaaatttctaatatctccatcttttcattgcagttagcatgtcttttttttttttttttttagaccaagtctcgctctgtctcctaggctggagtgcagtgacatgatctcagctcactgcaacctccgcctctggggttcaagtaattcttgggcctcagcctcctgagtagctgggattacaggtgtgtgccaccactcctagctagtttttgtatgtttagtagagacgaggttttacctgttgtccagcctggtctcaaactcctgacctcaagtgatccacctgccttggcctcccaaagtgctggaactgcaggcgtgagccaccatgcccgccccatagcttttattgaacattttgtaacttcttccaaatttaggttatattattcatatggctcgataaaaaggaatttccttttttttttttagcttttatcaaaatacaactcaaacctagctactccaatagcaattaaagcagtgccacccagtaaaaggttccttaaacatggacagaacatccgagatgtcagcaacaaagaaaactggtgagtatgttacctttgtaaagaaagttcatgtgttatttgaggaggacatttaaaaattaacatttgaccatcctgaccaacatggtgaaacctcgtctctactaaaaatacaaaaattagccaggtgtggtggtgcacacctgtagtcccagctactcaggaggctgaggcaggagaatcgcttgaatctgggaggcggaggttgcagtgagccaagatcatgccactgcactccagcctggcaacagagcgagactccatctaaaaaaaaaaaaaaaaaattaacatttgaatattggtaaaaattttgtttttaattgacatttgccagcttaagttaatagcctgtctctatcttttgatatagaacttgtgatccctgaatctcagattcccgaattatccagtttaatgatatcagtgggaatctatcctcaattattttataagtgtaaaatatatagccacagtattgtgtcatttgtcttaatggcttttaattttattaaattgatatttgttatttgtatctgttgcagaaattccagtggatctatccaacacagaaactgaacaaaatgagatgaaagccgagctggaccgattttaacattcacattgccctgcctctgtccccctttaaacgttgacccattttaaagacaaacatgaacattaacatcataatatgctttttatgaagtttcaataaggtttaaccttagtcttgttgacatgtagcccagtcattcactctttaaggattattagtgtttcattgatactaaattacccagcttaatcaacagaatggtttaagtagtaccaggaagtaggacaagtaatttcaaaaatataaaggtgtttgctactcagatgaggccgcccctgaccttctggccagagagacattgctgccagccagctctgccttcccatcatctcctttcaggaccgtcccacaccttttacttgctcagtgctgtctgaagatgcagttgctgtttgcaaacaacaggaacaccagttaaactaattaggaaaagagggagatttccaggcctgggtaactatatactgtgaccattggaggtagagacaggtctcaacagttggaaccaggaactctgctgtcaggttgagagttttgtttctcttccagcttttcactgtgtgggggtcttttctcttatgtcagctctttctatcacatggcagctgacctctcacgctccactctgcagcttggacacccagtagaccctgaatttcactctctctaaaaggttctgagggctcatcctgggccaggggccctcctgtgcactgttagctatggccacgggagcctccagagctgcctggtagcttcaggttgacctgcttatcaggcctacgatccttctgatttaagtacagctggaaagtattatctaattaagttcatgatagtgcttttggagaacttgtcaaattacagccaatgagaaaataaggacctagcatactgtggagaaccattaaaaatttgagaagaaacaacaagtattatgtcaacttacttcaaaggcgtagttttgggaatttgatgcagtaaagattaccctgttttatgattgttccttgaaagtcaaatgggggacctgtccattgtgctctattaatcttgtcagaaaactgtcaccaaaacaaaacttgagtttgtccttgttctaggagttactgggtagttgtaagtattatttttattaaatataatgtaaaataaaatgttaagatacttagttttgtttttcaaagtaaagctgtagtcagccttatgtatgccattgactctgaaatgtataccagcctttcactgtgtaccgtgtgtatataaatccacagaaccggatgagctgcttagggagggaatatattcaaagtgtaccaaggaccaaatcctggagttctcccaactttagaggatggaaaggggcagagtaatctagcaaaggagactgaggccagtgaagtaggaagaaagtatttcaaggagagtgatgattctgtgaatattgctgagaattcaaataaaaagaggactgagaactga

SEQ ID NO: 37 - DNA, 59877 bp, Homo sapiens
gtgcagcctgagaggaaacaaagtgctgcgagcaggagacggcggcggcgcgaaccctgctgggcctccagtcaccctcgtcttgcattttcccgcgtgcgtgtgtgagtgggtgtgtgtgttttcttacaaagggtatttcgcgatcgatcgattgattcgtagttcccccccgcgcgcctttgccctttgtgctgtaatcgagctcccgccatcccaggtgcttctccgttcctctaaacgccagcgtctggacgtgagcgcaggtcgccggtttgtgccttcggtccccgcttcgccccctgccgtcccctccttatcacggtcccgctcgcggcctcgccgccccgctgtctccgccgcccgccatggcgactgcgacccccgtgccgccgcggatgggcagccgcgctggcggccccaccacgccgctgagccccacgcgcctgtcgcggctccaggagaaggaggagctgcgcgagctcaatgaccggctggcggtgtacatcgacaaggtgcgcagcctggagacggagaacagcgcgctgcagctgcaggtgacggagcgcgaggaggtgcgcggccgtgagctcaccggcctcaaggcgctctacgagaccgagctggccgacgcgcgacgcgcgctcgacgacacggcccgcgagcgcgccaagctgcagatcgagctgggcaagtgcaaggcggaacacgaccagctgctcctcaagtgagtgctagctggcggccgcgttagcgccaaggaggggcgggggcgcaaccgcggcgaccagctcaccgggttctgccgtggggagggagcagaggccaggatgcacgcgtccttctgaaggaacagggtctcggtctccggaaaggagaaagaatctagagttcatagcggagcaggggtcgcggagggggctcgagctgtagcgctggggggccgtgatgcccatttctagattttggatacccgctgggacgtggtaagtgcgcgcctgggactgccgagaaggagctcccgctttcgcactcgaatccggggagccggcgcggagaggcggcccctcaggccccaggtgcggggagctggagcgcgagcgcgcgctcgcgtgcgcgccccagtttccggccggcgcgagacaaagcgtctagcggatttgcagtgccgggatgggcggccggggaggactggcagcccgcctctagaatgaatgagcttcgcgcgggcagagagaggaaggggagggaccttcccgcagcatccgcgtctcctgggggtgggtcccgctttggcgcgctcagtcttggccctgtgacgttttgcgaagattctacgcctgctttaggcgggagagagaggcggagcttgatccgtgcgcctccagccagccccgggcaagttaggtttgctagctggttagctttctctggggaaatgtgtcctgtcccagcggggatggtgcggtccctcgggtggttctgcgcagggaaggaaagctgggtttgtgcatgtcacggctaccgttcttagaattgcggttctcctacccctcaggcagcggccctctgtccccagcttttgcctcctcgtagtatagtcaggctttcgggtagagactgtgcttagtaccccttagtcgaccactgtgcagatagtagaccagggcaggtgacagggtgctgtgtaaatgctgagtgtttgagcgaaggagagtttgtaattcacctaagcgagtgcgagttttcattccagtgcacaaggatacatttgcagacctttgctggccttattttgactttctgataagcaaaatggcctgtcatcagtaggcaacaagtgttgatgtcatgctttagagatttgcaaaatttgggtctgaaattcatggtcgccattagcactgccagctgaaatttctggaggtaccttattctcactttgacaccctttgcccctggatgtctttctgtctgtatctgcgtgaatgtccctgtccgaagtctctgagattttgtgtatttttacttatccctcctatcatatgttttcggttcataaaaaagcatgtgcacgtggtaagaataaaatagtatagactggtttgtagcgaaaaacgataactgcactacctctttccggaggcaatcacatttatccctttttgtttttatttctttggatatttagttatacaactcgaaaataatactaagcttgtatttccctttcttggatttactaagccttggtttcatcttttaaaatgagcagtcagttaactcacactattatttctatgttcctccaaattttttgccactgaattccttcaaatcttagatatcgttgcttgtaagacttgccattattatgtgtaccactaagaaaataaaaacatcaggaccaactgtgtaggatccatcctgttggacccatcatgatgggtttcatagatattaaaatgtcaaacagggccgggcgtggtggctcacgcctgtaatcccagcgctttgggaggcgaggtgagcggatcacttgaggtcaggagttcgagaccagcctgaccaatatggtgaaaccccgtctctactaaaaatacaaaaattggccggacgcgggggctcacgcctgtaatcccagcactttgggaggccgaggcgggcggatcacgaggtcaggagatcgaggccatcctggctaacaaggtgaaaccccgtctctactaaaaatacaaaaaattatccagacgtggtggcatgcatctgtagtctcagctacttgggaggctgaggcaggagaatcgcttgaacccaggaggcggatattgcagtgagctgagattgcgccattgcaccccagcctggcgacagagtgagaccccatctcaaaaaagaaaaaaaatccgggcgtggtggcgggcgtctgtaatcccagctactggggaggctgaggcaggagaatcgcttgatatccaggaggcagaggctgcagtgagccagatggtccactgcactccagcctgggtgacagagtgagactccgtctaaaaaaaaaaattaacacagatcaaatatctgttgcgtaccagtcaccgttctatgttagaggatatgaagatttttttaaaaaaatgaattactgttctttgttgctgagagtgtagtgggggagctatatcccagcaagtaaagaaagattgtcttttgtctgatgtgaagcattttgatgctggcgcttttgtaatctttccaggagttagccacaggaggtttttcacacagtaacaaggctgccacctggctgacagtagttgtaaatgtatcgattctaaaatgcatgctggtttcagcggggttaaaaaatgagaataatgtgtattagaatcaatgaaataatgcatgtgatacaatttaggtaatagcagatgctaagggaataaaaataaagcggagtgaagggttagtgtgattaaggaaggcctgtctgaggagttgacagtacctattctctgagggttagtagtgttctgggattatatttttcttaagtctgtgctactgtatgtatattcctattgccaggattagatgactcttcttttccccccaacataccatcatttgctcaaaacatgccacattttagtttgctccttatttgaattaggactttttttatatggatttattcctcaatagcttttcatttttcttgttaagaaaaatttgccctcagtgtgtttgcagactttttgaagatatttaatcataatatctatcacatgaatctgctttcttccctagagttctctttgcttaaggtaggctgtgtactgatgtcctgtaacttattaaagacagcttcctggccaggcacggtggctcacacctgtaaagcactttgagaggcctaggcaggtggatcacctgaagtcaggagttcaagactagcctgtccaacatggcgagaccccgtctctactaaaaatacacaaattagccgcgtgtggtagtggacgcctgcaatcccagttactgtggaggctgaggcaggaggcattgcttgaaccggggaggcggaggttgcagtgagctgagatcacaccaccgcactccatcctgggtgtattttccttttccttggtttcttcatattttgttgaagaacatccttaagtaatttattcagaaaggatggcaggaggtaaactttctgagtcctgtatgtctgaaaatagctttgggctaggtatagaatactaggttaacatttttccagaacttggaaagtattattttgccctattgtcttctggcatctagggttgttaatgtctttcttttttttttgagacggagcttggctcactgcaacctccgcctcccaggttcaagcgatgctcttgacccagcctcccaagtagctgggattacaggtgtgcaccaccacacccggctaattttgtatttttagtagagacggggtttcaccgtgttggccaggctggtctccaactcctgacctcaggtgatccacccacctcggcctcccaaggtgctgggattataggcgtgagccaccatgcctggcctatatttaattttttatttggaactagagtgtttgtaattaagtataatcatcatttaggtagatttagattaagaaaacagctttgagagaattatagattccaggttacttagtttctttttggttcctcagcaaacaagataccttagaggcagagcatggaaatgcttggtctaaagagaatttggcaacagtttccatgcaggtggtgtctgaatccatagaaaacagacctcatatgtaaggtacagttactttgattcagtccaagactgattatattttgctgaaagcttttttgagagaacagtttccaaaaatgatgatgaatgccatcactcaacactttaaacaaaaagtacagagaaattgacttgtttcagattttcactgttaactatacgggaaaactagatataacagaaagttaagtgtttacatcagtcttcaataactgattttgtggattcagacatttattttccttcagtgatacaggtcccgtatcttttctgtaaaaccctgggggccagatgtgctttggaagttaaagcaattccaatttaagacggtaatatgatgcacatactggatatgacacccccagtggggtttatagatagagttagggtagatagagttagcactctatcatgaaacatttctgagggaaagatattgtcatggcaagtggagaaagacagattgaaaatagacctggtttcaggtcaggttttgccactaaatgtgttaataaaaattttaggttttcaaactctggaagtatagataaaagatggtgaatttttgtttttatttatttattttttgacacagagtctcgctcttttgcccaggctggagtgcagtgacacaatctcagctcactgcaacctctgcctcctgggttcaagcaattcttctgcctcagcctcccaagtagctgggattacaggcacccgccaccacgcccaggtaatttttatatttttagtagagaccaggtttcaccatgttggccaggatggtcttgatctcttgacctcgtgatctgcccgcctctgcctcccaaagtgctgggattacaggcgtgagccactgtgcctggtcaaaaacatgctaatcttctttaggagtgttttctttgtacataggatgattaattgaaaaacaaaaacctttggctgggcgtggtggctcacgcctgtaatcctagcactttgggaggctgaggtgggagggtcatgaggtcaggagttcgagaccagcctgaccaacactgtgaaaccccatctccataaaaatacaaaaatcagccgggcgtggtggtgcacgcctgtaatcccagctactttgggaggctgaggcaggagaatctcttgaacccagcaggtggaggttgtagtgagccaagatcgtaccactgcactccagcttgggcgacagagcgagactctgtctcaaaaacaaaaacaaacaaacaaaaaaaccacaaaaaacaaaccttcatcatcctgtgtattactatatctttttttaatgtactgattttgccctatttgaagcagattgacagtatacatcttggccttaatataagagttatcaaacttttatatttttataacttaaaatataagagttataaaactagttttctttataagagttataaaactagttaaactgcttttcatagttcttttataacagagttatgttaaatgttactttaattttcaagggaagacttggaaggaccaaacccctaaaaatgatttaaaagtctaggaagcaggtcccaagtaattaaactgtcatgacatttccttcccatgctttcaaaagatgtttgataaagcaagatcttttggagttgtttatttaacttaggggatgagactaggtaatattttgcatacccagattcaaggaagtaaacaggcagaatgaaagataaagcactattaaaatatggtgggtcttttcttttttgtgtctttacacagttgctggttatatttattctttcgtttgtatagatggtgtcacctctgatatgtctgagttagaaatcttcagactttttttttatgccattagtgtaagtctctttcatgtacaaatgttgagaatgagcctcaggtatcagttgagtaatgggaccctgtataggtcccattatttttaggatcagggaagtttttaaaatcagttttaaaccctttttacagtgtacctctttgataaggagattgtgctttggctgtcatttgatttttttttttttttttttttttttttgagacagagttttgctctcgttgcccaggctggagtacagtggtgcgatctcagctcactgcaacctccgcctcccgggttcaagcaattctcctgcctcagcctcccaagtagctgggattacaggcatgcgccactacacccggctgattttgtattttttttttaatagacttggggtttttccatgttggtcaggctggtctggaattcccaaccttggatgatccgcccgccttggcctcccaaagtgcggggattacaggcgtgagccaccgcacctggccggctgtcatttgaatttttattattttattttattttatttttttgaggcagggtctcgctgtgtcgcccaggctggagtgcagtggtgcgatctcggctcactgcaacctccgcccctccaggtttaagcaattctctgcctcagcctccggagtagctgggattacaggcacgtgccaccacgcccggctaattttttgtatttttagtagagatggggtttcaccatcttgcccaggctggtcttgagctcctgacctcgtgatccacccgcctcggcctcccaaagtgctgggattacaggcgtgagccaccgtgcctggcttgaatttttttttttttttgagacggagttttgctctgtcgcccaggctggagtgcagtggcgccatctcggctcactgcaagctccacctcccgggttcacgccattctcctgcctcactcagcctcctgagtaactggaactacaggcgccctccaccacgccgggctaatttttttttatatttttagtagaggctgggtttcaccgtgttagccgggatgggctcgatctcctgacctcgtgatccgcccgcctcagcctcccaaagtgctgggattacaggcgtaagccactgccctccgcccgaatttttaaaaattaattttattattattatttttgagacggagtcttgctgtgtcaccaggctggagtgcagtggcacaaccttggctcactgcaatctctgcctcccgggttcaagtgattctgccgcctcagcctcccaaatatctgggattacaggcacccgccaccatgcccggctaattttttttttttttaatttctagtagaaacggggtttcaccatgtcggccaggatcatctcgatctcctgacctcgtgatccgcccgccttggcctcccaaagtgctgggattacaggtgtgagccacggtgccctgcctaaaaattaattttttttttttttaataactgagtcttgctctgtcgccaggctggagtgcagtggcacgatctcagctcactacagcctctgcctcccgtgttcaagcaattctcctgcctcagcctcctgattagctgggactacaggcacacgccaccacgtcggctaattttttttttctttttctttttctttttttttttttgtattttagtagagacgaggtttcaccaggttgcccaggcttgtcttgaactcctgagctcaggcaatatctgcctgcctcagcctcccaaagtgctaggattacaggtgtgagccacggtgccaggccaaaaattaaattttttaaacagcaaatgtatattcattatagaaaaggagaaaacacaaacaccaagaagaaaattcttggttgggccttaggttgggcccaacccttaggttgggaccagcggctcatgcctgcaatcccagcacttttggaggccgaggtgggcggatcacctgaggtcagcagttcgagaccagcctggccaacatggcaaaaccctgtatctactaaaaatacaaaaattagccgggcatggtggtgggcacctgtaattctagctacttaggaggctgaggcaggagaactgcttgaacctgggaggcagaggttgcagtgagccgagatcgtgccactgcactccagcctgagtgacaaagcaagactccctttggggggtgggggaaaagatgcaggaaaaaaaaaagctgacatttattttgtgccaattctgtttgccaggcattacagtagatgctttacagacattatcttttttttttttttttttttgatgcagagtctggctctgtcgcccaggctggagtcctggagtgcagtggcacgatctcggttcactgcaggctccatctcttgagttcacgccattctcctgcctcagcctcccaagtagctgggactacaggtgcccgccactacgcccggctaattttttgtattttttagtagagacggggtttcactgttagccaggatggtctcgatctcctgacctcgtgatcctcctgccttggcctcccagagtgctgggattacaggcgtgagccaccgttcccggccagacattatcttttaagctcatgataactgctgatgagtaaggaaacttcaggctcagagagtttaagtattttgcctggtattacttagcaagtaatgaaagctagaaaggatggtagcctgacttctagcattgtgatagggtgttcacatacataaccttatttcatccatacaacagtgttctacaggtattactctggtttaccgacatgtagcaggctcacagagcatcattatctgtggttggtacttgaagtctcagataggatagttgattttcagatccctttgggtgctacttttggaaatgctactagttgcatgtttttcacgttgatagtttgtagccttcaagggaggtaattttggatttgtcagaagggtagtggtcagtagttgaaacagctgtttgaaatactgagggcttcatttgctaaagaaaggtgaagatgaattactgaaagagatcgcttttatcttttttctcttcttaaaaagctactttccaactttattccatgccttaataatttaaaagaaattaaaacctctaaataaatctttaatactcatgacagggtgttctttcattctttattcaagacacatttttgtggaacaggtactatatgccaggtcttgaaccagatgctgggaatagagaaatgggatactcagtccccattatcaagttacttacagtctagtggggaagacagaaaaccaacactacaggattgtgatactgtaagtgcagtatactaataaaatatattaagtgctgtgatgccagtatccaggtgttgctgtggagaaacaaggaccgctacctaaggcaggctaggagccgtgtgaaattttgaaagacatcccaggggaatctgagctaagtgcagggaggtaagtagggatttgcttctaaatggaaaatggagagtgagttgtcctgaatgtcaaataatttatataactggagccatatatatgtgtatgtgtgtgtatatatacatcttatatgtatatgttatatataacatatactttatgtatatgttacttatatatgaagtatatgttatatataacgtgtgtgtgtgggggtatatatatatatatatatatattttttttttttttttttgagatagagtttcactcctgttgttgcccaggctggagtgcaatggtgtggtctcggctcactgcaagctccacctcctgggttcaaatgattcttctgcctcagcgtcccaagtagctgggattacagccgcctgccaccacactcggctaatttttgaatttttagtagagacagggtttcagtatgtttgccaggctggtcatgaactcctgacctcaggtgatccacccacctcggcctcccaaagtgctgggattacaggtgtgagccactgcacctggcctactggagccatatatatatttaatacatggggtggggaaggggattgtatttttagtaatgagtggacccaagattttaaggcagaattgtgacatgatcattctggctatgctgtggagggaaaaaaagaggagaggtacaaacactagtaagaacacttggggagtaacaaggcagcccttgaactgaggcaggtggaagaaaggagagaaggtggatttaagagatactgaacataaaggactagggagaagaaagagtctagggtgactgcttccatgcttgggtgcctgagtagacaatattgctcttaaccgaaattggtggggaatgaacaggtttggaggaccctaagtcagtgaattagtggtgtttgccggactttaggtagcaatgttagttggcaatttgaagtactcaagagacatggaaagcatgcgcatatgaggactgggtagagaaaggagaacccacaatggggatgataagtaatagagaggtgaggctgggcgtggtggctcatgtctgtaatcccagcactttgggaggctgagtgtgtggatcacttgaggccaggagtttgagaccagcctgggcaacatggcgaaaccccgtttctactaaaaatgcaaaaattagccaggcgtggttgcacatgcctttaatctcaactactgtggaggctgaggcaggagaatcacttgaacctgggaggcggaggttgtagtgggcggaggttgcagtgagctgagattgcgcctctgcactccagcctgtgtgacagagggacacttcgtcctaaaaggtgagaaaagagaggtgagtcatggaacaagggttttttgtttgatgaagcctaaaaagtatctgttgtcattggtgtttttggtgccttaggtgattgttgactgagaggagagcctttggttaatagaggaaaccactggccataattaaggggagaatgagaggaaaaagattatgagtttagaatacttgtttaagaatgttggcagtgaagggaaggagacaagtttttttttgttttttttgttttttttttttgagacaaggtcttgttctcttgccggtgctggattgcagtggtgcatggttcactataacctggacctcccaggctcaagtgatcctcccacctcagcctctggagtagctgggactacaggcacacaccaccacgactggctaattttttgtggggagagggttttgccatgtttcccaggctggtcttgaactttgagctcaagcaatccgcctgcctcggcctctcaaagtgttgggattacaggtgtgagccactgtgtctggcgggagggaggcattcttaagggtcaatttaaactagattcttactcagtgtttatgtaacaaaacattggacaggggaccagaacccttatctctctaaggttgtgtcctaaaatgtgatcatttcaccccttttggtataaaacattttagtagcttctagggtaaagactaagaccctactaatagtagggtgaccatataatttggcatccaaattgggatacttttgtgtatgaaagagggagctgttaataattatgcagtgacagctcgcataaatggaacttgtccttggcaatctgggacatatttgcccaggttatcctacctaaaagttctttccctacatgggctggtcccagtctgaccctccagcttcatctcataccacagttgaacttgtttactcctctttagccatgaaatcctttattcagtcccgtttactgtgatcctcttaaaatagggactttgcatttggagtttcctttgaattttttttttgaggacgagacttgctgtgtcttcttggctggagtgcagtggtgtgaccttggctcactgcaacctctgccttccagtttcaagtgattctcctgcctcagcctcctgagtagctgggactacaggcacctaccaacgagcccgactaattttttgtatttttagtagagatggggtttcaccgtgttggccaggttggtctcgatctcctgacctcatgatccacctgcctcggcctcccaaagtgctgggattacaggcgtgagccactgtgcccggcctaattttacatttttaatagagatgaggtttcttcatgttaggctggtcttgaactcccgacctcagatgatccgcccacctcagccttccaaagtgctgagattacagacatgagccactgagcccggccttattttattttatttttgagacagtcttgctctgttgcccagactggagagtagtgagtggtatgatctctgctcagtataacctccacctcccacgttcaagtgattcttgtgcttcagcctctccagtagcggggattacaggcgtgcaccaccaagccctgtgaatttttgtatttttagtagagaaggggttttgccatgttggccaggctggtctcgaactcctgacctcaggtgatctgcctgcctcggcctcccaaagtgctgggattacagatgtaagccaccacatctggtctgctgtgttatttttaatttgtgcagaatgcaggagttgtcagaagcaacatatgttatagcagaaatacttacatagtccccagcagaactcagtaatatactgtgattagttttttttgcctatcacaccttttgatcacctataaaaatagtactttttcccacttacttttttgtataattatatagagtctatgccagttgttagaacatcaaatcatttaggatcatttttaaattaattttacctcattaaataaagaattacctttgggtaccttgtgtttttctacagtctagttgtattgtataagcattgatagtttgggtatagaattctaggttgtaaatgctattttcttagacttttgaaggcatgttttggccgaggtgggtggatcacctgaggtcaggagttcgcaaccagcctggccaacatttgtactctactaaaagtacaaaaaattagccggtgtggtggtgggtgcctgtaatcccagctactcaggaggccgaggcaagggaattgcttgaacccgggaggtggaggttgcaatgagcccaggtcgcgccattgcactccagcctgagcgacaagagcgaaactctgtctcaataaataaataaataaacaaataaacaaataaataaataaaatgaagacgtgttctttagttttctagctttcattggctgcagaagtaatgatgagtgaaaaatttaaaagcttgtaggatcttcttttgatccagttctaaaatttcacagggatgttccttgttgtagatctcttttcatccattgtgttgatcatctgattgaattcttttggtcttgaaatttatgtccttcagttgttggaaattttcttgagattttctcctcttttattaccatatgagactcctagtattcaaatgttggatctcttacattgatcctttggttttcttcccttttttaaaaaatattttttctctactaagagatgttctcaattttgttttccaatttttgctattgtattttaaatttctaatagcttctttttattctgtctcttttttttaaagatagggtcttacccttgcccaggctggagtgcagtggcatgatcttggctcactacagcctcaacctcctaggctcaagtgatcctctcaccttagcctctggagtagttgggactactactggagtagttgggtgtgtgccactacacctagctaatttcttgatttttttcatagagacagggtcttactatgttgctggtctcaaactcctgagctcaagtggtccttctgcctcagcctcccaaagtgttgggattacaggtgtgaaccatcatgcctagccttttttattcccttgatgtctctttttttgtttttgagacagggtcttgctctgttgcccaggctggagtgcagtggtgcgatcttggctcactgcaacctctgcctccgtgttcaagtgattctcatgccccagcctcccaagcagctgggattacaggtgcccaccatgacaccgggctgattttcgtatttttagtagagacggggtttcaccatgttggtcaggctggtctcgaactcctgacctcaagtgatccacctatcgctgccttccaaagtgctgggtttacaggtgtgagccactgtacccagcctattctcttcttgatagctctatagcattgtttttgtctaaatttgatggatttggttcctttttttttttttttttggagacagagtcttactctgtcacccagactggagtacagcggcatgatcccagctcactgcaacctccgcctcctgtgtttaagtgattctcctgcctcagcctcccgagtaactgggattacagacacgtgccattacgcctggctaacttttgtatttttagtagagatgggattttgccatgttgaccaggctcgtcttaaactcctgacctcaggtgattcgcctgcctcccaaagtgctgggattataggcgtgagccactgtgcctggtgtgtttggtactttctcttatctttgcagaagtcttcattgtccttcatagtccctctttgctaagttaatttctttttctgtttaggtctttgtgtcatcactcagtgcagggaacagaaagcactagggattttttttttttttttttttttttttgagatagagtttcactcttgttgcccaggctggagtgcagtggcgcgatcgcggctcaccgcaacctccgcctcccaggttcaagcgtttctcctgcctcagcctccctagtagctgggattacaggcatgtgccaccacgcctggctaattttgtatttttagtagagacggggtttctccatgctggtcaggctggtctcaaactcccgacctcaggtgatccacccgcctcggcctcccaaagtgctgagattacaggcatgagccaccgcgcccggcagcactagggattttaagcagaaagggaaacaatatgagatgtaggtgcttagaaatgatttttagagaggctagaggagcaataatgatgcttagaacattgttgtagaactgaccttctttgggagcttttatgtgtgaggccaccaatggaaccagtaaactgttttaaaaacagtatatagctactattcaggactaggaagctgccactgctattgctttaggaatagctgcctcataacacccagcaaactggagaatggacattggaacactgtttcagaaatattttacacccaggtcagtgcctagcacattgtagatgagtgacaaaggtagtagttattggtttttctttttctttttaaatgaatcagtcatttaaattaagacttaatctgtacgagtctgctccatactcctgtgcctgtttatgttacagtgatttttttttttgtttcaaagaagtggttttgtggtccagtttcaatctcatttagtatttttcctaattttacccgagtttcaactagagtttgcctgagtctgattaggttgttgctaattctttgacagattagtttattcagtgagtagcagaattttattggcaccggaaactatcctttgtaactttgagtttatgcaaaagcatcttcttagtctttttgcatatgccagaggagacccttgttaatagaaattgtgatcacaaggccgggcatggtggctcacgcctgtaatcccagcactttgggaggccgaggcaggtggatctcctgaggtcaggggttcgagaccagcctggccaacatggtgaaaccccatctctactaaaaataccaaaaattagccgaatgtagtgtcgggcgcctgtaatcctagctactcaggaggctgagacaggagaatcacttaaacccggaaggcggaggttgcagttagctgagattgcgccattgcactctggcctgggcaacaagagtgaaactccatctccaaaaagaaagaaagaaagaaagaaagaaattgtgatcataagaccttctagagtttttgtgtaatttttttttttgagatggaatctcgctttgttgcccaggctggagtgcaatggagtgatcttgactcactgctacctccatctcctgggttcaagcgattctcctgcctcagcctcttgagtagctgggattacaggcatgagccaccacgcccagccaacttttgtatttttgtatttcaccatgttgaccagtctggtctctaactcctgacctcaggtgatctgcctgcctcggccccctatagtactgggattacaggagtgaaccaccgtgcctggccgagtttttgtgtattaagttatatttgttttaatttcggggaagttcattaattttcctttggaaaaatactgtggatcacatcctttttccctttggaagggaagttaacatgaggacagtgttgaagctgatgagtggctgttggagcaaatgcatgcttgataagcagtttgagcctgttacgaaataaaattatctagttttaggacaaggtttttatgtgggtatattttactttaaattgaaaataaggtttattttttctctaaaggtctggagcatggctagatataagagacatggcatgttgatgctgagctctgggtgtgaagagatccccagacacggatttgtgtgatagtcacttgagtactgcactagtgttgagtggtgttcaggggctaccagacagctgttcagaagaaccttacagtatatgaaagcaggaacagagcttagccagctaggcctaattggcctggctctgtatgtacagtgggtctgttttaagggatttaaaaatccttgttttgtggctttgattagaaataagaattttgtatagaatgatttctgttagctgattacaggtgaaaaactaaatggcttttctctttcatctcctgtaatatatttgtttttctaaataagaatgggcctgaggtgaaatgttagggataggtactgacacaaactgaccaagagaatgttaacaggtgggcaataatttgccgttaccaaattaattaaaactattttgtaatgagcttcagattatgttgtatttgtccctgcaagtttacttattgatttgtttcacactaattctttgttccctgtttaagtggacaatcttattttttcaagtgtttatggttggaatatgctaactaattccttttcctttttttttttttttaaataaggatcttgctctgttgcccagagcgacagtggctggagtgccgtggcatgaccacagctcactgcagccttaacctccctggcccaagcaatcctcccatctcagtctctctagtagctgggactacaggcacaggccactactcccagctaatttttgtattctttgtagaaatggggtttcaccatgttgcccagggtggtctcgaactcctgggctcaagcattctgcccattttggcctcccaaagtgctaggattacaggcatgaaccaccgggcctggcctcctaattcattttcaagtagttattgttattgcaggcctggaatgactttctgcatgttatgtatgtggtatgacttttggaagaatgtaccctaaagttatcacctagtaatgatatatttctctaagagttccattgagggttcattttccagcgattctgtgattggatgtggtttttttgtttgttcatttgtttgttttagatggagccttgctctgtcgcccaggctggagtgcaatggtgcaatcttggctcacagcaacctctgcccccccgggttcaagcgattctcctgcctcagcctcccgagtagctgggattacaggcatgcacaaccacacctggctaatttttttgtatttgttagttagacggggcttcaccatgttggatcaggctggtctcaaactcttgacctcatgatccgccttccttggcctcccaaagtgctgggattacaggcgtgagccactgcgcctggcccaggatgcttttttttttttttttgagacggagtttcactcttgttgcccaggtgggagtgcaatggtgcgatcttggctcactgcaacctccgcctcccaggttcaagcaattctcctgcctcagcctcccaagtagctgagattacaggcatgcaccactacgcccggccaattttgtatttttagtagagacagggtttctctgtgttgaggctggtctcgagctcttgacctcaggtgatccgccagccttagcctcccaaagtgctgggattataggtgtgagctaccgtgcccggccctggatgcattttttaatctcctttttttgccttgccctgtcttcttatggtgctgactgatctctactttctgactggtaggactagtctggagtagggtacacctagacaaatgaaggacacccagggagtgagagagagtcatcctcacagaaggactagtgcagaggccaagcaaagttcagacactaagttccagaaccaagtagttcaatgcagaagccagggttggaaatgaccttaaaacaagtcaaggtcaaactggcggcatgttgaacaaccagcatgattaaagcagcagagtatatggtattgctggtggtagaaggtgcttaggagcattttagaaagtgttaaccaactggatttagattagttctataggcctcaggagaggataggcatgtgtcccagatacatggtactaggttttattgggaaagtacaaccatagtaaagctgtgtatgttagtcttaagtcactgctgtagaatgttagcaggaatataaatatatcctttctagctaattttctttttctttttcttttttctttcttttttttttttttttttttgagatagagcttcgctctttgacccagttggagtgcagtggcacgatctcagctcactgcaacctccacacccccagattcaagcgattctcctgcctcagcctcccgagtagctgggattataggcatggaccaccatgtccggctaatttttgtatttttagcagagatggggtttcgccatgttggccaggctggtcttgaactcctggcctcatatgatccacccgctgcagcctcccaaagtgctgggattacaagagtgagccactgcacccagcctggctaattttctttttaatggccagatacttgattacacctggttacttgttagaccaataaaattcaagcttacttgaaatgaaagctaatttggtttattaagggaggaaattcttaattagcatagaatgccagttacatttataaaactttatttttttctggttgcagttagagtttggttcttctgtaaaacatctaaagcaaatgggtatgttttgtgacttattttcaggagcgtgtatatttctagtattagattcacatgttgaatttaacataggaagatctccttatctggaatataaatagtttaatcaggcaggtggataacacaacaaatccagtcaggaaatggactcaaagtaaatgtatactaatatcttaagtgttagatagcttctagtaatttaggattcctatctaaattgctctgtgtttggaggcattgtcagatgtcattctgtgcttaggtgatagctgcagcaagtccatgtatgtatgttttaggatatcagttctacaggtttctgcactttgactatgtgctgataattacacttggactttctacattatattgatgaatgaaaaataatatggttagaaaattatgacaagaatatgttcagaatattaactcactgcatggctccccatgtatccttgacaactcatgtgacatagaagactcattgatttggctgagtgcagtggctcatgctggtaatcgcagcacttcgggaggctgaggcggacaggtcacttgagcccaggagtttgaaaccagccggggcaacataggaaaaccctgtcttcccatctgccccagcaaaatacagaaattagccgggcgtagtggcacatgtgtatactcccagcttcttgggggactgagatgggaggattgtttgaacccaggaggtgtaagttacagtcagccatgatcgtggaggattgcttgaacccaggaggtagaggttgcagtgagccgtgattgtgccactgcactccagtctgggcaacagagcgagaccgtctcaaaacaaacaaacaaacaaacaaacaaacaaacaagctgggcgcggtggctcaccgagcctgtaatcccagcactttgggaggccaaggcggttggatcacgaggtcagtagttgaccatcctggccaacacggtgaaaccccgtctctactaaaaatacaaaaaaattagctgggcatggtggcgggtgcctgtagtcccagttactcgggaggctgaggcaggtgaatggcgtgaacccaggaggcggagcttgcagtgagccgagatcgcgctactgcactccagcctgggccacagagcgagactctgtctcaaaacaaacaaacaaacaaaaaaactccaactcattgatttattgctattgtctgatggagacatgggtgtaaccttaagaattttttttcatgattcattcagcctgggaaattggtaggaagaaagagaggatacccatgcatgtgagttttagagattatagaagcatcagttattatttttttcttcttggaagagacatgatattttacataggatgaaaaaagagaagttgtgtgtgtctgtgtgtgtgattttttttccttcctggaaaacacatgatacattttacataggatgaaaaaagagaagtgtgtgtgtgtgtgtgtgtgtgcgtgtgcttgtaacatttagcaaaatagtcattatctgagttttctgtgcagaagatgtaggaataataagtcatgggccttgccctcaaagggtttacagtctcttgaggtagctaagcatatccacaaatacagggatttgtatgatcaatgcactgtaagtgctgtatatgcaagaggaagagatagtagtcagttcttctctctttattagccacttcatgatgcattgactttttttttttttttttgagacggagtctcgctgtcgcccaggctggagtgcagtggcgcaatctcggctcactgcaggctccgccccctggggttcacgccattctcctgcctcagcctcccgagtagctgggactacaggcgcccgccacctcgcccggctaattttttgtatttttagtagagacggggtttcaccgtgttagccaggatggtctcgatctcctgacctcgtgatccgcctgcctcccaaactgctgggattacaggcgtgagccaccgcgcccggccgcgatgcattgactttttcactgttaatattgtggcctaaggaggaagaggaaaaatatatgaacacagaacaatttgtttgtggagttaaagggctcacaaggtaaggacagctgtaagaactgtctgccctgagctcccagtgcaggtagccccacaagtcccttttcatcattttacttcagcatctgcaagataagtctttatgctacctagacagctacacacctaagtgtggtgacatggcctagtgcctgaccctgagcagtaaaggtactgagggtccagaagaaggaagggaatactaaaaacgcacttagttgggaccctgtcttatttatttatctttctcttcctggtagtacatagtagatactcagtaatgtctgctggattaggtaaatatgtctcaaaactagggacctggactgagcctttccgcaccgtctcgaaactctcctgtgtacctgtgcataagagtgcatataaatgccactgtacatttgtgtgggttagaaaaagcaaaagtgtgttcataacctcttatgagaagagactataaattactttgcaccaagggcggtagctgactcttgagttctcttcagtgcctggtacaatgcctgctgcccacctgcttgtgaaggctgtggtggcttgtacaggcactgcagggcagatctagattgactatttgggtctcagaataacctgggtcctctgtaacagaggctgagtacttatcttttcatgagttgttatattaaagtaaaattgtaagcactgctttcctgtggcttgcttctttcattttttaacagaaattttattgagtatccccaccctataccagacattgccaggcactgaggatctgaaggtaatctcattttacccacattccagtgtaggagacagacatggaatcttaaattttaaaaagatgtatataccatgcaccatatgagaatgatgcaccaagtgctgtggagcccagaaaggtacatgatttttttctgctaggagaggtaaagcagggaagcattacagaggaaggatgacatttgttccatccttggtcttagtttccaatggcagttggttaggaattagatggagttaggaatgggaatagatggcatggagtgggggagagtgaagtccgaggctcagaaggtctttaggacttagacctgaagggctttctagggggactgccatgccaaggagcttgcatatttcttggtggtcagaagttttcaaactgttttgcagaaaactaggactgttgggatggggcttgatgggacactggaccctacactgtatcttctttttttttttttttttttttttttgagacggagtttcactcttgttgcccaggctggagtgcaatggcacaatcttggctcaccgcaacctctgcctcccgggttcaagcgattctcccgcctcagcctcctgagtagctgggattacaagcatgtgccatcacgcctggctaattttgtatttttagtagagactgggtttctccatgttggtcaggctggtcttgacctcccaacctcaggtgatccgcttgcctcggcctcccaaagtgctgggattacaagtgtgagccattgcagccagactatatatatatatatatatatatatatataattttttttttttttttttggtggtagggtctcactctctcaccaaggctggagtgcagtggcacgatcagggctcactgcagcctcgacctcctgggatcaagtgattctcccgcctcagcccctctagtagctgggactacaggcatgtgccaccacgcctggctaattttttttatttttagtagagatggggtctcaccgtgttgcccaggctagtctcccttccaaagtgctgggattatagacgtgagccaccgcacttggccaagaagtaatttataacagaacaatttatattttcatagaacagtgttttatgtgactaagaacttgacataaaatgaacagtagaagcattagtcatgattgaaattaaagctcctataaaatttccactggtatcattgggtggccctcagggtaccacaagtaaatactctcttcatcccctgtcctccttatcttctttggtttttatttttatggaagaaatcaccatattctagtcatctggatgtactgccttgggttaatttttggcttcttgtgttttctacactccacaagatgttgaacacagtatctttcacttggtagtatgacatcttgagttttgagctatttgcatgtattacttattaaatctgtgaagtcaaataaacaagaacaatactgcataaaatatgccgattttacaggttgttccatacaataacttgtaaagttgacatgctgttttatgcagtatcattcttgctggaccattttggtccctggaaggcacaggtcattctcctgccatgaggcaggatcacattgagaagtaccacattatgacctgagctttaaaaattactgtttgtaattgttaagtaattaattttgagtcagtagcttttgtaagtattgtgtaatactgcatttaaaatatggttttattttcagtcatatgtcttatgacatgtatcctagcccttctggtagttttatagtggggcaaaatagagactccttcacaagtgtcagttcattcctgtggagacccagcacttgtgtgaactaggcattttggttgtaaattattacagtatgggattttttttaacagttaattttttcctcttctggactagtcttcagttaaagcctgccatcgtgtggtgttttaaagcatgagatttaagcatgtggcatgactgctgagcttttatgatgagtaaaaagtgaatactattaaatcttttcatatgtgatcaacatttggccagtttatttcttcactttattttaatattacaatattattttgaaatttttattaattaaagattcctcctttagccagtcctcaaacatcagtaagtaaaagtactcttttacttttttagtttatttttaagatcctgtttctccaagaaaaatacaatagcagttttaagaacaggtattaataattttgatgttattattattttttgagacggagtctcactctgtcacccaggctggagtgcagtggtatgatctcggctcactgcaacctctacctcccgggttcaggcaattctcctgcctcagcctcccaggtagctgggattacaggcacaccccaccatgccctgctaatttttgtattttttatagagacagggcttcattttggccaggcttgcctcaaactcctgacctcaggtgatccacttgcctcggcctcccaaaatgctgggattacaggcatggcccaccatgcccggcaataattttggtattattaaggcttctctgtgtaactactgttaataattatttggatgagagaaatactgacctttaaaatataattattgggcaaaatatatccaaatgaactataattttataatgtagaactccatttaaaaaaaagtggttatttagaggccgggtgcagcagctcatgcctgtaatcccagcatcttgggaagctgaggctggcagatcacttgaggccaggtgttcgagaccagcctggccaaaataggcaaaccctatctctactacaaatacaaaaaattatctcggcctagtaccgcatgcctgtaatcccagctacttgggaggctgaggcatgagaaccacttgaaaccaggaggcagaggttgcaatgagccgagatcgccccactgcgctccagcctaggtgatggtgagatgccatctcaaaaaaaaaaaaaagtgatatttagagaaaaagaaacttcagtttgaacctcagcttgttttttgtttttgttgtttttgagacggagtttcactcttgttgcccaggctggagtgcaatggcacaatctcggctcactgcaacctctgcctcctgggttcaagtgattctccttcctcagccccctgagtagctgggattacaggcatgcgcctccatgcctggataatttttttgtatttttagtagagacggggtttctccatgttggtcaggcaggtcttgaactcccaacatcaggtgatccgcccacctcagcctcccagagtgctgggattacaggcatgagccaccacgcccggcctgtttgtttgtttttttgatacaaggtctctctctgtcacccaggctggagtgcagtggtgcggtctcggctcactgcaacctccacctcctgagttcaagtgattctcctgcctgagcctctcgagtaggtgggactacaggcattgcgccaccatgcccagcttaagtttttgtattttttggtaaagacgaggttttaccatgttggcaaggctggtctcgaactcctgacctcaagtgatccgccagccttggccttccaaagtgctgggattacaggcatgagccaccgtgcccggccctgaacctcagttttttggtagttggttttataaactgaaataatttttatgcaaaatattagggaggccgttatttattgttacctctatgtaacaaaatgggaggtacttgcaagcttggggtcaattagttcttactaatatcaggggagtttcagtatcatgcattgggttataacattactttttaaaataaccttttcttctcatttagtgtaatttgattttctttttttttttgagactgggtcttggtctactgcccagctgcagtacagttgtgcagtcatggctcactgcagcctcaacctcctgggctcaagcgatgtccccgcctaagcctcccaagtagctgggactacaaatgtgtgccactgtgccaggctcttttttttttttttttttttgtagatttggggtcttgctatgttgcctaggttggtcttgaattcctggtctcaagtgatcctcccacatcagcctctcaaagtgatgtgattacagacgtaagccactgcgctcagcatgatatcctgacttacagttcctgtatgttttggcttataatatgcattatatttaaaaaatgaattttcatttcttcaaaaatatcctgtgttagtgtgcctctttatagaacaagggggacatgcagtctcactcaaggacaagcaggattctggtacattggtctttaatatggacgtctttgacccatagttattagtaatcatgtgacattgaaagagaatgttagccaacaaaaactctagatccagtgcttgtgaattgcttctctaattttgataggtgatgggagcctttatttaaactacttcttttgtttgtcccttcagcagagagggagaagacctcaagtcatcagtatggtttgatgtcttatgctttttaaatctgttccagctatgctaagaaggaatctgatcttaatggcgcccagatcaagcttcgagaatatgaagcagcactgaattcgaaagatgcagctcttgctactgcacttggtgacaaaaaaagtttagagggagatttggaggatctgaaggatcagattgcccaggtaaggtcaagcctactcttgagccgtatgtgacaggttaattgcctcatctgccttaagccatagtttgattgattgattgattttcaaatgtattttatttttgaaattttatatatttgttttctgatggtttacttgaagaaaagtcttgaggtagctaacatgcaaaacattatcacctcccaggcattatatctggattggccagatcttgtggttcccttcttcttccctattgtgcacacactcattctgtctctgctctcaaagcctattttgttagttaggaaataagtaagaaaagagatgccaaaatgctgctctccacacaggaaaaaatgaaagtggttagctaaaataactagtttgatttttgaaatgtgagtgagtcatacgtctctgttctattccctgttgccaattaacaatttgactggtcgtttggtatgatactctgtgggtgggaccagcaaatgaatacccagttctgtgataaatgttaagatgaagtaattatacattgataaatatataggaattttaacacttgatttgatttgattcatagatatcttatgttcattattaaatgattgccatgtaatttttatcacaattctttttccttgtaatagttggaagcctccttagctgcagccaaaaaacagttagcagatgaaactttacttaaagtagatttggagaatcgttgtcagagccttactgaggacttggagtttcgcaaaagcatgtatgaagaggtaactatatataattttgctttgtaaaggaatggaggggttctagaatgactttgtcatagctaaacatgtaattatattttatttatgatttctttgccacaaaaatatatcagataaagaaataataaggtttggggatggggagaaattttgcaggtagattattcaagctactgctgctaaaagaccgcatttgagaactcaagctgttaccgtaaacagatatgatttcacttcatcttacttatttttgtttttttgtttttgtttttttgagacggagtcttgctctgccgccaggctggagtacagtggcacgatctcggctcctttcaacctctgcctcctgggttcaagcagttctcctgcctcagcctcccgagtagctggaactacaggcgtgcgccaccacgcccagctaatttttgtattcttagtagagacgggatttcaccatattggccagggtggtctcgatctcctgacctcgtgatccgcccaccttggcctcccaaagtgctgggattacaggtgtgagccaccacatccggcctcacttcatcttaacttataaaggcttggtcacagcagctaattactgtcaacatgtttaagcattagttatctattcctgcctaacaaattacttccaaagttcatcaacctaaaaccacagacttgtattaatttcttagttcctgaaggtcagaattcagagctgctaaactgggtggttctgtttcttggtcccatgaggttgcagtacagcttttaacctgggctggaggaatggcatctgagctctttcacagggctgtgggcaggacgtgtcagttcctcacctcatggtcttcttcatagggctgctcatgatatggcccccctaagggtcagtgatgagaaagagagagagagagagaaagaaacacaacgagaacatgaatacatgctaccagctaccaaggcagaagccagattgtcttctataacctaatcacagaggttacataccatcactttggccttctcctatggctcacatctggaaatgcggctactcacagcatttataggcgtgtaaatttttttttttttgagacacgagacccgctctgtcgcccaggctggaatgcagtggcatgatcttggctcactgcaacctctgcctcctgggttcaagctattctcctgccttagcccccctagtagctgggactacaggcgcatgcacccacgccctgctaattttttgtatttttaatagagacgaggttccaccgtgttagccaggatggtctcaatctcctgaccttgtgattggcccgcctcagcctcccaaagtgctgggattacaggcgtgagccaccgtgcccggctcactcatgtggaaatcttaaaatatcacttataagccttaactgctgtggtcaaggggcaggggcaaaaccgttgtcaaacaaaggaagtaataaaattgaggaaaggggaatgtatatttcatgaaaattgtagagggttgaaatcaactcatgggggagaacatgctgttaatgtgctaggcttaatgtttttagaagtagtgtaattttgaaaacagtgcaaataggaattcattgtagcagttagcaaaccagttttttagttggaggaaaaataatagaaatctgattattttttaaaattacaggctttaaacaaaatagatattagtgcaaggtgcaccagacaagcagtcagaccttggacaactcttagtgtcagtttcttatttaaaatgaaatactaatactgctatttttttcttcaatgagtggtaaggatcaaagtggaatactgtgtgtgaaaactctttggatactgtagcaagtgctgtcatataattgttactaagtgttgctttgttaaagcagatattttgatatgaggttgacttacatttttgttttgttttgtaaaaattgtgatttatcattacttatttctgatgttgtgtgtagacaaccaggagtagggttttttttctttgtaaggtcactggttctatataaaaaatagcatcagtaaaaagtaatttaatatttttagagtgcatagcatctttgaatttttggcctttgcctttttgagaatggatgttaagatagtcctcttcagttttgtttttgtttttgttttttttaactctttttggagacagagtcctgctctctcgcccaggctggagtgcagtagtacgatcttggctcactgcaacctccacctcctgggttcaagcgattcttctgcttcagcctctggagtaactgggtctacaggcatgtgccaccatgcccggctaagttttgtatttttagtagagacagggtttcaccacattggccaggctggtctcgaactcctgaactcaagtgctccatctgcctcggcctcccaaagtgctgggattatagttgtgagccaccgcacctggccttttttactttaaaaaaaatttttttgtgtgagacagagtctcactctgttgcccaggctggtgtgcagtggtacggtcttggctcactgcaacctgtgcctcctggattcaaatgattcttgtgcctcagcctcacgagtagctgggattacaggttcacaccctcacaactggctaactttttttttttttccttactttttactaagtaataccatgttggccaggctggtctaaaactcctggcctcaggtgagccactcgcctcagcctcccaaagtgctgggattacaggtgtgagccactacgctggccttaactttttttttttacattcatgatatatattcagtaataatatctaacttccttattatgaacagttgggggaaaaaaggaaggagaaagacgaaagaggaaggaggaggtagacaaagaacaaaccattagcagtcactcttcagtatttttgtgatttaggtattatttgcttcatgaaatagatgtgatctctgggaaggtgatagcagaatcctcctgatttttctgatttttcagattttgtcaagtgcatgctcctgtgtagtagttaagagaaagatgaagaaatgcaaaggaaaatacatgcgctaatatacacaaacagcaactttggtgggttatacttccctcttgtggcttcttcagatattaccattctaattattatttttttttttttgagacggagtccagctcagctgcccaggctggaatgcagtggtgcgatcttggctcactgcaaccaccgtctcccaggttcaagtgattctcccatctcagcctcctgagtagctgggattacaggcaccctccatcatggctgactaatttttgtattttagtagagacagggttttaccatattggccaggctggtcttgaactcctcacctcaggtgatctgattgccttggcctcccaaagtgctaggattacaggcgtgagccaccgcgcccagccttccattctaattttatttagacacttccttaaaacagagtaaaggaaaggatcatgacaactacttctattcttcaatggtaaatttttcataaatatttgagttagtcaactaatattgttaataagatcctgtgtcacttgataatgatagcttaataccggcttttaaagaagtcatgtaaattagcttgtgctgcctattattatgtctaagaaaatggttttatggctgggcaaggtggttcacacctgtaatcccagcaacttgagtggctgaggcagatggatcacctgaggtcaggagtttgagaccagtctggccaacatggggaaatctcatctctactaaaaatacaaaaattagctgggcatggtggtatgtgcctgtaatcccagttactagggaggctgatgcaggagaattgcttgaacccgggaggcggaggttgtagtgagctgagatcataccattgcacaacagcctgggcgacagagtgatactctatctcagaaaagaaaagaaaagaaaagaaaatagtttcatttcacataaatctttacatgaatttatcacaactgttaagtttaactttccatgtgctgttttttcagagatgttcttaagattatcaatgaaacaattcagaaaaataatttttgcttagtgtttagtatagtatactgtgtataaatccttgattgcagatagttttagtaggccatccaggcctttccttggcttcagaaaaataaatagctatgctcctgaaaaggaatagaaagttcctaaggcttgagatgctaccacttctgtcattagttccatttcaaaaacctcaactgaaaactaagaggcaaaaaagtgtttattcacatgaccgcctgaggacaaacaggaggaagttcgtgtgtaaaacttcagatggctgtgatgtcactcagatgtgtaccaatgcagccatggtaagtagcttggctttatgctttttgttttttccccaggagattaacgagaccagaaggaagcatgaaacgcgcttggtagaggtggattctgggcgtcaaattgagtatgagtacaagctggcgcaagcccttcatgagatgagagagcaacatgatgcccaagtgaggctgtataaggaggagctggagcagacttaccatgccaaagtgagctctcttcagaagattcttttgaacacttaaaatcattacttcacaattcccatgatgaacatggctttatgtttattttgttctagtttttaaaaatgattcccctagtctccatgaaatatatagaaaattgattttttcaaaaaagtgcagttttctataaactaaatgttattaaaaattactagaagaatgtagggttgttgcaattttattagaggttaggttttgtctttttgtcccattgatcattcgtactatgccatagtagttgaacccaaaccatgtgaaataactttcttccaataacaagtactgatcatgctgtcctacataaacatccatttagtaatgaatgaatgtcagactgcattagatctcactttcatgtcatcattgtgcatagattgtgactaccacacttccggcttttttgcataagggccaaatggaaagtctctgctatttcttcttctgtcactattattcacttaaaaaaatattgtagaaacttcccacttatattagctgaccttacaagaattcataaaaatcaccaactagtacaggctttccctggtaaatgattttgccttgtgttttaaatgttacatgatttgattaaaaagacttttttgtggttgacttagaatattagagtcacagagttattgaaaattttcattgcatggctttaaactgttcatgttgctttttatctattgtatgaagtagcagttagtgaaagtgaaagatcttattataagcagtaacttcagttgtataacatttatctaatatcacacattgagctatacagtgaaggagctaaagtaaggatccgtcacagactgtggcctcacagggagccagggaggagacacaggagcatgtccctgagacacacatacacaatagtgttatgggatttgtattttactcaaggagttttttttgcttctgaaaggaagtgtttctatctggtttgaacgaatctataaactagtattttctgcttgttggtttacattctgtattggatttggtgggttagggatatgtgatgtttcttttcttacagacaccaccacagtcaagttgctattgcccagtcttcttattatcagtgttatcttagacattaaaggtttaatagatgaaatattgaagtaataagctttgggtaaaggcctaggtatattagcattcttaaagctcattatttaggaagtgactctaaaagtcacacagaattaccatcattcacaccatatcagcaaacttcatgatgcttttcctgtgtttcatctaccagttaccagcaggacttaggtttgaaatgccttgaggtgaatcatgcttccttttttgtttcagttctagataagactgactatgctttgcttcttcttttagcttgagaatgccagactgtcatcagagatgaatacttctactgtcaacagtgccagggaagaactgatggaaagccgcatgagaattgagagcctttcatcccagctttctaatctacagaaagaggtaaataatcatctttctgtaagaagttagacttgaaggctaccttcaccacgggcacctacctgctttgcttgggctgatgtcactcctccctctgtttgttacagaggatggtgtcatcctgtgctttcgtcttcacagtacttttctagattcgttcattttgcattgcataaacatcctgtgagcagatactattgttcctaattagtagattacacagagctaagggacttgcccttgaggaaggagcctgctagtttattcactgtacttaccctaggacccggatcttccgacctgtctaacagcttcatctctacagagttattctcaacaccttccttttttatatcatttgaaaaccaaaatgaagaaaaacatgcaaaaattctttgtgggtggtgaatgctttgtgtttctagacaaattctttagtgcttaaagtatataacaattaggatccaggaaagtagctttaatttgcatattccgataagaatttagtgactcattcattcgttggtacgcctaagtgacaaatggcattattgccggctgtgttgactggctgcctatcagggtgtgatggtgtgcttcaggtgctgcttaagcaggcatggacactacttcagatcagttttagcctagggtgatgtcagtgtggacacaaagtacatatactccatatactgcattcagaatgattcagcaattaactcgtcaccttaattattttggaaataacttccgcttctattttcctcaagggaggaaatcttgttttgaattttccacatgagaataaactttattttacttttttttttttttttttttttttctttttgagatggagtctcactctgtcgcccaggctggagtgcagtggtacgatctcggctcactgtgagctccgcctcccgggttcacgccattctcctgcctcagcctcccaagtagctgggactacaagtgcgtgccaccacgcccggctaatttttgtatttttagtagagacggggtttcaccgtgttagccaggatggtctcgatctcctgacctcatgatccacccgcctcggcttcccagagtgctgggattacaggcgtgagccaccgtgcccagcctattttactcttgattgggcttttcttccttcctttttctttttaccatttttagtaaaatatttttctaattataaaactgatgacctctgttgcaggaacttagaaataaagcagaaaatgagtcccataaaatggggtgatataaaataatttagttaacacaggggcttttacactgtctatcatgtgctttgttacttacggcacaaatttttaaattattttaaacctattttgtgctgatagtgttttgaagattttcatttaatagcagagctggaagcacctctgagttcattccatgtaaccacagatctaggtgagtttaatgatttgcccgttgcccagaggctgcagactgataaatgggtttctctactccttcccagtttttccttttataactcattttcttcaaagaagatttacttttagaaatttaacagataatctttttttccattgcaccatctgtcttagtccttttgggctgctataacaaactactattgacttggtagcttataaacaacagatatgtcagaaattatttctcacagttttggaggctgggaagtccaagatcaaggcactggcagattggatatctgcctggtgagggctgttccccgatttatagatggtgccttcttgctgtgtcctcacatggttaaagggtgaatgagcacccttggccctatattataagggcatgaatcccattcactagggctttcctctcatgatctaattaccactcaaaggccctacctcttaatatcatcaccttgagggttaggatttaaacatgaaatttgtgggaacacaaacacacagactgtatcactgtctttgtttttcttgttgtttttttttcttctgagacagaatttcgttcttgttgcccaggctgtagtgcaatggcgcaatctcggctcactgcaacctccgcctcccaggtttaagcaattcccctgccttagcttccctagtagctgggattaccggcatgcaccaccacaccctgctaattttgtatttttggtagagacagggtttctccatgttggtcaggccggtcttgaactcctgaccttaggtgatccgcccgcctcagcctcccaaagtgttgggattataggcgtgagccactgcacctggcctatatcaactgtcttaacaggtacttttccaaaaatgggcctctctgttcttgtactgagttggcatttactactcttttccatttactaatagtaagttgtctactagttactgtctatccctcaattttattttttcctactgtattattatttttttggctgctgcctaatccatttgatttacttagtacagatcttctcttgaggttgatcttcactgtgctttggatgaggagactgttattaataagtagtagtgggctctgaaacttagtagctatgtgttctaacctaggttcaaggctgtttccctgttaattgaattcccatttttgcaagttggtttttttttttttttgagacagaattttgcttttgttgcccaagctggagtgcaatggcactatctcagctcactgcaacttctgcttcccaggttcaagtgattctcctgcctcagcctcctgagtagctgggattacaggcacgcgctaccacgcccagctaattctttgtatttttagtagaaatggggtgcaccatgttagccaggttggtttcaaactcctgacttcaggtactctgcctaccttggcctcccaaaatggaagggattacaggcgtgagctgctgccttaaatgctgggattacaggtgtaagccactgtgcctggctgcaagttttttttgttaaccttatcttagtggtttttaagtaatgttaggcagtgcactgggggtttccaggagctaactccttagcagataggagacgagcaatccctttagccaaaatagtttttaatttctctggggtgaatctttcctctgttcattattggtaacagactttatggtaaacagtatattttgaggaatatttttattagttgataaattttagccttagaaaaatcatcaaaaataaaaatgttatctttttgaatattttcctattgtttgtcttaatagtgtttgttgctgagtcatatcagtttcatcatgctgcctattaggccataagaatttccttttggttaaataactcaggttagtgaagtacttcttaaattttacttaaaattgacatggctttaaaatactggttttacaagatatatttaaataatatatagatggtagcagtgttatgttttggaattagaaattttacattgcttatagcatctctagatttttgacttgggaccaaatgaattggttggttagagtctgcttgccttagagaagagtacagtatggtacttaaaaacacctctaacttttgtttttctaacacccagattctggagactttggttgcagctagaccttaataaaccagtacaattacattacatactataaaatatttaaaaaccccaagatcatcagaagtcataaaatttagggttagtggcaagatctgagagatcatctagatagttagagctcttcattttccttatgtggaaactggtttagtgagattagttacagcttgcttatagcctcataggtagtttcaatggcagaattagaaaggagaatctaggtctaacttctcatactgtgttccttatatttcactacacaggtgtaagtgcagctactgaaaatagaatttaaatatttctatttaaaatacagaatgattcagagtaactttaaaatttttatacctagattttgatttttccctcttaaagagctctacaacatcaaaggcagtcaaacagagacatcattgggtttataaatctcggctcaggttatctgtgaatcttgggtagtttatatctctcatcaactctcctttagattctacctttttgcccattcaaatatatcttctacctctgatatatgaaataaagggaggcattttgaacttacatgactttttttttttcttttggagaaaaagaaaatacaaggaacatggtagcggggaaatggatttctccatttatagcatgatttttgcaaacgcagttaaatgcaagttctctgaggttcagggactacctttgtaatatccatcttaagaggagtgcctgtctaaatagcatgtcaagtcatatactactctggaatttaattaattgattggtcaattttttttctttaaaaatatatttttgtgtgtgcgtgtgaaccaggcaccccctctgcccccaaataggtttacagtgactcttgattattttttaaataaccttgttattttggcataattttagatttacagaaaagttggcaaagtactatagacagttcttgttttcctctcacccattttcccctgttgttagcatcttatgttaccatagtatatttgtcaaaactaagaaactgacattggtatattactgtgaactcgtctccagactatttggatttcaccagttcttctgttatcttctttctgttccaggtgccacatgcctcccctggtctgtgacagtttcttgggctttccttgttttttatgagcttgagtcttgagtaagattgtccaggtatcctgtagactgtcccccaatttggatttgtccggtgcttttcacgtgattagactggggttttgggttttaagtgcccgttttgtcacatcgtatcagggattgcacgtatgtgataaccacatgacatcactggtggtgtttggtttaagatagtgtttgtcaggtttctccactgtcaacagcgctactatttttccgttcccatacactgttcatggaaaacagctcactaagtccagcctaccctcaagggtgaaggacagggcaggacttaagcgccacattctggagggaaatctacatttattaaatggcattcttctgtaacgatttatccattccccgtttgtttggtttgtttgtttgtttgtttgtgtccgtatggaccatgggcatttactttatactttgggttgtaagctaatactgcagtatttacttttttggcttaaattgtttcatatttggccactgggagttctgtcagcttggccactatgtcccattgttttttgagcactttgttgctttctggtactataacatgctctaggctcatcttgcattttccctgccccagtcctagaattatccagtctccaaggagccctggttcttgttattggagaatggtatatagaaattaagatctgggcactgagtgtgctcactggtactgggtatcactgcttcttggccctctcaccgataaaagtgggtaacattttatgtatgctaacccatgtgtatgcacatatttataactttttctgtctaatcatttgtgttaagataaacatgaattcatacagatgtctctgacttgaatctagtaggacagcattcaattttggcttcctttctgacatacctgtatcttttctctctcagagtgagaaacctggtttttatcatccatttacttatctgttcagccccagtatatgttaaagcagtttcaaaattttgaacctgtactgctgtgaaaagtaaatttaccagcaagagtacagtttttatgtatttggtagctcctttttatctctagccttctagatttagtttttgcacattagatgccctttctctcctgctctgttgcaggtacttgtgattctgagggcctaagctatccatcagtctttttgagttgtcactttctgaggctactgagatgaattctgtcatggagaaacacagaagaataattacccagcgagccacaaggtttctaagatgaactttctggtgtaggatgtgtgatttttaatttttttatgccaaatatacagcttctatattcacagtaatactttacaaatcaccctatattgtgtgtcctttgtgtgctaactgaacatgagatagcccagcaatcctaaagggacactaggtagtgccttccacatagtaaccagagtccctttgccttggtttctgaatattcctcagcagtctgctaaaacgtacttttacccactcttaggtttattttgtcagtcagtgtttatatctttttttttttttttttgagacagagtctcgctctgttgcccaggttggagtgcaatggcgtgatcttggctcactgcaacctctgcctccggggttcaagcgattgtcctgcctcagcctcccaagtagctgggattacaggcgcccaccactacaacctgctaattttttttgtatttttagtagagacggggtttcgccatgttagtcaggctggtctcaaactcctgacctcaggtgatccacctgccccggcctcccaaagtgttgggattacaggcgtaagccaccacacccacccagtgttcttatctttttaagttctttatttaatttatacttttggaagtaaaggctttgtaagggagccagacttgacttttaccaaaaccacatcttaacatttttttggctaagtacagaaaaattatatgtatatttacagaacttacatttgtggaatatgtcttttattcttttatcagccaaaactatcctgaggtctgtgttttgtatttgaggaattttgggttttaatttcttaaaatctcttgaattctagtgagttagagattccatagggttgtactgttttccagtctaggaaatgatttaaaatagctgcctggtgctaatgttggaatgttcctagaaagtaaatatgtttccttgcatcttaagtctagagcatgtttggaaaggattcaagaattagaggacttgcttgctaaagaaaaagacaactctcgtcgcatgctgacagacaaagagagagagatggcggaaataagggatcaaatgcagcaacagctgaatgactatgaacagcttcttgatgtaaagttagccctggacatggaaatcagtgcttacaggaaactcttagaaggcgaagaagagaggtaaggaacttaagggtcaccctaccttatggtccactttttgcctctcaccctttttattgaaataaaaataaatagcattttaaaaagaactttattttcttggtcatttctttgaacacctaggtatagaagtagtaatagatcatatttctacctcatcgcagaaaatgttgctcaagtactcttagtttatttattattattactttaaatgctgaactgcatcaggatggattagttcctttgagattttaagtgttttggtgatttaatatattgtaaaatgccaaactggctgaaagagactttacatattatttatttatttatttatttatttatttatttatttatttatttttgagacagagtctcagcctgttgcccaggctagagtgcagtggtgtgattctcggctcactgcaaccttcacctcctggtttcaagcgatttgcctacctcagcctcctgagtaactgggattacaggcgtgtgtcaccacacccggctaattttgtttttagtagagaagaggtttcaccatgttggccaggctggtctcaaactcctgactgcaagtgacccacccgcctcagcctcccaaagtgctaggattacaggtgtgagccaccacgcccggctggctttatatatattttaaatctggtcaatgtataaatatttttgacacctgttctcagaaaagagttccaaaagggccaggtgcattgcctcatgcctgtaatcccggcactttgggaggccaaggcaggcggatcacatgaggtcaggagttcaagaccagcctggtcaacatggtgaaactccgtctctaatgaaaatacaaaaattagctgggcatggtggcaggcacctgtaatcccagctacttgggaggctgagacagaattgcttgaacctgggaggtggagtttgcagtgagccaagattgtgccattgcactccagcctgggtgacaagagtgaaactctgtctcacaaaaaaaagaaaaagaaaaaaaaagttccaaaaggaaagtggctgatttaggataaaaagccagataattttaatattatatccgttgtgatcataagaaagtacaggtacgaaaagagaaaaaagtacaccaactataacagtggctgtggtgggtggtggtagatcagatgactttctacccatttaccagacttcttgcattatggttatattacttccatccctagagaaaacattcagattgttattttttaaaaaagaaaattgacgatgggcaccttatgaagaagtttacattagttaaggtaaactttggctttggctaacagattgtaagtaatattttgctttagaaatgcatgggtgggatattcttcttcttattattattattttgagacaggttttcactctgtcacccaggctagagtgcagtggtgtgatctcagctcactgcagcctctgcctcccgggttcaagccattctcctgcctcagcctcctgagtagctagtattacaggcgcccaccaccacgcctggctaatttttgtatttttagtagagacggggtttcaccatgttggtcaggctgatcttgaactcctgacctcaagcaatccacctgccttggcctcccaaagtgctgttgggttacagacatgagcctctgtgcccagcccttgtttttttgttttttttttttttaaggcgagaagggcatatgtgttttaaaaatgaattgttttatttttcccatataggttgaagctgtctccaagcccttcttcccgtgtgacagtatcccgagcatcctcaagtcgtagtgtacgtacaactagaggaaagcggaagagggttgatgtggaagaatcagaggcgagtagtagtgttagcatctctcattccgcctcagccactggaaatgtttgcatcgaagaaattgatgttgatgggaaatttatccgcttgaagaacacttctgaacaggtaataaaatagacccttttttttctagcaaggctttgtggattgctagattctcttgcaattgtcatagctccttagtttttgtttggattcattacgtcttcatggaataagggtttatgtcctttttacttaaattcataaaataaaataaaaattaaaataggaggaggaagagttaggtacccttagtagtttaaagatttgcttcattaacccttctttagagggccagggcttttttgaaaagcatgttccttttatcacagtggttctgaggatgagttattattattctctgccctagccaaatttgtgaagaagttggagcaattggatgaaaatggtggatattctttcggtcattaacttaataaaaagcttactgaaagaaggagataagagcctggactcagatattaagggaatatttttccctgcaaataaatgaatgaacaaatgctaatactttacatgaaaaatagcatgaagccttattttgaaatatgtttaaaagtaaacatgaagtattcatagcagagatttctgaaatttagggctggggctttcgggagctctgtagtgtgggccttccctagctctgcatcaaggagctggaggccatgatgggttgtgagatgatactagaggaaggcatggtctgggagcgtgcaggcggcagtgggatggatgtcacatcttgaaacatatgttcagggcctgctaaaagtagttttgaaaattagtcttttctcaccacagttattaaaactatcttgcatgtggatgaatatgtaatttggatgagtgaaggagcactaatgagcaccaacagttttaatgctaaagagaataggctctaaggtctctttgtagccttttttttttttttgagtcttgctctgttgcccaggtcggagtgcagtggcatgatcttggctcctccacctcttgggttcaagagattctcctgcctcagcctcctgagtagctgggattacaggtgcacgcaagcacgcctgctgatttttgtatttttacacagggcttcaccatgttggccaggctggtctccaactcctgacctcaggtgatccacccgccttggcctcctaaagtgctgggattacaggcatgggccaccatgcccagccccactgaccctttttttgagccccttatgctttcatgtatgagagctgaatgtgggcagaagtgggacagatgcagaaggaaaatgacagattttcttctgtttctaagcttatgtgtctattttaaaagcttgaagtaatccaatacttgatgtttaaaaattgtgattatgacagctagatagtgctgtaaatttgaaagacccaccttatctagcagtgaatttgaccatttaatttggttcataccctgttcttccagttctgtcctctttaaagtcaagtaccttactaattaactcattgttgaagttactgtttgacaaaatgacagaatcgtgttttctttttatagtaggaaaacctgaaatgtgggaagatgaccataaagcggtcttagtttaactgcctgtatggattaatttatttgattattccacaactttctttatctttgaagtaacacccctcaccctcctttctgtgtgtaggatcaaccaatgggaggctgggagatgatcagaaaaattggagacacatcagtcagttataaatatacctcaagatatgtgctgaaggcaggccagactgttacagtaagtgaatctagtcatcatttaatttaacttcattgtgttaactaacaaagtaactcaaaaagttttttggctaaaagagaagcattttagaaatggccgttaaagtactttttatattattagggcattacaagtgctataaaagatttttaaaattctgtcttattgagagtagtgaagaatggacctttgaattatttttatcttgtctattccagtagatataaaagctatctctaggctgatacttatagcccagtgtcattcaggagacactgcttggcataaagaactgttaagaatttagcattaacatatgcctaaaacagcaatctctagccttgggtgagcttcagaatcatttgggtagtattttggtgttcaggccctacttcaccctttgctatctttagggttggggtaggagcctaggttttgaataaaagtccttagattataggcacccttgtaaattttcactaattggcattctgtgtcttgatttctaaatggctctctattggtatgttctgaaatactacatctttaatagttactgaattattattagcttactttttagagaagtatgtttcattgagtaatcaaagattcttttgcttttacttagtaggtagatttagctaacaataaaatatgttaactttgatacagatttcaaagaagtcactcttttcatcctaaaagaatgtagaggtgactgtctctttccttttatatattctttaaaaaatattaaacgcatgttttaaatgtgtttataattttatgttgatacaaaccttactgttgaagatcaaaggctcagacttctctttaaaaaggtgtattcagagagcatgatgccactttgtgaaaatatcaaatgctaatttggtaataatgggtaaaaatgggatcaactatcctaactacaatatcctttcttctcgttagtaattactatagtgagaaaaaattgctcactatagcaattgctattatatgtcttatggaagctgtataatgtggtaaaaagaatctgacattttagttcagaggattcagaattgagtgtgctctctatctcagaagtaatatggaagccttatgccaatcatgtgctttttctactgggtatactacctcagggactaaatacatggattctagagatctagtggataactcaattatcatataaaataatgtgatacttttttcccttcagttactggcattaaatgtgataagcagctctttggaacatggtagtaataagtgatctttctgtaaaattgcagaggcaaaagcaaagatcagtttaaaactctagaatagaaatatgagaaccacatgtgtaattttaaattttcttatagccgcattaaagtaaaaaagaaagacatgaattttagaactatattttatgaaacccaatatatccaaaatattgctttaacatgtaatcagtctaaaaagtcagatatttttacattcttttttttttatgtttagctaagtcttcaaaatctagtgtgtattttacccttacagcacattcatttcagactagccatattttaagtgctaacaagccacattttgctgcggtattgaatgacatggctataggacatattagttttaggttaagttagccagcaaggatactgacattttatgatgatgattactaacataaatcaactatgtgattacatataggctagtgagaaatattgcttacaattagggaaacactaacattccacatagtctgaatgttggaccagattcagttctttttttcagtttaatcccagttaatatcttgtgcccttttccatttgtaatgctgatgaaagatctggatgcttcaggggaacatctcaaaagtaagggctctctcctaatcagtaattcatagattttttttttcctgtttccaccccacccccccaccctttcttttttttgatagagacaggatttcaccattttgcccaggctggttttaaactccttagctcaagtgatctgcccgcctcggcctcccaaagtgctgtgattacaggctggagccactacacctggcccccattttgaaataatacttggctttgccatcttcagctttccttttgcagtcataaagtcttttatattctataacaatgtatggattacaaacttttctgtttctatttgtttttaaatgatctttctaagagatcagggctagtagtatccctgtagctaaaggcattgagtttcctagaggtgtagtgatttgtccagaattcaaacctaggctttctgactgccaggtgttcttcactctatccattctcttttgccagtagatatataaaaagaatttcatgctcatgagaagggaaatataattatttctttgacctatttcaatagcaattatattttcccttgaacagcgagtgatttatacatttccagcattctttttggagcgcagtctcagatactctagggtattgtgacattgtctgtttggagacgtaccagtttccataagattattctagataggctctctgctgcagaaggtctctttagttcttgctgtaggcagccagagaacattattagagggagtcacagaaggctctaacatggaaggatggcctataaaacccacagagtaatagaacgctgaggctaccattcactgagttagccagccactgaatgtgggttatcacttgctcttttcaataatcgcacctgttacaggtgccatttctaccctgttttatggatgactaaagtaaggtaacttgctcagggtcagctggtgtgtaaaggaactaggatgtgagtgtaggcagttttacttcagggtcttatatattatcatcttcacttatcagatggggaagctgaggccttgagaagctctgtgagttctcctggccacatagctgtgtatagcactctgtagctggggcatagttctcagacttttagaatcaagtgtttgagtctcatcgcattgctgtcgttggcgtgtgggagaactgggttctgggtgtactgacatgctttggttttttacagatttgggctgcaaacgctggtgtcacagccagccccccaactgacctcatctggaagaaccagaactcgtggggcactggcgaagatgtgaaggttatattgaaaaattctcagggagaggtatggccagtttatcaggaccaccacaatgttaatttcacttaaagttcactgtgcaagtataatcaagatcagattgaaacgtgcaataaccgattgcataaacagaccaaagctgctaagttaattgaactgaagctgtctttaagttttaggaataaataggagtgtattatagagtactgattattagcacaggctccagaacagattttctgtgtcctgtttctgttttcactgcacattagctttgtgactttgggcaagttacttcacctctcttagatttgtcatttaaaaatggatattaatgacacaatatccatgagctaataataagaatgagacagtacttgggaaatgcttggaatagtatctggcatagtacctttatctagtaaatgcttaaattattaaccttgttactagctctcagaatgttcatgaaactgtgagtttgaagattgtggagtgtacatcttcttggagtgtgtgttttcagtgtgtcagtcttagaatccttgtcaaagtaccttaccttccccattgccacataaagacactgcatatacccctaccaatactagtcttagaaatactacttcctaataaagcggctaaagtgtgctttgaagctagtaaaacatggcttcctccttgtctttccctagcgaatcaccttatccaggtgctgtaccacgcatcactgagcctctgtttagaatttgagtccctcctttgttgctattgccataagcatgttaatggagcttttgttgtgagttcagcatggtttgttcttctcattttccttttagttgtaatactgctttttcatcctttgcctaccaggagagctgtaagttggcttgcaaggaagccattggtcataaccttgttctgacatgcttactgattctgaccttttcacccagtttccaggctggcaggctctgctgtttgtaccttacaacctgactgggtatgcatttcagtctgagtggtgctgaaaggagatatatagggggaatgttaggctggcaaacctggtagggaagctaaccatatttacaagtgcagggctattcatttatttggaaaatcctgagtatctgctgtatgccagccactttgtgttaggaataagcaggaaaaaagccatacgtggtttctggcatcatggagcccacattgtaaagagagtaagggagccagggaataagataaagtgattttctgataaaggtaataaagataaactgtggtatcaggcccagcgcagtggctcatgcctgtaatcccagcactttgggaggccgaaggtgggtggatcacctgaggtcaggagttagagaccagcgtggccaacatggtgaaaccccgtctctactaaaaacacaagaattagccgggcatggtggcacgtgcctgtagtccaggctactcaggaagctgaggcaggagaattgcttgaactcgggatgagctgagattgcgccattgcactccagcctgggcgacagagcaagactgtgtctcaaataaataaataaagttacaggactcgctgagtaaagtttgtcaggagagggtccagaattgagccctagaaaatattgacattaggaataagagcaaaggaagtagaagatgcagccagtgaagtcagaggaaaatggtgtgtgatgtcaggaaagccaagggaggaaagtatctgtgaaaggagtggtcagcgggtcaaatcacaccgtccccttaggggttttttgtctgctcccatagtgccacgggcaggcctctaacctgcgtggtgctcatcacattgttctcactcactagaggaagcacactgagggcaagggcctgttctggtagatcctggtatcatgcttggcacataacaggaattcaggaagcatttactggatgcattttttaaaaaaaaatcagacatggaccttgacttacgttcagagaaataaagcaatagcagcattcattataagagtctgaggtgcctggataaaaagttctgttcatggccatcttcctgtctatccctcactgtaaccatgtctcttgtgaaacattgttaagagtggtgattggctcagataagactgaaaagcactgttataaggggtacaaggcagattaaatggactttcgtgagccatggaatctagtcattatttatgtcattttttttttctctgtgaaagtgtgttccaagttagaaacaatgttataggaggatatttggaatggagcagtaggtttaaatgccccaaaaaatagatacagtgacatgaacaaagtagtagatattatgacatgggatgcatcttcagacagtattactagtattactgatgacatattagtaaagctaactgaagcttagctccatttcataactcaaacattgaatagtagattatttgattgattgattggttggttggtccattcttttttttttttttggtgaaggagtttcactctgttgcccaggctggagtggagtggcatagcacgatctcggctcactgcaacctccgcctcctgcctcagcctcctgagtagctggaactacaggtgcgtgccaacacacctggctaatttttatatttttagtagagatggggttttaccatattggccaggatggtctcaatctcttgaccttgtgatccgtcacctcggcctcccaaagtgctgggattacaggtgtgagccaccatgcccggccaaggttggtccattcttttaacaaacttctaataccttcagcttgcgaggctctgttttaagtgagttctgtcagaaatgaggagagaaagtattatgaatacaggtcttatttcactagacagttacttttggcatttattcatttaattcgataagaccatatttgtcagtagggaccagaccacattaggaacaatctataaacaatccccgccataaagaccagtttgcagtaagattgttggtaactggcttagtcagttttgtttcttatgtttttttttttcttcttgctggggcattggaaatgtcagaaaacccaattaaactggcttagaaataatggaaattttttgggctcacataataaaaaatttaaatagtggacctaatccagtggctcacagcatgtccccggggatctgtctgttgtttctcttctggttgcctcccttggggacgcaggatagctgctggctgctcccagaggtacgtcttttctatttgctttttgtgggaaggtgatctttcaaaaaagtgctctttatggtggagtttatagattgttgctaacgtggtccggtactactgacagataaacatggtcttacccaattaaatgaatacataccaaaagtaactgtctaatgaaataagacctgtattcataccactttctctcctcgttcctgacagaactctctcagaacagcctagcaagcagaaggcagtagaagtttgttaaaagaatggacaatccagcccaccaaataatctgatattgagtgtttgaattatggagggaagctaaacttcatcccctgtgaggcacccatcctgggcttcactcacactggactagggtgggtcacgtgcccacctctaaaccagttcctggagttgggagggcggaattagagctcaagacttcttcctcccctctacagccacattgcactgggctccttgtgacacacgtgtgctccatggggggtgtgtacccaggtaaacctaggggctcttattcaggagggagggggcactgggtggttaaaaacagcgattgtcaccatggcaaaaacaagatgttttttatgagggaaataaaaaataaagcagtccttccaaactttccagaatatagatataatggaaacttttgtatatgcaaatgattacttatatatgtagagatgcaatatataaaatataaacaatcatctttcgtccacataagatcgccctgatttgtagcatttgctaatttctgtggtataaatactcctactgtggctgatgccaggcttccagcattatgtgactgagcacagagctgtgcagtgatgagcagcatcagcaggtgcagccagctccgggcaccactgcacagatcagtgcaccttcatatgcccaaggctcgcagcaggggcggaccaatgctgcattttatagacagagtaaagcctgtcatgtaagactatttatgtgaacctttcaggacacttggggtaaacacatttatttagtagcatcttgactaataacaatttccttgatctaaacctcccaacagctttttggttctaaattattatttattatttttctacctagatttttagacattagctcacccattttttatacggctttctgtattagattaattggtttttgcatgttttcaaatgaagagtgcttaacagcagggttacacttaaagtagttatgttaaggtaattcataataatgaagacaggcaagttgctgttttctgaggttctcattgaggctaatagtcttaagctacatcatgagccttaagagccaatgtttgcatatgggatgtataccacgagcttctagaagctggaatgtggtaattttgttatagaagattttatttgactcgttcctcattttaagatgagttgagaaaagctgggtactctcaaagttttttaagaatttatttttctgctttatatgctgctatctcctagttgatagcttgaacggtggttgatctaaagaatcacattttttttattactaatttggttaaaacactgatatttgtgaaatggctatttctgtttgtaaagatagaccaatttcacagaattgaagttactggctaattgagaggctcaaaatggtccatcttccttggtcctgcaagagtaataaaaaatccccacaaaatactgttctgccaccttactttatttacaaaacacattattgggcatatttcaaatcgaagtctcatttctgtgacactgggttttgattttctttctctgccattgtaaactagctggtctgtgttagataagcttttactgaagtaatattgtgtcttcccctgtagcattctctttcttgagtgaccttaggacagggtacagaataaaattatatgctctgcagcactcttgaggacacactcatttacttgctgccagatcatcaggttagccttgtgcttaagcaaaaacactgctgcatttgtgccaagtcagcattttccacaggaaagtaatctgtatttgacctttttagtagaaaatggaaatagttgctttctgtcatacctttagtgaatgataggagacctatttctgtacagaatacattggaacctcactagtacgttattggtaaatagtgtacagtgttcatctgtcttgattttgtttcattcaagaggtatcagttgctgaaaggaatgaaaggagcttgtcctttcttctcacttatcaggtggtcctgttgctggtagtccctgagatcacagttggcttccagcttcattttattcagcatttatttagcaccttatctttgccaggagctaagatctttaagctgaattcatgttgagttttataaagaatttagtatgtcaaataatttgtagaattcttagtaacagaataggataaaaagcagtggaaacttctcagcagatatttcgaattggatagtacttcctcccctgcaggaaatatggaaggtataagaactgctactaattatgcggaaatttcagtttagtaaccagaaagttactgatatacagctccccccgccccacccctttaaaaataataaacaggggccaagtgtggaggctcatgcctgtaatcccagcactttgggaggctgaggtgggtggatcacttgaaaccaggagttcaagaccagcctggccaacgtggcaaaaccccatctctactaaaaatgtataaaaattagccgcacgtggtggtgcatgcctgtaatcccagctactggggtggctgaggcatgagaatcgcttgaacctgggaagtgaaggtttcagtgaaccgaggtcatgccactgcacaccagcctgggcgacagagtgagactctgtctccaaaaaaagggatgaataatagtaataataataaacagaaatgctgtctcttttttttttcttttttgagacagtcttgctgtgacactggagtgcagtggcgtgatctcggctcactgcaacctcaatgcaagccattcttctgcctcagcctcctgagtagctgggattacaggcacgtgccatcatggccagctaatttttgtatttttagtagagacggggtttcaccatgttggtcaggctggtctctaactcctgacctcgggtgatctgcctgccttggcctcccaaagtgctgggattacaggtgtgagccactgcgcctggcaagaaatgctgtctcttaagcaaagaaaaggtccctctcccccgcatttggtgattttaagtgtgttttttaacttaaactactattgtttttaggaggttgctcaaagaagtacagtctttaaaacaaccatacctgaagaagaggaggaggaggaagaagcagctggagtggttgttgaggaagaacttttccaccagcaggtattactttatttatttaatatatttatttcaaattttattcacagaattacatgaagaccaagagtgtggttgggtttttcccctatcagttgatgaaccagcgcagttatctaccaagtggggtttgtactccccaaagggatattcaaggtgatactttagggtactggaagaatatgttggcacttttatttttattttttctcattgtaccaagtttcagttttgtcctttgttttctaatgtgcattatgtgttacagtaaaacatgtctatggattggatgtttactccaaacttgtttactctgtagggtcctatgattaaaaggtttagatcactaatttagagcaagaatctgcatataaactttaaaaaaacaaagtaatattcaacttcagtgtgaaacaaaattcttgctgtattaagttcctaatcattatctaattgaagatagattttggctgatggttgggcttttgagagcccttgaaataaagaaactccaaatttggttttaattataattaaattggaattattaataactaatgagccttcagtttatattctcaagctgtttgagtccgatcattaatcaaagtgtctacccttatcctgataagactttgtttccatggctccagatttttagtcttaagtctgctttgcttcattagccctagtcctggtctaaataaacactgtctcatatatttaacccccagggttgagaaccacttgaggtgggttgcatgaagtagcatgaattttttacctggatgccttctcatacattttggaggaatattttaaaacacatatgttacacttaacttacaagaaacaagcacaagttccattttctgtgcttcaatgggaaccatcgtaattactagaagtaaaataattatgtaagagataactcaaggcaccagacaagagggtcagcatgagttatatagcatgtcagatgctagaggaggtactccaggccagcagagtagttgagaagaactctgtgaggtgatgcttgtccactaatttgaaggatgggtgattatttggttattggagagaaggcagatgatggtgctctgaggatgttggaattcaccattgcttcactaacagaccaccccaaagcttagtggcttaaaacagtgatttcttacttcccataattctgtggtttgactgggctcagctgggcagtgtttctgttccacatgctgcagactgaactcaatcgagcaggctgtgttcagctcagaggttggcctcggctggaatatcttttaggtctctttctgtgtggatttctatgatttaagagtttagtcaaagctttatagcatggcaattgtctaacagagtaagtggagggtacaggtttctttcttttttcttttttttttttgagatagagtcttgctgtgtcgccaggctggagcgcagtggcgcaatctcagctcaccgcaacctccacctcccaggttcaagagatacccctgcctcagtctcccaagtagctgggattacaggcatgcgccaccacgcctggctaattttttatattgtagtagagatggagtttcaccatgttggccacgacaatctcaatctcaagagagtaccaggtttcttaaagggccctttgtaacattctcttagtcaaagtcatgaggccagtccagattcaaagtgggggtaaatagtctccacctgttggtgggaggaatggcaaagaattcatggtgatctttaactcactacagaggatgtgtaaagaatgtggccgggcacggtggcttacgcctgtaatcccagcagtttgggaggcaggcagatcacaaggtcaggagatcgagaccatcctggctaacacggtgaaaccccgtctctactaaaaatacaaaaaattagccgggcgtggtggcgggagcctgtagtcccagctactcgggaggctgaggcaggagaatggcgtgaacccgggaggcggagcttgcagtgagctgagatggcgccactgcactccagcttgggtgacagagtgagactctgcctcataaaaaaagacttaatgcaccaactatatccgctcatccagttattttgtagggttcatgtgagagttaaatgaagttgaaagattggaattaaactgacatagtctggaatgcttagggatgtagcttctgtacaatttggaacaaaggagaagttaagactgcattttaaaatatcactggccaagctgaatcagagggactaactctagagaggagattccagaggcagtgagggaatatataatggaaatttattaaggcttagtgactaaacttgagggtgagagaagaaaaaaaataaagatgtatgaggtttttagcttttgtgatcacagaaactaatgataccaaggttcataagagggaagatggaagggcagaacaggcgtttgaacttcatatttgaggatgaatccaatcgccttttgaattgattagaaatattttggtgaccttcaaaaaaccagttttagttcaatcagtggtgagtcacaagtcatattgtgaggttatatgaaattaatgagtgataaagaaatgggtagaggagccatgttgacttcaccttggaggacaaatccactgcagatggcttgggatgtgtaagttcaggatctagcaagctgtagtctccgatgtggttgttaaaagctgatccactgatctcctatttcctaagttatcaaaagaggttattgaacaatggttttcaaattgagctgcacattagaattactttaaaattatatatagatagctaccctttcccagtaaaatgagaaattcttatttgattgatcaagggacctagatcagaatttgttttaaactcctcaggatctgaatgtgtagccagagttgacaattactgttctggaatttgttggggggtattctagaaagaagtccataaaagaaggttagaggccagatacggtggctcacgcctgtaatcccagcactttgggaggccaagggcaggtggatcacttgaggccaggagttcaagaccagcctggctaacgtggtggtgatgcacacctgtagtcgcagctgctcgggaggctgaggcatgagaatcgcttgaacccaggaggtagaggttgcagtgagccaagattgcaccactgcactccagcctgggcaacagagtgagactctatctcaaacaaacaaagaaaaagaaaaaaagaaaaggttagaaaagatgagagatgataaagggtccatttgaggttaggtaatatggtttggtatccctgtagttaaaagtttttgtcttattttagaatactgtgatctatttctttagtattaatttttccttctgttttcctcatcagggaaccccaagagcatccaatagaagctgtgcaattatgtaaaattttcaactgtcttcctcaaaataaagaagtatggtaatctttacctgtatacagtgcagagccttctcagaagcacagaatatttttatatttcctttatgtgaatttttaagctgcaaatctgatggccttaatttcctttttgacactgaaagttttgtaaaagaaatcatgtccatacactttgttgcaagatgtgaattattgacactgaacttaataactgtgtactgttcggaaggggttcctcaaattttttgactttttttgtatgtgtgttttttctttttttttaagttcttatgaggaggggagggtaaataaaccactgtgcgtcttggtgtaatttgaagattgccccatctagactagcaatctcttcattattctctgctatatataaaacggtgctgtgagggaggggaaaagcatttttcaatatattgaacttttgtactgaatttttttgtaataagcaatcaaggttataattttttttaaaatagaaattttgtaagaaggcaatattaacctaatcaccatgtaagcactctggatgatggattccacaaaacttggttttatggttacttcttctcttagattcttaattcatgaggagggtgggggagggaggtggagggagggaagggtttctctattaaaatgcattcgttgtgttttttaagatagtgtaacttgcttaaatttcttatgtgacattaacaaataaaaaagctcttttaatat

SEQ ID NO: 38 - DNA, 4342 bp, Homo sapiens
aaacgcgggcgggcgggcccgcagtcctgcagttgcagtcgtgttctccgagttcctgtctctctgccaacgccgcccggatggcttcccaaaaccgcgacccagccgccactagcgtcgccgccgcccgtaaaggagctgagccgagcgggggcgccgcccggggtccggtgggcaaaaggtgagtgatgcggcctaccactcgccgggcctgccatgccctaggcattggtacccagagcaaagatttctaggaccaccccccgccgccacctcctggagcgggagatctgcgggtgcaggagaacacaccaggagctcggggcctggcattcccctgggcatgggtgtcgagggcggagacttccgggactcccacctccttgcgcgggtgagattcgagagatgggggacaggccaggagctcagaccgctctttgagactctcccgaaggagaatgggagggtaggggcgctgccagactccttccctggtgggcctagatgaagacgctcaaggaccctcgtgacttggccgagacaggggaagggagaagttgagtcgggcaaggaagagatgctaaagcctggggaattaagaacatgccagaatcatcccgagggagtctggaattagggagggtgaggactcgctaggatcgtcctgtggatctggtgagtataccctgagctgagcctgaccttggtgatgtggggagcctccatgacggctccccctgagattcaggtgggagaagatgcaccgtctggaggcctggcccatccagactcccaggtaaccccgaatactcttttttcaggctacagcaggagctgatgaccctcatggtgagtgattaagtgcccagaaccccagccttccatccaattttcagtagcctccttttttccgtcagcttttttgctagacataggggtaatgtaatttgctccctcctgggaaagaagttcatacaccccacctacaccatttcttccagcagtccctcctcccaattccatccccccacacgaagttatctcgaacacttccctgaagtcatacaagaccctccctatccagtgtgtccctacttcctagccccaaccaagctttacccacacccaactccccgcccttcttggtatttctagcctatgaatttggttgctttattttggatcagagtgatgagattaaggggaggctgggcgcggtagctcacaccttataatcccaacactttggggggctaaggtgggcggatcacttgaggtcaggagttcgagaccagcctggccaacattgcaaaaccctgtctctactaaaaatacaaaaattatccaggcatggtggtgcatgcctgtaatttcagctactcgggaggctgaggcacaagaatcatttgaaccgtggagacagaggttgcggtgagccgagcgcaccactgcactctagcctgggcgacagagtgtgtgtgtgtgtctgtctctgtctatctctctctctcaatctctctctctctctctctatatatatatatatgtaaatatatattttttagtagagatggcataaccccatctatatctcatatatatacacatatatatgtgtgtgtgtatacatatatatgtgtgtgtgtgtatgtgagcatatatatatatatatatatatatatataaaattaaggggaaagctcacccactgacctttgctatgcccaaaagtgtactccacattccaacaaatgtgttttctccccagatgtctggcgataaagggatttctgccttccctgaatcagacaaccttttcaaatgggtagggaccatccatggagcagctggaacagtaagtgtagggctgggatgggtgagtgagtctggggaaaggtgggaagtgagatccaagtgcgagctctgcttcaagcctttggcggagcaagacactcctcctgtgactgtttacattctctgagccatgtggccttgttctttccctctgtgcaataaagggtgggtttaaagcagggctgcctatcttagatgtttacatggggggacagacagcaaggaaatggatgaagtgaggactttggccaatagggccagatctcaagaaggcagcttcccattgctgcagatcaggtttaagatgagtcagaagtccaaatctgtgccaaatctaatttttacgtattagcaactaatattcttttttttttttttttgagacggagtctcgctctgtcgcccaggccagactgcggactgcagtggcgcaatctcggctcactgcaagctccgcttcccgggttcacgccattctcctgcctcagcctccgagtagctgggactacaggcgcccgccaccacgcccggctaattttttgtatttttagtagagacggggtttcaccttgttagccaggatggtctcgatctcctgacctcaagatccacccgcctcggcctcccaaagtgctgggattacaggcgtgagccaccacgcccggccagcaactaatattctaattgaactaaagcacaggatgccaatttacaatccttagaccaaagagtcactgatgtctccaccagataagaggaaagcatcaggctaggcatagtggctcacacctgtaatctcagcactttgggaggctgaggcaggcagatcacatgagcccaggagtttgagactggcctgggcaacatggtgaaaccctgtctctaaaataaaaactaaactaaaaaaactttttaaaaaggcagtggggagcatcagaaccagctcaacagtttgtctactgtccggtcccagagaaactcaagattctagcaagccccttgtgtggggcttgggttgggacatgaggctgctgctggagcttactctgcaactgtttctccaaatgccaggtatatgaagacctgaggtataagctctcgctagagttccccagtggctacccttacaatgcgcccacagtgaagttcctcacgccctgctatcaccccaacgtggacacccagggtaacatatgcctggacatcctgaaggaaaagtggtctgccctgtatgatgtcaggaccattctgctctccatccagagccttctaggaggtgactttagagaccacccctcccctccatgcaacttgggaacctgtcaggactccctggggtcagcctcttctaccgccttgaccttctctttctctccacccacagaacccaacattgatagtcccttgaacacacatgctgccgagctctggaaaaaccccacaggtgagtcctcagtccttgagcccagggtgatccctcccccaaccttcaaaggctccctcaaacaaaaggagcccagtgacttgggaccgggttggttggggcagggtggagtgtcggcagcaacccacttctgtttctgccccagtgctcctatttgctataaaatagcaattgttttatagcagaataaaaatgtttggcgataaataattttgggaaattattggtgagaccaaggcaggaggatagcttgaggccaggaattcagtagagtgccttgcctgtgccctccagtctcactggaagcaagcccttccaggagagctgcctagatgggcagtgcagggagaatgccgggctgggaaaccagcccctcctccacctcctccgacctttgcatccctggtccagctgcctcttgcccaccttaattcatcctgggccaggcacagtggctcatgcctgtaatcctagcacttggggaggccgaggtgggtggatcacatgaggtcaggagtttgagaccagcctggccaacatggtgaaaccccgtctctactaaatacaaaaaaaattaaccgggtatggtggtaggcacctgtagtcccagctactcaggaggctgaggcaagagaatcacttgaatctaggaagcagaggttgcagtgagcagacatcatgctattgcactccagcttggtcaacagagtgagactccatctcaaaaataataaatagtaaagattaactcatcctgtctccatcactcactgagacctgcctgttctcttccagcttttaagaagtacctgcaagaaacctactcaaagcaggtcaccagccaggagccctgacccaggctgcccagcctgtccttgtgtcgtctttttaatttttccttagatggtctgtcctttttgtgatttctgtataggactctttatcttgagctgtggtatttttgttttgtttttgtcttttaaattaagcctcggttgagcccttgtatattaaataaatgcatttttgtccttttttagacaa

SEQ ID NO: 39 - DNA, 48178 bp, Homo sapiens
aaagttaagagtggcgccagggatttgaaccgcgctgacgaagtttggtgatccatcttccgagtatcgccgggatttcgaatcgcgatgatcatcccctctctagaggagctggactccctcaagtacagtgacctgcagaacttagccaagagtctgggtctccgggccaacctgagggtacggcgctggcggtgcgggtccctgggcgggcgcggcgggaatagcggcctcggggagatgcggtgcgaagggaccgagagggaagcccgggactgaggcagctctccctgcccctcgggcagtagatgtggttcacggtagtcccagttagaactctgataaacggaagaggaactgtagttttcacctcattttgaagctggcttgtctgggtgctcacatgataagctctattccgagggatggtttattgttttttgttttgttttgttttgaaattactgtatacctctcagggcgtcgattacgaaactcaggcccagaaagcacaaggggtgtcgttaatcgttagacaattaagtaaataattggctcagcttctggaaaaccccaaacagactccagtgatttgtaatattgccgataatctcttgatactttattgatggacctgtcagaaaaaaaaaatcgacttttaggggagcacctccttgggtaaatttttattgatgactgttgggttgatggtctctatcaaaaccagtaaggtctttgactccgaggctacaagatgtttggagagttggcccggcgctgtggctcacgcctgtaatcccagcactttgggaggtcgaggcaggcggatcacctgaggtcaggagttcgagaccagcctggcccttaaaaaattagccgggcgtggtggcacacgcctgtgatccaagctttttgcctgtgatcccagctacttgggaggctgaggcagaagaatcgcttgaacctgggaagccgaggtggcagtgagccaagatcgcaccactgcactccaacttcggtgacagagagagactcagtctcaaacaaaacaaaaacaaacaaaaaacccaagatgttagaagaagatttggggatttaatgtaggatagcggttttatatattttgttaatagttgagacttcccacataatactgctatatactctggaggtttctcctgcaggctgtgatactgacagtgagtaaatgcttaaatcaatcgtcacaattttttttttatttgtttgtttgtttgttttttctttgagacggagtcttgctctgtcgcccaggctggagtgcagtggcgccatctcggctcaccgcaacctccgcctcctgggttcaagcgattctcctgcctcagcctcctgagtagctgggattacaggcgcgtgtcaccacgcctggctaatttttgtatttttagtagagatggggtttcaccatgttggtcaggctggtctcgaactcctgacttcctgatccgcccgcctcagcccccaaagtactgggattacaggcgtgagccaccccacccgacctaaattgtttaaacaaaataatcagggcctaagtgcctgttggggctgaatgaccaaagggttttccttggggatatttctgggctgtagtggttagtggctcctctatacttcgtaaacaaagccttaatatctcagcctaaattccttaggcttttttgctgcctagctagaatcttttatccaaggctgcatccctgaacacttggcacttttatctatctttgtcccattgctcattttgaccctctagcctcagatcaccttctttctcctttatctgcctggctgtgtgtgtgtgtgtgtatttttagtagagatagggtttcaccatcttgcccaggctggtcttgaactcctgggctcaagcgatcctcccgccacggcctcccgaagtcctgggattacaggcgtgacccaccacgcctggcccatatcaagtatttatatgtgaatcaagtatttataggtgaaatgttatgatacctgtaaaatttgctgtaaaatactcaaggaaaaagagagggaaactagatgaagtaagaacagaagaatgttaataattactgaaactggagataggtacatggggggattgcactattctctctacttttttaggtttgaaattttccataataagatgttttaaattattaacttggtacaacctaagagctcattaagtcaattgccttttgaaattttagtacatagcaaaaaaattaataaattgctctgagaaattatcaagatttgattaaaatgaaacactacaatttaaataaattttactagcataaatatactagtataattatgctaataaaatttataatttatactagtatatactatatatattattactagtataaatatataatatatatactagtatatataaatatactaggatactaaatatactaaatacactaaaataaactaaatatataaatatactatatatactaaatatactatattaatatactatatgtactagataaatatactataaatatactatataaatatactaaatttacatatttagtatttagtgtgtattagtatatatatttagtatagatatactatatactaaatatactatatatactaatatgtatactaaatatatttaatatactaaatatattatactataaataaatataaatactatacttaatatactatatactaaatatactatatataaatatattaaatatataaatatactaaatataaatatactaaatatagtatgtatgtttagtataaatatactaaatatactatatttataccggtataatatactaaatatgctatatttataccggtataaatatactaatatactatattatactggtataaatatactaaatatactatattataccagtataaatataaatatactaaatatactatatttttatgtatactagtatatttgtactagtaaaatttatttaaattgtaatgttttattttaatcaaatcttgataattttactagtatgatattattaaaaataaatttatggccgggcatggtggcttgcacctgtaatcccagcatttgggaggccaaggcaggtgtctcacctgaggtcaggagtttgagaccagactggccagcatggcaaaaccccatctatactaaaaatacaaaatttagccaggcgtggcagggggcacctgtaatcccagctactcgggaggctgaggcaggagaggagaattgcttgaacccagggaggcagacgctgcagtgagccaagatcacaccattgcactccagcctgggcaacaagagcgaaactccgtctaaaaataataataataataataataataataaatatataggagataatattccctcttttgagagacttctcttaatggtatagcaatttgaaggagccagttattaatgttagtggggcgactggtcctgttgtcactcatgccctcacttcctttcttgcgagcttaaattacaaacactggcactatttccacttccttgcacctccctatactcacctggcaaaacccaagcctgattaaacccagctatgtgcttaatctttgcctatacctctgcagctaactctagttggagaaaacacctaactttgttgagcgaacttattttaaatatgcaacgctaaaccttaatatgggcatttgatcctcctccttttggtttttttttttttttttttttgagataaggtctcgctctgttgcctaggctgcagtggcacaatcaggcctcactgcagcctcaacctctcaggttcaagacatcctcccacctcagcctcctaagtagctgggattacaggcacgtgccaccacacctggcccattttcttcttagtcatgaactttcctacttttgaggataattactttttatcatcttgactcaacttggttcccttccctcccttgatgactttacctcataggtcatgggaaaatagatgcaatcaacagaaaactgccttatcgttcaaccaccaaatccccccctttttttcctttccttttctttttttttttttttttttttttttgagacagggtcttgctctgtcagccagcctggagttctctggagtgcagtggcacaatcaggactcactgcagcctcaacctcccgggctcaagcaatcctcccaccgcagccccctgagtagctaggactacaggcatgaccaccctgcctggccagtgtttttttgaattttagtagagatgaggtctgactatgttgccctgtctggtctccaactcctgagattcagcgatcctcgcgccttggcctcccaaagtgctgggattacaggcgtgagaccctaggcttggccccaccaccaaaccttttagccaccctgcatctacatccacatactctgcttctttgcctgtctaagggcaacctttccatttatgctgaagatcctgggccctcttgcttcccctaggactacattcctacaattagagcctctctcctcattaatttctccactctgctagcttatttgccataaggcatgcaatcatgttttactatcacccatcttttaaaaaaataaaaaagccaaaatcctctcctgatcccatgtcctcattccatctactgccctatttctctgttcttttctactgaaattgctttattaaggtcgccatcttacaaagcttgtgttccctctctcccctcacctgtgcctatcagtagcatttggcatgattgaacattcccctctgctccaggcactttctgttctaggctttgatatttcacgctgtcctgccttactagcacttctttctagtctccttggttggttcttcatctgccagatctctaaatgtggagtgcccccagggctctcttcctggttgtcttttctctaactatgctctatccctcggtgatcttatccaccccatttttttttcttttcttttttctttttttttttttttttttgagtcacagtcttgctctgtcacccaggctagagtgcagtggcgcaatctcggctcactgcaacctccacttcccaggttcaagcgattctcctgcctcagccacccgagttcctgggattataggtgcctgccaccatgcccagctaatttttttgtatttttagtagagacaggacttcaccatgttggcctggctggtttcaaactcctgacctcaagtgatccacctgccttggcgtcccaaagtgctgggtttacaggcatgagccactgcgtccggcccattcccataagttaaaatttacccaaaagctaatgcctcccaaacccacatctccagtaggacctctctctcccctgggatgctgactcgtgtatttaagtgcattttcaacaacacggtcaggtccaagcattgacagtctcttccccatctcagtacattgttcaggcccagtttggatcaccctggattcctctcttcttcacccacagccatccattcttgtcagcacctcctcctaaatagacctgaaatctgacctctgggcaccatctccagcgctgcaaacctgtgccacagcactctcatctcctgaccactgcctcagtctccctattgggcttcctgcctcaactcttacctcacaatagtgttctcttggtagttggagtgatatttgaaacttagggaaaagaaaaaaaagagagagagaccaggcgccaggcgcagtggctcatacctgtaatcccagcactttgagaggccgtggtgggtggatcacttgaggccaggagttcaaggccggcctggccagcatggcaaaaccccgtctctactaaaaaaaaaaaaaatacaaaaattagccaggcgtggtggcatgtgcctataatcccaactactcgggaggatgaggcacgaaaatcccttcaacctgagaggtggaggctgcagtgagccaagatcacggcactgcactccaccctgggcgacagagcgagactctgtctccaaaaaaaaaaataaacttagaacgtgtctttctgctcagtgccctccaatgacttccctcacatctaaaataaaatctaaactctttccagtgtaatgagagaaacttagtttgaccctgatttggagggaaatttttttaaaaagaaaatagctaaaattggagagaaggaaatttcattatgggccacatattaggtgatattaggaaattattgcttttcctgagtacactaatgcattagaggatcatgtggggaaatctcttatttttaggagatgtggctgatatatttagtggtaaagaatcatgatgtctggaacttattttcaaattctttcacaagaattatatattaatatagagaaaccaaatatgagacaatgcaaatgactattgaatcttggtgggaaatatgagtgtttattacattacttcgacttttcttttttttttttttttgagacggagtttcgctgttgttgcccaggctagaatgcaacggcatgatctcagctcactgcaacctccacctcctggattcaagcaattctcttgcctcagcctcccaagtagctgggattacaggcatgtgccaccatgcccagctaattttgtatttttagtagagacagggtttctccatattgttcaggctggtctggaactcctgaactcaggtgatctgactgcctcaggcctcccaaagtgctgggattacaggcgtgagccaccacacccagcctactttgacttttctataggcctgactttttttctaataacaatttaggggaagaaattaattttttttctatttttttattttttttgagacagactttcgctcttgtcacccaggctggagtgcagtggtgcgattccggctcactgcaacctccacctcccaggttcaagtgattctcccgcctcagcctcctgagtagctcagactacaggtgcccaccaccacgcccagctattttttgcagacatggggtttcaccctgttggccaggctggtcttgaactcctaactttgggtgatcttcctgcctcggcctcccaaagtgctaggattacaggcattagtcactgtacctggctgaaattcataatttttgctgtggcctttacctctctacttgacccagcctctggtcacatctctgatctccctgccctccatatacctcagtgttcaccatacttctaccataagggcagtttctgtctttcaactcatgagtccacctcagggctcctgttcttggcgctcgctctgctcggagtgctcttcacctgctgcctctttcctcattcacatctcgggaggcctttcccagccatcctaattcaggtagcatccccaccccaccccagttgcccagttttatttttgcatcataatacctgacgtcatatcattcatttctagctttcttgggtaactgtttcacctctgctagaagatcctggagggcaatcaccttgtctgtttaattaatcactctctagtgtctggaacagtgcccagcacaataaatgcttgttgaaggaatgcatgaatatatgctgataactaacatctgcaccttcagcacaactcttgaacaccacctcatatcattcaacctcctcactgggttctgccacaggtgcctcacttcatgcatttttgtatgtttggtgagattttgaaggtatattaagagagtattagaaaaatcaagaatgcctgaattctgccctgccaatcatccccttcccagagaaaacctcaagggtggttcaaggaacaagtagaaaataaggtaccactttattactagctgaaatagtgcctgatatcttgatgcagagcattctggtaaagtggattggagactgtggcttaggcttgcaccacaagcaaaagcttgagcacaaaccaaatttcaggatctctgctattctctactggacacatggcccatgataaaaggcatgagaagaatagagccaagcctggtggctgggcccaccttgagaaggatggctgtggccctcaactgcatggctgggtggaagaggaagaaaaaaagaacccaaccaaaaaacttgacttttgttttttaaacggagtcttgctctatcgcccagactagagtgcagtggcatcatctcctcggctcactgcaaccttcgcctcctgggttcaagcaattcttctgcctcagcctcccaagtagctgggactacaggcacacaccaccatgcccggctaatttttgtttttttattagagacggggtttcaccatgttggccaggctggtctaaaacccctgacctcgtgatccacctgcctcggcctcccaaagtgctggaattacaggcatgagccaccccgctcaaccaaacttgacttttaaagcacaggaaaatgtaaccaatcaaattaacattgttctttcaggaaagaacaagaagggaggttttcctaggctgggaagagaagctcagtgttcccttcccccggcagagacctacaaccatccccctaagaccccgtcaccttttgcattcctcatcttagggaccgtaccacacttcaccagctgtccaagccagaaacgttggcataacaaagtttccctcttcctcaactctcatgttcacactgatttcacttcctaagaaggttttgacttcatccatactgccttagccccgctccagttcaggccacagcatttctggctcatccccatcaaatgcatcttgcacattgtgcaggtagactactcattctgagtaatgcaaaattggtcacccactgccttgctgcaaactcttcagagactgcccttttctctgagagtaaagttcatactctttaaaggcttacaaggcctggtaacatcacggccctgctcactttcccaacattgtctcttactatctcctacaaacaggtccatgttccagccacactgaacttaagttcttcaaactccaccctcattgttgccttgctgtgccattcctctacctctttctctaccttctcttcatccttcagatctcagcaattagagacatcacatctttatctgagaactgccctgtgcagatacttgctgaagtctaacctagcagtcccaactttgatggccatgcctacctatgttctcatgacagcctgagcctcctagcgtgggcatttaccccactgtattgcaattgcctctttccttgtctaactttcccactcagatgtgaaattccttagagcagagacccattctttctaagtaatggttctagtcctatggtctgaccagagtacatttaatgaatacaagaacagcaaaaaatattcaacgtatcttccttgtttatttgacttttggctctaataataaggtctctcttgcaggcaaccaagttgttaaaagccttgaaaggctacattaaacatgaggcaagaaaaggaaatgagaatcaggtgagtaatgtttttcatgtttacctgttagctagcaaaataatcatatttggttaatgggcaattaacacacaactagtgatgatttaagacatgctgttggccaggtgttgtggctcacgcctatactcctagcactttggtaggcagtggcaggcggatcacttgagtccaggagttcgagaccagcctggccaacatggtgaaaccccgtctctactaaaaatacaaaaattagccagatgtggtggcgggagcctgtaatcccagctactcaggaggctgagacagggagaattgcttgaacccgggaggtggaggttgcagtgagccaggatcgcgccactgtactccagcctgggtgacagagcaagactccgttcaaaaaacaaaaaaaaagatatgctgtttattaaaaaagagatcattattggtaatagtgccaaggactgaatcctttcagattaactatctgctgttgtgaatggtgaaactgttttgcgccaagtaatctgttgaataacatgtttttacacagatacaaaggctgagtactagttgccaagtactacgagagatggcatgatttaagtagagagggaactggatttgaaatcagaaacaccttggtcaagtaccagctctcatttatttctctgcaacattagaaaactcaaactcctcttctttaaaatggaaataatatctgttctgctgaactgagtgttgtgagcatcacatgaagtagggattgtgaaagtgacttgtaagctataaaacactgctgatggctgatgggagttgtcatggccgcttcagacccacagcaaagatttttgataaggcatgactcctaaacggatgaatgagtgccccattagagccaagattcttttattctttttgttgttgtagttgttgagacagaatcttgctgtcatccaggctggagtgcagtggtgtgttctcagctcactgcaacctccatctcctggggtcaagcaattctcctgcctcagcctcctgagtagctgggattacaggcatgcaccaccacacccagctaattttgtatttttagtagacacagggtttctccatgttggtcaggctggtctcaaactcccgacctcgggtgatcccaccacctcggcctcccaaagtgctgggattacaggggtgagccaccatgcccggcccattttcttgtatttttagtagagatggggtttcaccatgttggccaggctggtctcaaactcctgacctcagttgatctacctgcctcagcctcccaaagtgctgggattacaggtgtgagccaccgcacctggcgtcaaatttatttttgattccaggctttaattaactgaaaatagacaagaactatttttgaattctagctttaaaagtttctatatcaatttcttttttatggttaagggtacatgattgtagtgccatttgaaattaaaattataggccaggcgcagtggctcacacctgtaatcccagcactttggtaagccgaggtgggtggatcacttgaggtcaggagtttgagaccagcctggccaacatggtgaaaccccatctctactaaaatacaaaaattagctgggcatggtggtgtacacctgcagtcccagttactcaggaggctgaggcaggagaatcacttgaatccgtgaggcagatgtagtgagcagagatcaaaccattgcactccaccctgggagacagaatgagactccatctcaaaaaaaaaaaaaaaaaaagaaacaacaactaaaaattgtctctttatattccagcaacatgtgtaactcaaaggtactgcttctaggttggtgcaaatgtaattgtggtttttgccattactttaaaaaatgacaaaaaccaggccaggcgcggtggctcacacctgtaatcccagcactttgggaggctgaggcgggtggattatgaggtcaagagatcaagaccatcctggctaacacggtgaaaccctgtctctactaaaaatacaaaaaactaaccaggcgtggtggtgggcgcctgttgtcccagctactagggaagctgaggcaggagaatggagtgaacccaggaggcggagcttgcagtgagccgagatcatgccactgcactccagcctgggcgacaaagcgagactccgtctcaaaaaaaaatgacaaaaaccaggctgggcacagtggctcacgtctgtaataccagcacttcggaaggccaaggcgggtggatcacctgaggtcaggagttcaagaccagcctggctaacatggcaaaacaccgtctctactaaaaatacaaaaattagccgagcatggatgcacacagctgtactcccagctactcaagaggatgaggcaggagaattatttgaacctgggattcagatgtcgcagtgagccaagattacgccgctgcattccagcctaggcaacagaatgagactccgtctccgaaaaaaagaaaaaaaaaccaccgcacttatttttgcaccaacctaatacatggaaacaatttctcttacttttttttgagacagggtctcactctaacccaggctggagtgcagtggtacaatcagggctcactgcagcctggaccccccaggctcaagtgatcctcttgcctcactcccctgagtagctgggactacagccttgtatcaccattcctggctattttttgtatttttagtagagacggggtttcacaatattgcccgggctggtctcaaactcctgggctcaagtagtttgcctacctctgcctcccaaagtgctgggattacagacgctctgccagtttctcctcttttactttcttctccgtgactatcagggagttggaaagtgggatccacatttttctattctcatgtaaaaacccctgctccttttttagctcatcttgaaaaggccaaagataaagggaaaaaaaatctcttctcctttgaaatttatgatcacctatttttttctttcttttttttttttctgagtttcactcttgctgcccaggctggagtgcaatgacacgatctcggctcaccgcaacctccacctcctgagttaaagcgattctcctgcctcagcctcctgagtagctgggattacaggcatgcgccaccacacccggataattgtgtatttttagtagagacggggtttcacatgtttgtcaggctggtctcaaactcccaacctcaggtgatcctcccacctcggcctcccaaagtgctgggattccaggggtgagccaccgcatatgcttacctattttaatctcccatctgctgagctcctagttactctctagtgttctctgtctcattgtcatcatttcctcatgtcttcatcttattttggacaagttcaaaggtccatctggatgtctcttcttactactgtggcctccttgtcccttaatgctagtgatctttgtttttgctctttatcaaccgtctacttctctgggcatatcctagaccttacaacacttggaactattccacttctgtaatattttacctctggttaaggccttttattctttttttttttgagatggagtcttgccctgagtaactgggattacagatgcacaccaccatgcccagctaatttttgtgtttttagtagagtggaggttttaccatgttggccagactggtcttgaactcctgacctcaagtgatgtgcccaccttggcctcccaaagtcctgggattataggcgtgagccaccacacccagccagtccttctattctttaagctttattctttcattcccaacagatatattttatatttttttatatattttttcttaattatttatttttgagatggggtctcactctatcacccaggctggagtgcagtggcataatcatggcttgcttttggcttgacctcaagcagtcctcccacttcagcctcataagtagctggaactgcaggcacactcactacaccttgttactttttaagaaattttttttgtagagactggggtctcattatgttgcctaggctggggaactttttaaaaatacggatggctgggtgcggtggctcaggcctgtaatcccagcactttgggaggccgaggtgggtggatcacgaggtcaagagatcaaaaccatcctggccaaaatggtgaaaccccatctttactaaaaatacaaaaattagccgggtgtggtggcacgcacctgtagtcccagctactcgggaggctgaggcaggagaatcgcttgaactcaggagccagaagttgcaatgagccaagattgtgctattgcactccatcctgggcaacagagccagaccccgtctcaaaaataaataaataaataaataaataaataaataaataaataaataaataaatactgatgtatggccaggcacagtggctcacgcctgtaatcccaccactttgggaggtcaaggtgggtggatcagctgaggtcaggagttcgagaccagcctggccaaaatggtgaaatcccgtctctactaaaatacaaaaattagctgggcatggtggcatgtacctgtaatcccagctagtcataaggctgaggcaggagaattgcttgagcctgggaggcggagattgcagtgagccgagattatagcactgcactccagcctgggcaacagaactagactctgtctcaaaacaaaaaaaatactgatgataggcctcactaaacctcaagccaaataaatagactatcaagggatggcctgtggccataatagtgaaattgactgactactaatagtgaaatagacatctggtagactgcctgtaatcagtctaccagatgtctcctaccctctaaaatattggaagatttctcattaaggaaattaaatagttatcagacaaaggctcctgcctttgggcattcaaggaaccaccagcataatggcctcctccctaaccaaggaatcctgccaaataacacacatttcctgcacactcaagctcctaatgaggtttttcctgatttgctatgaaatatgaatagacatggccgggtgcggtggctcactcctgtaatcccagcactttgggaggctgaggtgggcggatcacaaggtcaacagatcgagaccatcctggctaacaggcgaaaccccgtctctactaacaacacaaaagattagccaggcgtggtggcgggcgcctgtagtcccaactactcaagaggctgaggcaggagaatggcatgaacccaggaggtggagcttgcagtgagccaagatcatgccactgcactccagcctgggcaacagagtgagactccgtctcaaaaaaaaaaaaaaaagaaagaaaacggactgggcatagaggctcacgtgtgtaatcccaacattttgcgaggccaaggcaggaggatgacttcagcctaggagttcacaaccagcctgggcaacatagtgagaccccatttctacaaaattaaaacaattagcttacgtgtggtaacacatacctgtggacccagctgattgggaggctgaggtgggagggtcagttgagctccagaaattgaggccgcagtgaacttagatcaagccactgtaatctagcctaggcaacagagcaagaccttgtctctaaaaaagaaagaaagaaagaaaaagatgaccctaaaggaaatgaagataatacaaaatataactcctggcttagcctcctgagtaactgggattacaggcacttgccaccacgcctggctaatttttgtatttttagtagagacagggtttcactgtgttggccaggctggtctcgaaatcctgacctcaggtgatccaccagccttggcctcccaaaatgctggggttacaggtgtgagccactggcccggcttaatacatttttaataattttaagtagagatggggttttgccatgttgcccaggctggtctcaaagtcctgggctcgagtgatccacctgcctcagcttcccaaagtgctgggattacaggtgtgaaccactgcacctggcccaatttctgtatttattcacactaaaataactttgaatactttactaccctaatttattaatttgggttgctaagtgtgattatttctttttaaataatctataagggtttgtttgtttgtttgcttgtttgtttttgagacggagtttcgttcttgttgcccaggctggagtgcaatggcgccatcttggctcactgcaacctccccttgccgggtcaagtgattatcctgcctcagccttccaagtagctgggattacaggcatgcaccaccatgcccgggtaattttctatttttagtagagatggagtttcactatgtcaaccaggctggtctcgctaacctcaggtgatccactcgcctcggtctcccaaagtgctgggattacaggcgtgagccactgtgcctggcctaaatactctataattcttgtctttgcctacaatttaccgctagagagttttaaattttttcttttgcatatgtaatatgttttttattctgtctcaattctgattcttcctgagcattataactgtagacatagcacatagcagattaatacctctcttttcaggatgaaagtcaaacttctgcatcctcttgtgatgagactgagatacagatcagcaaccaggaagaagctgagagacagccacttggccatgtcaccaaaacaaggagaaggtgcaagactgtccgtgtggaccctgactcacaggtgaatggaaatatacaaactgaaaataaaccacctatgccaaaattggcatacttttatggagatttctttttaaattcccatgtgatgtcatgtgtttgtaaggttactgtgtgctgtaagctccatgaaagcccagacccaagtccagctgctcatcactgcatcccagggcttgggcctcaggaagcactttttaagtattaagctcacattaaatatttgttgtataaatatgaacattcattgagtgttcacttaagtgaggtgtagtaggtaggaaggaaagagaaacaagcattaaatgtgttttttgttgttttttcgtttgtttaaattctccttcctaccttgtccctggcctggtgatcaccctgtacttagtctttcagcagtgtgatcacatgattagcaaggggcttccctcgcttgctttccgtagactctggttttattcttttatcttatccttttattcaaatgtaatttttacaaagcacagtcttttttttcttttttcttttctttttttttttttttttgagacagagtttcactcttgttgcccagtatggagtgtgatggcaccatctcagcttactgcaacctccacctctcaggttcaagcaattctcctgcctctgcctcctgagtagctgagattacaggtggccaccaccacgcccaactaatttttgtatttttagtagagacgagatttcaccatgttggctgggctaatcttgaactcctgacctctggtgctctacccacctcggcctcccaaagtgctaggattacaggtgtgagccaccatgcccagccctgaaacacagtcttaattttcttttctatgttcatattgttgcagtaaactgaggaacggagagactaatacggagtacaggaggatttgtttattttaggcacgcaccggctcggaggattcacatctaaaagctgagccttgaacaaagactgagcgggtttttataagtggctttacagaagcaaaataaaagcaattaatcatacagtaacaggttacataatctatagcgtaacataacttgtgacttagccagtggccttgtagctgcattaaaagaaaaacaagaactggctaaatacagacatttgtaaaacataatcatgctaatcatgcttaagaagcccgggaaaagagtaacattaaaagaacttgtatttctcttttttttttctttcaaccttgctctggaaccaggggtcggggggagggtggtgtctggagcttattcctttggccttggctatttggacagcgttatcttctaactgtcttcaaagtgagctactaggcagaggaaaacttgttcttttctttttaactcttgccttgccacattctgggccttagtttttacttttcttggagtgaataaatgcagtacttattattatttaaatttctgcctcaatgtagtcacttgctcagtagactgtctaggtttcttcatttgtccttgctaacagagctaatcttgccatttctattttcctcttaatgtgccctagtatctcctgttctcaaatttacattctcgtgacagttgataaggcagagaaccaaatctgccaccaaaaatctcattctcctacttttcttcctttaaccccttttccccctcactttggtacttatctttggaaggcagcaattcttatttatcatcgaaatcttttatttcctttttaaatttgtagcagaatcattcagagataaaaataagtaatcccactgaattccagaatcatgaaaagcaggaaagccaggatctcagagctactgcaaaagttccttctccaccagacgagcaccaagaagctgagaatgctgtttcctcaggtaaacgtggaataaatggtatgtcaagtaactttaaaaaccaaaattgctagaagtagccaggtacattaatttcctaggactgttgtgacaaagcaccacaactgggcagcttagaacaacagaaatttactctttcatagttctagaggctggaagtccaaaatcaatgtgtcagcaggaccatgcttctctgagactctgggtggactccttccttgcctctgactactttgcgatggctgtcgacgcttggtgttccttggcttgcagctgcatcattaccagtctctggctctgacagcgcatgacattctctctctatgtcttcttaataggacagcagtcatattggattaggatccacccaaataggccaagcatagtggctggtgcctataatcccattactttgggaagccaagtcaggaggattgcttgagcctaggagttcaggaccagcctgggcaacatggtgagaccctgtctctacaaaaagtcaaaagaatcagccagccatgatggtgcacacctgtggtcccagctactcaggaggctgaggtgaaagggttgcttgaacccaggaggttaaggctgcagtgggccatcttcataccacttcaccccagcatggacagagtgagaccctatctcaaaaaattaaaagaacatccaaatgatgtcattttaaccttaatacatctgaaaaaaaattcccatatctaaataaggtcatatgacaggtaccagtggttaggacttcaacatatcttttagggggccacaattcaacccatagcaccatgttatagaatttcttttttttttttttagacagagtcttgctgtgttgcccaggctggagttgcaatggtacgatcttggctcactacaacctccacctcctgggttcaagcgattctccagcctcagcctcccaagtagctgggattacaggctcgtgccaccaggcccagctaatttttgtatttttaatagagacggggtttcaccatgttggccaggcttgtctcgaactcctgacctcgtgatccacccacctcagcctcccaaagtgctgagattacaggcgtgagccaccgcacccggccttcctttcgctttcttttgcctactaaacctctgctcttaaaaaataaaaaataataataaataaatgaaaataaaatatctcagtattagtttcacctgggcaaatctgctagggccctgagccttgccagaggaggagttagagagactgagagaggataattcattccagtatccaccaagcagttaaatctggaatttctaatcctgagccttctcattttccctaaaactttgagtgtcatactgaatctagaaaattacaggattccttgggtctgagatgggcttgggaatcttcagtttttaacaagtctcccaggtaatttttaatttttatttatttatttatttatttatttttgagacagggtcttgctctgttgcccaggctagagcacagtggcacgatctcagctcactgcagcctcagcctcctgagtacctgggactataggcatgcaccaccacgcccggctaatttttgtatttttagtagagacagggtttcaccatgttgcccaggctggtctcaaactgctgagctcaagtaatctgcccacttcagcctcctaaagtgctgggattacaggtgtgagtcaccatgcccagccagcattttttaatacaggccagttttttgtcctctgagttggtttgtctaatatgtcctcatgcttagaatcagactatgggctgttggcaggaatcccaaagagcaatgctgttgcttcctcagtaagcaccctaggaggcacaagtgctggtttttcctatggctagtcacgttaacttccatcagttagttatggtggtgtctgctaggttgtttctttgtgaagttactcttttaccacttggaattagtaagtatcctgtggagagttactctacataaatatcctttctttgttttgttttgttttgagacagagtctctctctgttgcccaggcgggagtacagtgacaggatctcggctcattgcaacctttgcctcccagtctcaagcaattccactgcctcaacctcccaagtagctgggattacatgtgtgcaccaccatgtttttgttttttcagtagagacagggtttcaccatgttggccagactggtctcgaactcctaatctcaggtgatcggcccacttcggcctcccaaagtgccaggattacaggcgtgagccaccaaaccctgccaaatatcctgtttctcatgaaactttcaccttctggttttatagccaaagtctaagcagaagcccctgcgaccattccaacactgacagaacattcctctgccttgttttacggatacattggggaaacttaaggatgagaactttagaaatggtatttcttggaaacccacttgcttgtaaatcagtggttgaaagaaaagaaaaaaataattaaaaagagatgaaagctcattgcatatttttaaaatagattgcctgaagttgaaaaagatgtaagattgaggctttcttatatttgtaagattagactcatagctctatagcatattatacggggccctttatggtttaacccgctacctgtcctattctcaacgtcctccactccctcttatgcaccctacacttcagcaatttcagcctacctcagtttctctgaatgtcattatttccactgtactacagctttatatatcactattgttccctctgcctggaatggttcttttccatccttgcctaataaattccattaaggtcaaaaaaataaagaaacgacagaatttggaaaatgattatggtaagtgggaaaaaatacctaacctaatatataccataatttcaactgaagttaaaaaataataataataagctggctacagtggcacatgcctgtagtcccagttactcaggaggctgaagcagaagtatcacttgtgcccaggattttgaggccagctgggcaacgtagtgagaccttgtctcttcacagaagcaaacaggccaggcgcagtggcttacgcttgtaatcctaacactttgggaggccaaggtggatggatcacctgaggtcaggatcgagaccagcctgggtaacatgacaaaaccctgtctctactaaaaatacaaaaattagccgggtgtggtagctcacacttgtaatcccagctacttaggaggctgagacaggagaatctcttgaaccctggaggcagaggttgcagtgagccaagatcgcgccactgcactccatcctgggcgacagtgtgagtccgtctcaaaacaaacaaatgacaacaaccaaaataagtataggaagcagaggaccagaggaaatatgccagacgttaatggtgttttctttggctgattggattacgtgacttttatcactagttgtaacaatattatgttcataataaaaactgaaaaagtttgttttaaccgatatatatatatatatatatgtttaatttatattaaataattttttagtaatagagacggggtcagggcagggcgcggtggctcactcctgtaatcccagcactttgggaggttgaggcaggcagatcacaaggtcaggaaatggaaaccatcctggctaacacggtgaaaccctgtctctactaaaaatacaaaaaaaattagccgggtgtgggggcgggcgcctatagtcccagctactcgggaggctgaggcaggagaatggctttaacccgggaggtggagcttgcagtgagccgagatcacgccactgcactccagcctgggcgaaagagcgagactccatctcaaaaaaaaaaaatagagacagagtcttgctgtgttgcccaggctcgtctcaaactcctggactcaagccatccacccacctcagcctcccaaagtgctgggattacaggcatgagccactgcacctggccaactttctgtatttttattttatgtatttatttattttttttgagacagagtctcgctttgttgccaggctggagtagagtggcgtgatctcagctcactgcaacctccacctcctgggttcaagcgattctcctgcctcagcctcctgagtagctgggattacaggcacgccccaccacgcccagctcatttttgtatttttagtagggacagggtttcaccatgttggccaggatggtctccatctcttgaactcatgatccacccgcctcggcctcccaaagtgctgggattacaggtgggagccaccgcggcgcctgaccaactttctaatatgtttatataacttctccacaggtgtcagaaaatttctgaatgcctacttgaagcatatgacctgtaatcgtaggaatgctgtaactaattttttgtgctccctatgtgctgtttctaccaccatcttgacagagcctaccatgtgaaaatactctgttaacttacacacgtttttttttttgtttttgtttttgtttttgtttttttagaggtggagtctcactctgttgcccaggctggagtgcagttgcgcgatctcggctcactgcaagttccgcctcccgggttcacaccattctcctgcctcaacctcccgagtagctgggactacaggcgcccaccaccacgcccggctgactttttgtatttttagtagagatggggtttgatagtttataagccaggatggtcttgatcttctgacctcgtgatccacccgcctcggcctcccaaagtgctgggattacaggcgtgagctaccgtgcccggccacatatttcttaatgagaacttttttgaaatccttcattatttctgtgtctttggatttaggtaacagagattcaaaggtaccttcagaaggaaagaaatctctctacacagatgagtcatccaaacctggaaaaaataaaagaactgcaatcactactccaagtaagttttgtagacaaagccataataagtaatggttgccccacttcggaatgatgttggactgtaacagctgaaagcatagaggctggaaccagtttacattctagttctctcgtcttttaggtttgatatcttggggaacttactcatcctcaataaactcacttcctcagtgcaaagtggaaatagttatactatagtgcctatttctttcttttttttttttttttttgagacagagtcttgctctgtcacccaggctagagtgcagtagcgtgagcttggctcactgctacctccacttcccaggttcaagtgattctcctgactcagcctccctagtagctgggactacaggtgtgctccaccacgcccagctgatttttgtattttcagaacagatggggtttcaccatgttggccagcatggtctcaacttcttgacctcatgatccgcctgcctcggcctcccaaagtgctgggattccaggcgtcagccactctgcctggcctatagtacctatttcatcaggttgatagatacataaattgagaatactttttccactactgcttccctatcacggcaaatagcatgcagcaaggattcaataaacaactgatgaatcaatgtatgaactacttggtacaatatccaccttctaatgagtttttcataagtctaaatgattccgtttttgggcatgtaagtcttctctatcttatattgttggaacattgcttggcacatagaatgttgattattatatttatagtagttgcaatgctgcttatcgtatattcaaaattcaataaatgttcatatacttaatcagaataggatacagttggggtcagcaaactgttgcctgccttggcctgtcttatatcctttgagctaagagtggtttttacattttttaaagaatttaaaaacaagaagaatggccgggtgcggttctcacacctgtaatcccagcactttgggaggcccagggggctggatcacctgaagttgggagtttgagaacagcctggccagcatggtgaaaccccatctctactgaaaatacaaacattagccaggtgtggcggcaggtgcctttaaccccagctacttgggaagctgaggcaggaaaatcgcttgaacctgtgaggcagaggttgcagtgagccaagatcatgccattgcactgtagcctgggcaatagagcaagactccgtctcaaaataaataaataaataacataaaaacaagaagaatatgagacagagaccataccatatgtggccataaagcctaaaatactttttttttttgagacgaagttttgctcttgttgcccaggctggagtgcaatggcgcaatctaggctcactgcaacctccacctcccgggttcaagcgattctcctgcctcagtgtcccgagtagctgggattacaggcgtgcgccaccacacctggctaatttttgtatttttagtagagatggggtttctccatgttggtcaggctggtctcgaactcctgacctcaggtgatctgaccgctttggcttcccaaagtgctgagattacaggtgttgagccaccatgaccagccaagtcttaaatacttttatctagccctttatagaataaatttgtcagtccttgacatacagcattataaaatatcaaattcattattaaataaagaccacttgtgactaattggtaggggagaagataaatcttctactctaatcctctggattaaaccaagatgtcaatttagtgaaatttgtcagtggggagatggtgaatgtttgatagtttataagatgaatgtgctttgcccctgagtttccaaaaactaagtattttgaaattaatgttttagcaaaaattatattgaagttgaatgtcagggatgcaaagaagagaataagtgttaacagaaaaacacagagaagataaataaatggattttgttttgttattaatttttatattggaacattctagactttaagaagcttcatgaagctcattttaaggaaatggagtccattgatcaatatattgagagaaaaaagaaacattttgaagaacacaattccatgaatgaactgaaggtatgtagataaaattatgttcttaatggaactaaactgtttgattataattttgaaactatataacaccgtggttacaacaactggctgtcactctaccagtagatttgtttgaatttaatatatctttatctaaaacttgctttcccctaccctgagaattttcaaagtcctctagataaaacagtgaatccatggccaagcgcagtggctcatgcctgtaatccccgcactttgggaggccaaggcaagtggattacctcaggtcaggagttcaaggccagcctgggcaacatggtgaaaccctgtctctacaaaaaatacagaaaattagtagggggtggcacatggctgtaatcccatctactcaggaggctgaggcaggagaatcacttgaaccaggaggccaacattgcagtgagctgagatcgcgccactgcactccagcctgggtgacagagtgagactccgtctcaaaaaaaaagaaaacagtgaatcctgactatgagaaactatttccaaaatggcaatgtcattctactttccatattcagatgttttgcctattactttcattgatgatgaaccaacttatggctgaagccatcttctttccctcgtcccttatgtaaaggaaaatgggtgattaatagtggcaaacctgaagggttcctgtggtaacagctccctcgagggctttcagtccaggttccacaggactcaaagcctcctcaagtaagagaaggtgataaagtcaactctgaggctgagttagcaaagtagtgagtaacattctagcaagttgatgttattggtatctggtgttaaggcagtgccgaatggagggcaggaaacacatttttaaatatttatggatttatgtatttttctcataaagacagggtctccctatgattcccaggctctccttgaacgcctaggctcaagtgatcctcccacctcagcctcccaaagtgctgggattacaggtgtgagccaccagattatatttatttctattcgctgtatttaattcttaaccccatgtttattttacataacttccctatttctcaaaaagaatttaaggcctattctcaaaataatgtaagtttatggtattaaatataaaatagtatagtcaatttaaaagcggcagaaaattagcactgttagtaggtacagtatttactaccatcagtcactcagctgagtttaagttttctggcagctagggccaagaggaaaactcactgggtgataaattgtaaataatttaagtacttaagcttcttggtgagaagcttaattgaaataataaacattcattttaacgatgtaaaaccactgttacaaccattttttttcttttcttttcttttttttttttgagacagagtttcgctcttgttgcccagactggagggcaatggtacagtctcagctcactgcaacctctgcctccctgattcaagtgattttcctgcctttagcctccccagtagctgagattacaggcgcccaccaccacacccagctaatttttttatttttagtagagacgggttttcaccatgttggccaggctggtcttgaactcctgacctcaggtgatcaacccacctcccaaagtgctggtattacatgcatgagccattgctcccatcctcactgttaccacatttgaaggcactgtttgtcaaactttttttttttttgagactcagtctcactctgtcacccaggctggagtgcaatggtgcgatcttgcctcactggaacctctgcttcccggatgcagcagattattttgcctcagcctcccaagtagttgggattacaggtgcccaccaccacacccagctaatatttgtatttgtaattttatttattttttttagatggagtcacattgtgttgcccaggctggagtgcagtgacacaatattggctcattgcaacctccacctcctggattcaagtgattctcccacctcagcctcccaagtacctgggattacaggcaaccaccaccacacccggctaatttttgtttgtttgtttgtttgtttgttttgacacagtttcactcttcttgcccagactggagtgcaatggcgtgatcttggctcaccacaacttccacctcccaggttcaagcaattctcctgcctcagcctcctgagtagctgggattataggtgcctgccaccacgcctggctaattttttgtatttttagtagagacggggtttcactatgttggccaggctagtcttgaactcctgaccttgtgatccacctgcctcagcctcccaaagtgctgggatcacaggcataagccacggcgcccagcccctgctaatttttatattttcagtaaagatggggtttcaccatgttggccaggctggtctcgatctcctgacttcaggtgatccacccacctcagcctcccaaagtgctgggattacaggcgtgagccaccactcctgtcctcactgttaccacatttgaaggcactgtttatccatcttttttttttttttttttttgcgatgagtctcactgtgtcactcaggctggagtgcagtggtgcgatcttggctcactgcaacctgcacctcccgggttcgacagatcttgccagcatggcaaaaccctgtctctactaaaaatacaaaaattacctggccatggtggtgggtgcctgtactcccagctactcaggaagctgagacaggagaatcgcttgaacccaggaggtggaggttgcagtgcatggaggtcacaccactgcactccagcctgggcaacagaccaagactccatctcaaaaaacaaaaaaaataggccagggcgtggtggctcacacctgtaatcccagtactttgggaagctgaggcaggcggatcacctgaggtcaggggtttgagaccagcctgaccaacatggagaaaccccatctttactaaaaatacaaaattatcttggcatggtggcgcatgtctgtaatcccagctactcgggaggctgaggcaggagaattgcttgaacccgggaggcagaggttgcggtgagccgagaccatgccattgcactccagcctgggcaacaagagtgaaactccatctcaaaaaaaaaataataataatttaagttaatttaaaaaaatgtttcagccagacacagtggctcacacctgtcaatccacaactttgggagggttaggccgaaggatcacttgagccccagtgttgaagaccaacctgggcaatacagtgagactccatctctaaagaaaaaaaaagagtcaagctgctgctttctatattttgtaatatggatgacataattttctaagtaaaagttaaggacagagcaagaacgactgtctcaaccataaacgttgagtattgctctagaaaatgtgttgaataaacgaatagtttatcttactttttagtataactccagcctggtagacccatctgaatgagtttagttctaaaataacactgttcaccctgaatgtttaaggaactggcctatcagatatataacttggtatgatctctttggagactagagaattaaaaaaaaaaattacaataacttcaccatacctgagatgaagttgctcctggcacatttggggcttggtcatttagatggtgatggacagtaataagcagatatcctaaagagatcattctggccatgacagcctctctttgacttttatgataacaaaagacagacttgtttgatctagttgtcaaatggccctctaaaaagatcagaaaactatctgggtgtggtggctcatgcctattatcccacctacttgggaggctgaggtgggagggttgcttgagcccaggagtcaaagaccaggctgggcaacatagaacaaccccatctcaaataaacaaatacatatatacctacatttaattaatttattttaattaatttatctatttatttataataaaaagattggaaaacttgtattccaaggtaccttatatagttataaatctctatattttataattggctatttttatgcagatttgctttttctcaattattattcttatttatctatattaatggtatatattatctgttttaagtacttttctattgtttatcttttttttttttttttgatacggagtctcgctctgtcacccaggctggagtgcagtggcatgatctgcaatctcagctcactgcaagctcctcttcccaggttcatgccactctcctgtctcagcctcctgagtagctgggactacgggcgcccgccaccacacccggctaattttttttttttgtatttttagtagagatggggtttcactgagttagccaggatggtctgaatctcctgacctcgtgatctgcctgcctcggcctcccaaaatgctgggattacaggcgtgagccaccgtgcctggccccattgtttaccttttaactagattaatagtatcttgccttgtggaagatttttaattgtagttatatttatccaactcttccttttaaggcttacttttttgtcatgcttagaaaggtcttgacttcagctactcaggaggctgaggcaggaaaaatgcttgaagcccgtaggcggagattgctgtgagctgagatcgggccactgtcctccaggctcagtgacagtgagaccctgtctcaaaaaaatgtatagacatatatacttatatatatggctgggcacagtggctcacgcctgtaatcccagcactttgggaggctgaggtgggtggatcacctgaggtcaggagttcaagaccagcctgcccaacatggcgaaaccccgtctgtactaaaaatacaaaaattagccagacgtggtggcagatgcctgtaatcccagctgctctgggtgctgaccaggagaattgcttgaactcaggaggcggagattgcagtgagccaatatcacgccattgcactccagactgggcgacagagcaagtctccatctaaaaaaaaaaaaaaaaaagatcttgcctgtctgtgtgtgtgtctctctctctctctatatatatatacaatttttatataaaattatatacatatatatatatttttttagacagagtctcaccctgtcacccaggtggtaattcaatggtgcagtgatggttcactgtagcctcaacctcctgggctcaggtgatcctcacacctcagcctccttagtagctgggacaatagtcatgcactactacacccagctatttttcagttttttgtagagacaggcctccctatgttgtccaggctggtctcaaactcctaggctcaagcggtcccccctcttctgcctcccaaagtactgagattataggcatgggccaccagattatgtttatttctagtccctgtatttaattcttaacctacatttttatttttctaaatattaatttcaattgtcatatctcagttgacaggcaataaagttaattttttctgcttgcaacagatgttagactaatgataataagatattcaattactctttgtgccttgacaatatctaagacagataccctaagtgaaacccttcaagcatttatttccttccctctttttgttttttgttttaaaggacttcaaaaagctattgtttggggatagagggagaggatagaattatttgtagattccacatgttaaatatataataggttctttaggtttgtttttgtagagacaagatctcctaatgttgcccaggctggtcatgaactcctgggcttaagcgatcctcctgcctcagcctcccaaagtgctgagattgcaggttgtgagccactacacctggcctaagtttatatttaataaactgtatataacgtctcaaagcttccgtatttccaaaataatctttttttcttcctttgtggctacaagggactgtttttctacattatgtctctagttagaaaatgtctggctaggctgggcgtggtggctcacacctgtaatcccagcagtttgggaggctgaggcaggcagatcacaaggtcagcagttcaagaccagcctggccaacacagtgaaaccccgtctctactaaaaatacaaaaattagtcgagtgtggtggtgggtgcctgtagtcccagctatttgggaggctaaggcaggagaatcgcttgaacctgggaggcagaagttgcagtgagctgagaccatgccattgcactccagcccaggtgaaagaaagagaccccgtctcatttaaaaaaaaagaaagaaagaaaagataatgcccagatagctgggcacagtggctcacgcctgtaatccaaacactttgggacaccaaggcaggcagatcacttgaggtcaggcatttgagaccagcctggccaacatggcaacatcctgtctctactaaaaatacaaaaattagctgggcatggtggcaggtgcctataatcccagctactcagaaggctaaggtgggaggatcgcttgaacctggaaggtgaagattgcagtgagcccatattgtgccactgcacttcagcctgggcaacagagccagactctgtctcaaataaaaaaaaaaaagaaagaaaatgcctgggtccatagcagccgggaaaggctttcttgtaactccttactcagcctcaactggaaattgctctttataacagaatccccatagcaataaatggcaggtaactgtggagccagccagacaggtagaataggatgaggtgaggtagtgaggaaagaaaagattccaaatggagttacaaatgaggaatgaaacagggataaatggaaacgctcttctgaactttgcctaggagacaatactgtatcagaggccaagtctttttgtttgttttttgtttttgttttttgagatgtagtctcgctctgttgccaggctggtgtgatctcggctcactgcaacctccgcctcctgggttcaagtgattctcccgcctcagcctcctgagtagctgggactataggcacatgccacaacgcccggctaatttttgtatttttagtagagatggggtttcaccatgttggagaggccaagcttttaaaatgatgcattttctcttcagcagcagcccatcaataagggaggggtcaggactccagtacctccaagaggaagactctctgtggcttctactcccatcagccaacgacgctcgcaaggccggtcttgtggccctgcaagtcagagtaccttgggtctgaaggggtcactcaagcgctctgctatctctgcagctaaaacgggtgtcaggtaaagaaatcactccaaaatgtaatcatgaacaagatttcacatggactatataaaaaaaaaatttttaattggcaaataatattcgtacatactcatagggtacatagtgatgtttcttttcttttctttttcttttttttttttttgagatgaggtctcgctctgtcgcccaggctggagtgcagtggcgcaatctcagctccctgcaacctccgcctcccaggttcaagtgattcttctgcctcagcctcccgagtagctgggactacaggtacgtgccaccatgcccggctaattttttgtatttttagtagagacgggctttcatcatgttagccaggatggtttcgatctcctggcttcatgatctgcccacctcagcctcccaaagtgctgggattacaggcgtgagccaccacgcccggcccatagtgatgtttcaatacatatattgtattgtagtcagatcagggtaattagcatatccatcatctcaaatagttatcattgctttatatttagtatcctccttctagctgtttgaaaccaccatgcgcagctaatttcacaaggtctcactacgttgtccagtctggttttgaactcttgggctcaagtgatcatcccaccttggccaaccaaagtgctgggattacaaacgtgccattgcacccaacctttctttttttttcttttttcttttttttttttttcttcattcagagtctcactccattgcccaggctggagtgcagtgacgagatcttgactcactgcaacctctgcctcccaggttcaagcgattctcagcctcccgagtggctgggactacaggcacgtaccaccacacccggctaagtttttattttagtagagacggggtttcaccatgttggccaggctggtcttgaactcctgacctcaggtgatctacctgccttggcctcccaaagtgctgggattacaggcatgagccaccgcgcctggccgcacccaggtatatgtacctcttaaatttctcattcaaatcatgaattgttttcctgatttcattgacttgtctgtattctcttgtgtatctcactgagttcccttaagattattattttgaattctttttctggtatttcatatatttccctatgaatagggttactggagaattaccatttttctttgaaggtgacttgtttccctacattttcatggtttatgtgtccttgcattgatttctacacatctgttaggaaagtcacctcttccaattttatagaggaggtttcatagggaagaacatactcatatgaataggtcttagcgtgtcatttaagtggggtgtgttggccttggttctaagtgggtacaggaatatagtctctgtgtagtttcttcagctgtaatgcattttagtggcatttgtaagtctctcagtagcctaggctaagagagttggtggtgatggtggctttgccaggtttgggaccgtggggctgtttctcagccctggtatgcagttgcatggctgcttggctggccttcgggcatgtctaccagaggctgcttacaacgctgcctctcaggcccttactaggagtacaggggcgttgagcaggtcaggggcttctctgcaggggtgaggcatctcatggctgtttctcaggccctagccacaggcacatagccactcagccagcatcagagtatgtcagctgcttgagagtctctcccgttccagggagggcatgtggcagtttggccagctcaagggcaggttcgccttgagcacatctgcctaggctccaagcaactggggtcatggtgttgcagccacccctaccaagcccctgtgggcttggtagaatgaatattgagccctagtaatggatacatgcagtggccactggcccccagcagagcacagtgcactccagaagtggctctggtctgaagatggttctgtgctgcagaagctagtggcgggtagataatgcacaccttgtgctcctaatccagggcagtgtagctgcaggaattcctggcaactctccaaactgggagacttgggtattattagacttgggtattattagacttgggtattctcccgtagtaaggactgtaggtgcttgcagtagcaatgggggctggtggggatcttcagtttagtgtttcttcacaacaggaatcccctcctgactgcgggcagatctgattctggtagaggagacagggctgcagaggctagatgcctctggaggccctcctgggcttccattcaccacaggtgcatctccactcccctgatgcactccagtgctttcccattgacactccagtcaaatcttagcttttttctgtggtggctcccacctgtaatcccagctactcaggaggctgaggcaggaggatcatttgagtccagaagtttgaggccagcctgggcaacatagtgaaagctgtctccaaaaataaaattctaaaaatcttagctgtttatttgttgcctttgtcctttcttgtggggggatgaatgccaggcatctctagtcagccatcttgctgacagcactctgaaatatgtgttcttttgcttttgtttctgttttgtagagatgaggtcttgctatgttgcccaagatggtcttgaactcctggcctcaagcgatcctcctgcctcagcctcccaaagtactaagaatacaggcataaaccaccatgcccagtcagatattcttcattttattaatatatgactgccaagatgcctaaggagaaacttttccattgacttaaatatagaagtgaagctaaatgcttacagaaagtatctcattacagtgaactgaaaaattaactcttcctcaaataccaatatcgtaacctagtgggaactacagtatcatcactatctcatgccccattgatccctgtttttgtttacttgtaacttttctgacatcaaagtcaccttcagtgggactttccccatagatcaaagtcttcagattacttctaatatcaaaactttattttctacttttttaaagacatttgcagtatctaatagaactggtgcatgacagcccttctccaacatgtgcaattatctaacataattgtattttttattttattcttttttttttttttttttttttttgagacagtattgctctgtcacccaggctggagtgtggtggcgcaatctcggctcactacgacctccatctcctgggttcaagcaattctcatgcctcagcctcctgagtagctgggactacaggtgtgtgccactacattcagttaattcttttttttgtttgtttgttttgtatttttagtagaggtagtgtttcaccatgctgaccaggctggtctagaaatcctggcctcaagtgatccacctgccttgccctcccaaagtgctgggattacaggtgtgaaccaccacacctggcctattctatttttgagacaggatcttgctctgtcacccaggctagaattcagtgacacagtaatggctcactgcagccttgacttcccaggatgaagcgatcttcctgccttggcctcccaaagtactgggattataggtgtgaaccatctcacccagcctgcccatgttttaatcagattttttttttcctgttcctccaatgtagtttttcaaacttaaaaatggctttaagtttagaattctatttattgaattagcttggaatatgaagtacctgtaattggtggttctgatttcatttaagaacaccatggtccaggtgcggtggctcacacctgtaatcccagcaccttgggagcccgagttgggtggatcacctgaggtcaggagttcaagaccagccatgaccaacatggtgaaacctcgtctgtactaaaaatacaaaattatctgggcatggtggtgtgcacctgtaatcccagctacttgggaggctgaggcaagagaatcgcgtgaacccaggaggtggaggtttcagtgagccaagatcataccattgcactccagcctgggcaacaagagcgaaacattgtctaaaaaaaaaagaacaccatggtcagaggtttggcccttgcttcactgaaatgtacaggtgggtctggacttcacaccataagataccattaattgaatgaaggctcattgttattttatgaaccattaagacaaattagaccaggcatggtggctcacacctgtaatcctagcactttgggaggccgaggcgggcagatcacgaggtcaggagttcaagaccagcctggccaacatagtgaaaccccgtctctgctaaaaatacaaaacaattagccaggcatggtggcagtcgcctgtaattccagctacttgggaggctgaggcaagaagaattgcttgaacctgggagccagaggttgcagtgagccgagatcacgccactgcactgcagcctgggtaacagtgcgagactccatctccaaaaaaagaagaaagaaagaaagacaaatcagccaggcgcggtggctcacgcctgtaatcccagcactttgggaggccgagacgggcggatcatgaggtcaggagatcgagaccatcctggctaacacagtgaaaccccgtctctactaaaaatacaaaaaaaatagccgggcgtagtggcgggcgcctatagtcccagctacttgggaggctgaggcaggagaatggtgttaacccaggaggcggagcttgcagttagctgagatcgcaccactgccctccagcctgggcgacatagcgagactccgtctccaaatgggtgaatggttgaagcccaggagtttgagagcagcctggccaacatggcaaaaccccatctctactaaaaatataaaaattagctgggcgcggtggctcatgcttgtaatcccagcactttgagagactgaggcaggcggatcacctgagatcaggagtttgagaccagcctgaccaacatggtgaaaccccatctctactaaaaatacaaaattagccgggcatggtggcgcatgcctgtaatcatagctactggggaggctgaggcagtagaatcgcttgaacctgggaggcagaggttgcagtgacccaacatcgcaccattgcactccagcctgggcgaccgagcaaaactccatctcaaaaaaaaaaaaaaaaaaaaaaattagccaggcgcagtggcacatacccatagtcccagccactcgggaggctgaggcaggaggatggcttgagcctaggaggcagaggttatagcaagctgagatcataccactgcatgccagcctgggtaatagagccagaacctgtctcaagaaaaaacactaccaattaactattgacatcttatgaattgtaaaaacacatcccaatttcagagatgttaaaatgtagaaaaaatactatcagtcaatcaatcaaatacatttgtggcaatttgccatatgtaaagaatggtaaagaatgggcttatttctctaccacacaaatgaatgacattcttttaggaacatacaagacctgttctcaccactcacctagcatagcagtcttctgctacctgtgacttcccctaacctggaggaggaggaggaggaggaggaaggggagcttttggcttgcctcttggactataatgaggcctccacacctattcctccatcaccatcattgtccaaggcagggagagcagaaaagacaagaacatattttacaaataatgttagttgatatgtgatttaatttagcattagccttttaggaatatgtctcttctgcaaaagaggttcgttcctatgacaattattaattgaggcccttttcactgcttgctaatagtcaagtggttttatttataagctagacacaagttactcttgccacagtactcatgtcttgtactctgctgtcctatttaggttttcagctgctactaaagataatgagcataagcgttcactgaccaagactccagccagaaagtctgcacatgtgaccgtgtctgggggcaccccaaaaggcgaggctgtgcttgggacacacaaattaaagaccatcacggggaattctgctgctggtaaaaaaaaaaaaaaacaaaagaaatctgtttcatttttaagccatgtaacttcccaaaatgattaggtatatctgttttttttgtttgtttgtttttttctgagatggagtttcgcttttgtcacccaggctagagtgtaatggcgggatctcggctcactgcaacctctgcctcccaggttcaagcaattctcctgcctcagcctcctgagtagctgggactacagacacatgccaccatgcccggctaattttgtatttttaatagagacagtttcaccatgttggtcaggctggtctcaaactcctgacctcaggtgatccgcccgcctcggcctaccaaagtgctgggattacaagcgtgagccactgcgcccggcctgtatctgtttccttaaaccctttccatttctataatcaaaagcaaaaattttaccatagtgtatttttaattgtgtactagtgggggaaatgccagagacataagcaaaaaccagatatctgcctgagagctccatctaatcctaaaatggtgaccctccaggaagggcactgtgccccttgtgggactcagggattcggaggatgagcacagtattcgttgcagcctcggaaaggtcctggaggactctgacactaacaggatcccagaccacagacttcatgtttcaagattcaaccatgttgactcgttttcacagtatttttcagtggtgtgggtatatgtcagtttatctattttactattcacgaacatgtgggtggttccagcttccattattatatatgatgttgctatgaatactcttaaacatgtctcctgtacatgtgcaagagtttccctagacctaggagcaggacagctggattggaaaatatgcagacatttactgtcctgaatgaattgtaccaatctgtgcttccagtggcagtgtatggcagtcccttgttctactccctgtcagcatttgatactgatacagtgggatagcttgaacacagggttttgtgcttttttttaactaagtggtcttagatcctgattgctgtttcacagatgtaggcaagggttcacatttggcaatgacctgtggcttccccctatgaaaagaaaggattggccggacgcagtggctcttgcctgtaatcccagcacttagggaggccgaggtgggtggatcacttgaggtcagaatttcaagaccagcctggccaacatggtgaaaccccaactctactaaaaatacaaaaattagccgggcatggtggcatgcacctatcatcccaactactcaagaggctgaggtaggagaatcgcttgaaccaggaagcagaggttgcagtgagccgagattgtgccactgcactccagccagcctgggcaacacagtgaaaccctgtctcaaaaaaaaaaagagattgggagagaaaggattaactgatggccaactgtagcaaaaaggctaactaaactacaccatccttaggctgggcatggtggcatggagaccaacctggccaacatggcaaaacctcgtctctactaaaaatacgaaaattagccgggcgtggtggcacgcgcctgtaatcccagctactcacttgagaatcacttgaacccaggaggcagaggttgcactgagctgagatcacatcactgtactccagcctgggagacagagcaagactccgtctcaaaaaaattaaaaaaaactacaccatcctggatatttttaacttcgtggtgcaaaaattcatattctttttttttttttttttttgagacggagtctcactctatcacccaggctggagtgcagtggcaccatcttggctcactgcaacctccgcctcctgggttcacgccattctcctgcctcagcctcccgagtagctgggactacaagtgcccgccaccacgcccggctaatttttgtatttttggtagagacagggtgtcaccgtattggccaggttggtcttgaactcctgacctcgtgatccgctcacctcggcctgccaaagtgctgggattacaggcatgagccaccgcgcccagccaaaaattaatattctgaagtgataagagcccttattaataatattcctgactttaaacaatcctcctgcctcagcctcccaaagtgctgagattacaggtgtgagccatatctgttatcagggaaataagctgaaaagttaccgtcatttccttcaacagaattctaaactcccagctgatcctaggatcccagcactttgggaggccaaggcaggtggatcatgagttcaggagattgagaccatcctggctaacacactgaaaccccgtctctactaaaaatacaaaaacaaaatattcagaacatttacaaagctgcttagcaaaggaaattaatctcaatggttagctttcctcaattattgttttccccttttctccattttaacccttatttcagactttcatctatttcagactattcatgtagattgtcttagtcctttgcggctgctattatataacaaagcaccaaagactgtatcttataaacagcggtaatttctttctcatagttctggaggctggatgagggcagatcagggcactagcatgattctggtgagggctgttttccaggtagcagactaccaacttcttgttgtatgctcatgtggcagaaagagagctagagaaaattctatggggtccctatataaggccctgaatcccattcatgacctatttacctcccaaaggccctacttccttacaccagtcatattgacagttaggatttcaatatgaatttgggatcgcaggagatacaaacattcaagctataacttttttctttttttgagacacagtctcactgtcgccaggctggagtgctgtggtgcaatctcggctcgctgcaacctccgactccctggttcaagggattctcctgcctcagcttcctgagtagctgggattttgggcacacgctgccacgcctagctaatttttgtattttagtagacacggagtttcactatgttggccaggatggtctcgctctcttgacctcatgatccacctgcctcggcctcccaaagtgctgggattacagtcgtgagccactgcacccagcttcttttttttctttgtttgtttcttttgtttttttgagatggagtcccaccctgttgcccaggctggagtgcaatggcgcaatcttggctcactgcaagctccacctcccgggttcaagtgattctcctacctcagcctcccgagtagctgggattacaggcacgtgccaccacacctagctaattttttttttttccctctctgagatggagtcttgctctgtcaccaggctggagtgcagtggcacgatgttggctcactgcaacctctgcttcccggatttaagcaattcccctgcctcagcctactcggcatgggactacaggcatgcaccaccacgcccagctaatttttttttttttttttttttaaaccaagtttcgctcttgttgcccaagctggagtgcaatggcgcaatctcagctcaccacaacctccgccttccgggttcaagcaattctcctgcctcagcctcccgagtagctgggattacaggcatgtgccaccaccctggctaattttgtatttttagtagagatggggtttctccgtgttggtcaggctggtcttgaactcctgacctcaggtgatccacccgactcggcctctcaaagtgctgagattacaggtgtgagccaccacacctctagataattttttgtatttttgtggagacagggtttcaccatgttggtcaggatggtcttgatctcctgacctcgtgatccgcccacctcggcctcccaaagtgctgggattacaggtgtgggccaccatgcccagcctataacgtgtatttttaagattgagaagtaacactttgataaacactttaccaggtctttgtttctaattaagctcttgggttttttcggtgtgtttttagttattaccccattcaagttgacaactgaggcaacgcagactccagtctccaataagaaaccagtgtttgatcttaaagcaagtttgtctcgtcccctcaactatgaaccacacaaaggtatgtgggagtgttttgagctacagggcctgtaaaatacttaagattggtgggacgcagtggctcacacctactaaacatacaaaaattagccaggcgtggtggcaggcacctgtaatcccagatacttaggatgctgagacaggagaatcacttgaacctgttaggtggaggttgcagtgagccgagaccgtgccactgcactccagcctgggcaacaagagtgaaactccatctaaaaaataaaaataaaaaataaaaacttaagaataaacaaattctgcggccgggcgcagtggctctggcctgtaatcccagcacttttgggaggctgaggtgggcagatcacttgaggtcaggagttcgagatcagcctggccaacatggtgaaaccccgtctcttctgaaaaaaaataagaaaattagcctggcgtggtggcggcgcctgtaatcccagctacttgggaggctgaggcaggacaatcgcttgaacctaggaggcagaggttgcagtgagccgagattgcaccactacactccagcctgggtgacatagtgagaccacgcctcaaaaacaggctgggcgcggtggctcacgcctgtaatcccagcactttgggaggccaaggcaggcggatcatgagttcaggagatcgagaccatcctggctaacacattgaaaccccgtctctaccaaaaatacaaaaacaaaattagctgggcatggtggcgggcgcctgtagtctcaactactcgggaggctgaggtgggagaatggtgtgaacccaggaggtgaagcttgcagtgagccgagaccacaccactgcactccagcctgggcgacagaacgagactctgtctaaaaaatttaaaaaataataataattaaatttaaattaaaaaaaaaagcaacacataaacttcaagaaatttggtcccagttctttttgtaaaattgcaaattggttggacacagtggctcatgcctgtaatcccagcactttgggaggccaaggcaggcagattgcttgagaacaggagctcaagaccagcatgggcaacatgatgaaaccccgtctctactaaaaaatacaaaaattacccgggcatggtggcatgtgcatgtagtcccagctactcatgagtctaaattgggaggatcacttgagcccaggaggcggaggttgctgtgagctgagatcagatcacaccactgcactccaaactgagcgacagagtgagattctgtctcaaagaaaaaaaaagtataaatgttgatagcaggtaaccccacagatgaagagaatgaagttgggaatataaatcaaacaatctttttaaaattctttgtctctgtcctaaactaggaaagctaaaaccatgggggcaatctaaagaaaataattatctaaatcaacatgtcaacagaattaacttctacaagaaaacttacaaacaaccccatctccagacaaagtaagtacataattatccagctttataattattttaatttcaaaagcagcacctctgagggataggggctcagtaatagtggtgttttaagaggaggttagaagtggtattatggccgtgtgcggtggctcacgcctgtaatcccagcactttgggaggccgaggtgggcggaacacgaggtcaggagatcgaaaccatcctggctaacacggtgaaaccccgtctctactaaaaatacaaaaaattagctgggcatggtggcgggcgcctgtagttccagctactcgggaggctgaggcaggagaatggcgtgaacccaggaggcagagcttgcagtgagccgagatcgcgccactgcactctagcctgcgtgacagagccaggcgccgtctcaaaaaaaaaaaaagtggtatcatgggccaggcacggtggctcacgcctgtaatcccagcactttgggaggccgaggggggcagatcacgaggtcagatcgagaccatcctggctaacgcattgaaaccccatctctactaaaaatacaaaaaattagccgggcgtggtggcgggcgcctgtagtcccagctactcgggagactgaggcaggaacctgggaggcagagcttacagtgagccgagatcacgccactgcactccagcctgggcgacagagtgagactccgtctcaaaaaaaaaaaaaagtggtatcgtgtatataactttctgagtacatctgcctaggttccagtgtaatggactccaaatcagcagatttggggtgaggcccaagcacctgcattgtttccaaggctctgcaggtgattcagaagaagacccagattcagagcactgctcttgcatgactcatctgcctaaacacagggcatgtgggtatctctccagataccaatgcccagcagcccagggcacctacatatccagatagacataaattcctcactcctaagaaaaccaggcttacaaggcgtcaaggccctataaagaggaaaaacccaggacggtccttagaggcttccttcagcatgaaaaccaagttaaagccagagctcatcctgggttgcagcaagtcatggttgggcccagattccctgcttggaccctcgtgacacagggttacctgtcagttgactcatggctatacacgactgccaccagggcctttgctcaccgttattaagttggccaggcaaggtggctcacgcctgtaatcccagtactctgggaggccaaggcgggtggatcacgatgtcaggagttgaagacatggagaaaccccatctctactaaaaatacaaaattagccgggcgtggtggcacatacctgtaatcccagctactcgggaggctgaggcagcagaatcacttgaacccgggaggcggaggttgtggcgagctgaaattgcaccattgcactacagcctgggcaacaagagcaaaactccgtctcaaaaaagaaaaaagaaatcaaagtcaaaggtcaagctcaaaatcacatagtttagtgaaaggaatagaactagaaccaggatctactgagttagccattatgctctactttcagaggattagacaaaccaaaaaaaaaaaagaaaaagcccaagattatattaacttatcttggtttttttttttttttttttttttttttgagatggagtctcgctctgatgcccaggctagagtgtggtggtgcgatcttggctcactgcaacctctgcctcccaggttcaagtgatactgctgcctcagcctcccgagtagctgggattacaggttcccgcccccgcgtgcagctaatttttgtatttttagtagagacggggttttaccatcttggccaagctggtctcaaactgctgatctcaggtgatccacccaccttggcctcccaaagtgctgggattacaggcgtgagctaccacacctggtcaactttgatttctaggtgtagacatttctcatttaaaacaaatttttttttttttcttagagacagggtcttactttttgtcacccagactggagtacaatggcatgatcatagcttactttggccttgaactcctgggcacaagggatcctcccaccttggcctcccaaaatgctgggattataggtgtgagccactgcatctggcctaaagcaaactgtaaaataacaagagttggattcaatcagcaaggtgtctcctgactccaattccatgcatgattttattatttatttttgtttgtttgttttgagacagtctcattctgtcgcccagtctggagtgcagtggcgtgatctcggctcactgcaacctccgcctcccgggttcaagggattctcctgcctcagcctccccagtagctgtgattataggcatgcaccaccacacctggctaccttttttgtatttttagtagagacggggtttcaccattttggccaggctggtctcgaactcctgacctcaagtgatctgcctgccttggcctcctaacgtgctgggatttcaggcatgagccatcgcgccccggcctccatgcatgattttagagtgctgagttaacaaaaggaaaataccagtttctaaccctttaacacaacaatgacgaacaggtgttagaaacactaggcagagcacagtgccctctaagagtctgttttacacaagtatgctggatgtcattgcttggaagtttgggtgttagtccaacaatagttgctttaaagtatctgttttggagcctccctagagcttaatgtgtgacctatccctctcagggaagagcaacggaagaaacgcgagcaagaacgaaaggagaagaaagcaaaggttttgggaatgcgaaggggcctcattttggctgaagattaataattttttaacatcttgtaaatattcctgtattctcaacttttttccttttgtaaattttttttttttgctgtcatccccactttagtcacgagatctttttctgctaactgttcatagtctgtgtagtgtccatgggttcttcatgtgctatgatctctgaaaagacgttatcaccttaaagctcaaattctttgggatggtttttacttaagtccattaacaattcaggtttctaacgagacccatcctaaaattctgtttctagatttttaatgtcaagttcccaagttccccctgctggttctaatattaacagaactgcagtcttctgctagccaatagcatttacctgatggcagctagttatgcaagcttcaggagaatttgaacaataacaagaatagggtaagctgggatagaaaggccacctcttcactctctatagaatatagtaacctttatgaaacggggccatatagtttggttatgacatcaatattttacctaggtgaaattgtttaggcttatgtaccttcgttcaaatatcctcatgtaattgccatctgtcactcactatattcacaaaaataaaactctacaactcattctaacattgcttacttaaaagctacatagccctatcgaaatgcgaggattaatgctttaatgcttttagagacagggtctcactgtgttgcccaggctggtctcaaactccaccaaatgtacttcttattcattttatggaaaagactaggctttgcttagtatcatgtccatgtttccttcacctcagtggagcttctgagttttatactgctcaagatcgtcataaataaaattttttctcattgtcata

SEQ ID NO: 40 - DNA, 63969 bp, Homo sapiens
ctcggcgctgaaattcaaatttgaacggctgcagaggccgagtccgtcactggaagccgagaggagaggacagctggttgtgggagagttcccccgcctcagactcctggttttttccaggagacacactgagctgagactcacttttctcttcctgaatttgaaccaccgtttccatcgtctcgtagtccgacgcctggggcgatggatccgtttacggaggtgagtgagtttgcgggtgcagccagccatgacccaccgctctaggcccccacccaccttcctctgtcaacctctgggcgaacccccaccgggcggagggcgcgtgtgtgcgcgcgtgcgcagtgtgtgcgggccggggtcgccgcggctgcggcctgctgtggttggtgggttcctctgagattttgttgtttcggtcctacagataaaactcagggaggaaggctttgagtctgtcctaaaaggctgttgcgagaggtctttcagcccccgtttttaccatgtccctctgcagtcctggcgcagcaagagtgaggcgcaggcctgcggaacgggtcctgctggaagcagctggaatgccctgcagggcggggtccggggccggtgactcagtgcggctgccgccgggaaaggcagtaggatgtgtgatttgcggagttcacgcagcccgcaggggagatgctaatgaaatgacagcaaaacgttaaaataagcaggtgctagaaaccactgcattcgttcataaaaagccagtagttccttgagatcccattgttcagctaactaacgaagaagttcatacccgggactgaccattttaattgaaacaatgcaagtgtaccgagcaaaactatcagctcacgattttagagcaaagaaataaacttttcggtgtttctggggcatatcattacagtacttatttcatcttttgttcctttgagattgcatatgggttacatggttattgtgtcgatttctctagttttagcttttgtggagaatgtgcgttgtcacattcaggagtgttttgttgccagttgtccactctcttttattccaggacagttcctctttctttaggctgttgtgcaaatttcaaactgttagtttttgagtgttgcaaagtggacctaaaactgtttacactgattcaaaaacttaaatgctgtgaagagtggtaattctttcggggagatgtaattataattctataagttatgtatgagatattaattacagatttcagcaattagagtttacttatattcaagcatgacataatctatttttctgtttcaaattcttaatcatcttgggacaaatacatcaatttttttcaccttccttaaaggttctaatagaaaaatctagagcctatttttgtattagccttaaaatagggctggtcatgcaccaagtatctttcacttacactgaggtcgaaaagcgtgtatttattttatctaaactagaatacgattccttaaaacattagccctatgtgtcttcctaagtaacagacaggaacaaagcatttttaagttggctgaaaattgcacttcattttacttaaaaatgtcattctgaaggtagtacaaatctcaactgaaagaaactttacctgtttagatcgttttaggatgtgctcagaaatatgtatggtttatattatgaaaagttagatcacttgcagttggaaaaacagcttagacgtcttttccttaataggtaatgaatgaactacttgaattgattccaactcttgggtgcttaattatagcattcataacatttgcacagtgaaatgagctactggtacagttgtctatcaactgaaagtcagtataaaatgactctctcaaccagggtttcctctcagaaccatggtacacaggaaaattgagagactattttctcaattctcccaaggataattcaatgccaccctacaaacataggaaataagtctatcatattaacgccagcgtattagggcttaattattttggtaactccagttgagaaaggttacaatcatggtaaactctcttttcctcaaacaagactgttctgcattggtcttcctccctgtggtcgctgatactgttctggcactctttttttttttaagacggagtctcgcagtgtcgcccaggtgacaaaaccataaactcactactcataacgtcaagagtttgaagctctactcacaggtgatagtcatcccagtacaagaatactacaaagaaacccagagtgaagtgtaccaatccagaactttctttataaaaaccttaaaagagaaaaagctataattaaaatacttcacagaagcatattttattgtagacgctttagatccttttatgtctgcaggctgcatataaataagtatgcaaataaacatgccactaccatttttagtggaatttctcttattttccagaattaaatgaagttccctggggaagagctgctagagcatattgaaaataataagaagttaatttatattgagtctactgtgttaaagaaggcaaggaaattagtaaaatctcctagaaaaatttgtcagagatgactttggggtgtatgtggcaaaagttgttcagggactataagcttcagttacctgagattcatacatgtgggctatcctacttcttgaatatgttattgcagtggtttttttttttttttaatgcctacactgtttgagaaaggtgtgatatttcaaggaatataccttgtatttaaaagagttttaaaattcctgatatactattataaggaacggctacttacatttattgagctattgagtttatatatttaagatatataatttcttttaatttaataacctttggtgtttatagctttacttcacagattagggatctttttttgtgtatctatttaatttttttttaatctgggaatttttgaatctaatgtaagcaatagaacattcatatacgtttgaatgacaaaatcacattcttttgttgtgacctactgctcatggtaactgaagctgtactgactcacaaatgttctaactgaccagaatggaatgtgggcatgtccacgaatgaatataattaggctagtgttgtatctgggaagtgagagatatagcaattgaaaaattacaaatttattaatttagaaaggagacattatttcttttttcttttttcgtttttttttttgagtcagagtctcgttctcgcccagactggagctcaatggtgcgatcttggctcggtgtcacttctgcctcccaggttcaagtgattcacctgcctcagcctcccaagtagctgggactacaggcatgcaccaccataactggctaatttttgtatttttagtagagatggggtttcaccgtgtttgccaagctggtctcaaattcctagcctcaagtgatccgcctgccttggcctcccaaagtgctggaattacaagcatgagccactgtgcccagcagagactttcttataaaggcttacagcctacagtgtggccatcctgacaggctgggaaacatatttaatagcttcgggcagagactggaaacaggcacttcaagagaggagaagctggaacagggatttatgcctaaagggttagccaggtatacatattcaacaggttataggcagagctatgagtatttacaaaggggtcctgatgggtgggtactgaacaaacgtgcagttacatgcatcccatgttcactttgggatgaagacttaacgtggaaatacattacagttgggccctatatgtcaaaaggtgaggtggggacatgaaggcattcaagtgagcagcctctgtaaactggccagaatcagttcatggttggtggtcttcttactgagatagatttattgaaatcaatctcttgtccaattaaagctgtagctgtagcttgtggagcaggagggttagtcagtgtctgatggaagatgagctgcaattgttttaatatttattgcttatctcaaggtcagtgcttgttcagctactagagtaaaagaaaaactttggcagttagaagatagtttattttttaagtgtagggagtttgtgacttaacccttgcctggcatggccttaggtcctagttatttgtttacagacagggtctcactctgttacccaggctggagtgcagtagcgatcacagctcactgcagccttgaactcctgggctgaagtaatccttttgcttcagccaccccaccccccaggtagctgggactacagatgtgccccaccatgcctggctaacttttgtatgttttgcagagacaggatcttgctttgttgcctaggcttgatcctgtttataatttgatatcttattgctacaaagagtcttctgtcagtcttatgatctctatttaacattaatgctcatcagttattgtgtttaaacagcaaaaggaggggtataacaaggtgcatgcggcctcctgttccatcatggctgagaactcggtttttaaggtttctctggggtccccttcatcaagaggggatctgttcagttggttgggaggattagtattttatttttagttctcatattgtatcatggggggaaattatcggacatatatggatttgtgaaacaatatgcttattcttgaatttgttgaaggacttttatttagcgggtgaaggtcttgtattttggaagccatttggttcataaattattttttcagtgattagagcatttcaatttagtgtcacttttttcaatgaactttaaattagaaatcattcttaagaagagtagagagtgtgccttctttcaaatttagctcatatttcttttacatactcagatttttaaaaaattgttactgtattttaaggaattaaaaagagtcaaatggaatttaatttttcagcctgcactaactactgtatctgagtatgcaaggcagtaataataatctgcatacctcctttagttgtgtgcatttgaaagaaaatgaattgttttacagggtcttgtgtttgagctttactaaaattgacttaaaaataggaacatcagttgatttggagtagaaaggagtattcatgactttatggaatggctaagatttcaatttaaaaccattttattatatgttaatatttagttaaataaaacataagattattttgtttttctttcctcttaggaagtgttttatgttttcaaaggactaatatgttatttatctcttgctgcttaccaccaccccagattttagtggctctattagttttgctgctgtaacaagttatcacaaatttagtggcctaaaataacatattcattattttacagttctttagagacagggtctcactctgaaatctgaaatggattttactgtgttaaaatcaacatgtcagtggaattgtgtttcttctggaggctgtaggggagaatctgtttcctaacttttcttgtttctaaaggccatctgtatttcttggcttgtcctgttcccccatcttcaaagccaaaaatcacattactctgacctctgcttccatggtcatattttccctgactctgatcttcctgcctctgtgttttccatcataaggacctttgtgattatgttgggcctgaccagataattcaggattatctccatctaaagattcttaatcacatcagtaaagtctcttttgctctgtaaggcaacatattcagaggtttagggtattaggacaaaaaatctttgagggaccattattttgcctaccatagtggcttaaaacaatactcttatttctcatgattcagtgggtcaacaatttgtattgtgctcagccgggctgttcttctgcttgtctctgcagtggtcatgcaggaatcttcagtgatctggcagattatctggagctggatggtctaaggtggccttattcatatgtttggtagttgatactgaccatcacctgggccatgtgtctcctctagtagacttaacctgggcatgttcacttagtggcagagagagagagagaccccaaactgtaaaatctcttgatgcctaaaagtctcacaatatcacttgtaccatattttattggtcaaagcagatcacaaggccagcccagattcaagggtgaagaaatagattctgtcttttgatgaaagcagaaaaaatttgtggccgttaaaaatcttatataactaactttacatattttattccttctgtaatattcctgtaatagttatgacattggggtactcatttagtgaatcttgacataattgcttaggatttcacttttgaaatgtgtttaactgtcatcctgtatggcaattggtgattttagaagatactgcaattttatgaacctttgattaaacttgtgttttaacactgatatatttatttatgtagaaactgctggagcgaacccgtgccaggcgagagaatcttcagagaaaaatggctgagaggcccacagcagctccaaggtctatgactcatgctaagcgagctagacagccactttcagaagcaagtaaccagcagcccctctctggtggtgaaggtaaaagactttgtggggaaaaataacatttactttttttttcttttgaaggagacaagccccaaacatttcattagcatatagaagaaccaagctctttgggagacaaatgtaacagcctctgggggaaataacagccttctattctatttcagagttattatattaggcctagaacctatagggttggaacggtttcttctaaaaaatattttaaattaattgattgaactttattttcttcattctgaagttatccttaaaacctcaagggaagaaaaataaaggagtagggtaacatttatacttacagtagtgtgtagtttttttatcccaggggtggcagaacagctggccactgagtttgggtggtgtctccggtaccagcaaggcaatggaaggcacactgcccatgcttgacatttaatgaacccttttcactctctatttgctgaaccaactctctaaagtttaggttgttaatctccagaagtggtggaattaaacacaagcacacacacacatacacacaaacaaaaactcacctgtagtcttactctttcctcaatcctaggattgattcccagccagcatcagacagcctccttagtcttttcctggagtgtagaatagtctggagataataatcttccttagtacgactgtaaaatactgtaatacaactgtaaaataaaatatagaaaaaattacagagggcaaaaccaatgtttttttaaaaaaaaagaaagcagagaagtgtacatggggctagctcagttattttggaagctaatcatagaacaagaattagttttcatacgtttatccattttgaagggagagtgaaggaaatacattacatattatatggtattcagccaggaaaataggggcctgaccctagtccaggatcttcgttttcactgtgagatgggtttgtactattgagtgctatgtatttgaaaccagtgttacctaaacttctttaggtagaagttcaaaactacatttcgatgtttaggtagaagttcacatttactgttttagataattgtaaactagaagaattctgtatttccagatggtattgcatgttaaagcaggaacactttcaaaaattattagatgtgttcatagaaaatagatcgataagtgagttataaaacattagaaagtttcaaaaataaaaaaaggaaaagaaaagaaaaaagagccaagtgtagtggctcacgcctgtaatcccaacactttgagagactgaggtgggcagattgcttgagctcagaagttggagaccaccttgggcaacatagcaaaaccctgtctctacaaaaaatacaaaaattagctgggcatggtggcacatctgtagtgccagctacacaggaggctgaggtgggaggatcgcttgagcccaggaagttgaggctacagtgagctgagattgcaccactgcattccatcctgggtgacagagtgaggccctatctcaaaaaaagaaaaaaagagacataaaagtggagtggggaaaaaatagattagaaagtttcatgatgtatatttacttaggttgatgtcaacgaggcaatcatgatttatccctgatactactttggtcactgccagaacatttgtttaggcagttgatgaaactgacctcatatgaaatgtaccttctttgaaaatattaattttccaggagatatattgaaactcatagttagaaataatatgccttatggttctgatagattttttttttttaattttagggctttttcagttattttataggtgttcatagaagcttgaaatatgaaatgttaaatatttgtactggtgaatttgtttggtattgaccagataattcagtcactttttctgtctcctgtcgtaatcctaaacctcaagccaattgcccttctaaccatgcttattagttattttccatgaaagaatgtttcaaaaacagaaaacctggtttctacacttggctcagctgtgtgactttaggcgggcaactgaatttctctaggcttgatttttcttatctgaagatgaggtgattaggctgtataatccttaaaatctgttagaatgctttcttattctgtgtgtatgcactttttatttactattgtcttaacactatataaagtgttatgcatatattttgaaaatatgatttaaatatctttatttttatttttccataagttattggggtagaggtggtatttggttacatgagtaagttcttcagtggtgatttgtgagattttggtgcacacatcacccgagcagtatacactgcaccatatttgtagtcttttatccctcgccccccttccgctcttccccccaagtccccagagtccattgcatccttcttatgcctttccatccccacagcttagctctaaatatcttttcattaaggtttttataatataaattgtgtctgcttgaaaagatctttcatatcagatttctaagttgctgaaagagaatggggttttacatacttctggttgtaactaaaatcatttaaaagaatagggaggggtgatgttttattaatttgttgagtatctaccctcaagtttttcatgtgagaaattacaaatttgaatgtcttttttcatcgtttttaatgtagagaaatcttgtacaaaaccatcgccatcaaaaaaacgctgttctgacaacactgaagtagaagtttctaacttggaaaataaacaaccagttgagtcgacatctgcaaaatcttgttctccaagtcctgtgtctcctcaggtgcagccacaagcagcagataccatcagtgattctgttgctgtcccggcatcactgctgggcatgaggagagggctgaactcaagattggaagcaactgcagcctcctcagttaaaacacgtatgcaaaaacttgcagagcaacggcgccgttgggataatgatgatatgacaggtatgaattgtatagatggtatggcccatacatctgttccaataagattcagtttggtatgttgaacattttatcagttaactcatgaaaaataaatgcttttgttttatctatatgttgagtatcctttgcttgcatatggtttgtctaccagtagtataagttggttatgtttagactgaagtagatcacgatgtggttcttggactagttcatagaaacctgatcttataactgtattaccttaatatctgcaatgaaaaacacttgagaacaaactatacgtgttgttagcattgctgaccctcagctccatgttaaagaaatcctatttcatggattcaaaaattaaataaacttgagggactaaggtatgcaatgctgttcagtaggggagaaataaaatgtcaaaaaacataaattgagcagctgcaaagtatattattacacacagtgctagaaatgaatgaagtggcttgatccttacctttcatgagcctataatcggaaggggaacctgagaagtaaagcaacagttatgcaacagggttatttatggtatgatcaatttcacttatcgcctgccttgttacaaaaaaaaaaagctttgagatgacttataaaaatatctgtattttgaaaccagaaaaatgaagtcaaggtgaagagaaaatacgggaagggaaaacaaagaagtgaaaagtaaagtcattttattaaatgcagactgtaaagtcttccttttgctagaggcctatgcgaagacatgaaacagttatcagttacatgactaacaagctaaaagcagaaccatctttggcactaagacttgcaatttggcagtaagagctgagagaactttctttcatgtgtccttaaatatgactttgtgggagccgataaacctataaggtttcttaaggcaggcagatgtcctggctccaagctcagtaaaagcatttcttttttcttttctttttttttgagacagagtctcactctgttacccagtctggagtgcagcagcacagtcttggctcattgcgacttccgcctctcaggttcaagcgattctcatgcctcagcctcccaagtagctgggatgacaggtgtgtgccaccatgcccagctaattttttttgtatcttttggtagagatggagttgcaccatgttggccaggctggtctcgaactcctgacctcaagtgatcacccgccttggcctcccaagtgttaggattacagtaatgagccaccgcatccagcagtagaagcatttctaaagtgagctagcatagtgcaggtagaccccacggtgcttgcagacagctcagtggctactgggcctcacccaaggaagcattccttaggtggttctcagcctggctgattgtatcagaatcacatagaccataggattagaatttcagaaatgtggtggagctcaaagatgtgcttttgtcttattttttttaaagctctttaggtaattctgatgcatagccagaattgagatcaagtgatctgaagaatggggcttggatggttgacagatattttagactggattaaaccagatggactacatatatttcaggcagtcttccatacatatcagttcttttaactgaaatgttgataagaattaggcagcagagagtttaagattatgttttctggaagtgatgataataatctcaagagcaaacagtatgtaaaatgctaggtattgcaaatattttttattctaatataaatttttttattctaatagcgtttaattcttataatcttgagatatataccacttttatcttcattttatagaagaaggaaactgggttcatagaggctaataaacctgtccacagttagccagctcaaattcaaatcccaatggtttgactttagagctcttaactcctgtgacctgcctgatgatttttttgtttttgtttttttgagacagagtctcactgtgctgcccaggctggagtgcagtggcgcaatctcggctcactgcaacctccgcctcccaggttcaagcagttctcctgcctcagcctcccgagtggctgggattacaggcacatgccatcacacccagctaatttttgtatttttagtagagatgaggtttcaccatgttgtccaagctggtcttgaactcctgacctcaggtgatccgcctgccgcggcctcccaaagtgctgggattatagacgtgagccacctcggcaggccacctgatgttttttggcacatagcatagtctatggtgtcaattaatacctatttattttagcagtggtgaggtaagaggtaggactcgactccagatgcgggacttggacactggacaagatagagaaataacaacaacaacaaacaaataaattaaaaaaaaattgaggactagctaaaacagggcctgggggaagcagctttccagtgacatgcccaccagtgtgccatgtcaattcatcattgccatggcaacacccaggagttaccacccctttccatggcaatgacccaaaagttactatcccttccctagatatttctacataagctgccccttaatgtgcatgcaattaagagtaggtataaatatgattgtaaaactgccctgaactgctactctctgcctatggagtagccctgctctgcacagggaatcaacagagctgtaacattgcctcttcaataaagctatttttttttttttttttgaggtggagtcttgctgtgtttcccaggctggagtgcagtggcacaatcttggcccactgcaacttctgccttccaggttcaagcaattctcctgcctcagcctcctgagtagcagggattacaggcacacgccaccacacccagctaattttttgtatttttagtagagacaagatttcaccatgttggccaggctggtctcaaactcctgacctcaggtgatccacccgcctcggcctcccaaaatactgggattacaggtgtgagccaccgtgtcctgcctgcacctaggttataatactagccttctaactggtcttcctgcttcagacctctgccctgtccagtccctcctcaattttcacaccagcgcgatttttctaaaacacttgcctgcttctgctttaaactctcccaggacctccccatcacctcctgattaaattccaatctggacctgctctttttcaaacgtatctctctattttgacacattcagaatggaaaaaaaatgtaactcttgcttttctactgcttgctttaaacaccagaataggatctacttatacacacactctgctcatgttacttacctctgctttctatacatttttgtttttctgactagattatctccattctctgaagccagttgtccttcagagtccagcttaaggagtctctccctcctccagaaaagcctccctgaccaccactttacctgcaataccctttatatacttctgttattttccctagaataaacactgtcctatcagcagatgacagttttattgtcatattttaggaatgggcttaataagacctctagctcttgtaactatactctgtggtgcatgcctgtaatcccagctacttgggaggctgaggcaggagaatgtcttgaacccgggaggcggaggttgcagtgagccgagatcgcgccattacattccagcctgggcaacaagagcgaaactctttctcaaaaaatataatataatataatataatctaggtgcaaagagtgaaggcctgtggaaatgaagaggagaagctggatttgagagatacaggagacaaactctaagacctaacgactggatggtggagggagaagggaggaagaggtcagattcctggcctcagtgactgggtagttagtgatgtcttttcctaagatgaggaggaatatgttcggggcaatttcaacttcacatatgttatttgggatatctgtgggagagccaaatggaggtatttggtagttgcaagactgtgaaggataagccaggaaggatagtagagaatgatgtcacaaatagaaagggagtgatatattttagagatgtcaagaaatacaaagcctgcaaagtgtgtactggcatctagtgacaatggcaaaaccaacttcagggcagtggtataggcagaaggtcagttgagtgagttaagtggtgcgtgaatattgtgcagggaaagaggggcggtagttaaagaggatgtatatcaatgaggggatgtttattttttttgagacagggccttgcctcattgctcaggctggagtgcagtggtaatgctctcagctcgctgcaacctcctccacctcccaggctctagcgatcctcccacctcagtgacccgagtagctgggactataggcgcatcaccaagcccagctaagttttgcattttttgtagatgttgcatttttcgtaggttttgccgtgttgcccaggttggtcttgaagtcctgagctcaagcaatccacccgccttggcctcccaaagtggtgggattacaggcatgagcccaccgctccttgccgggatgtttgtttgtttgtttgtttatgagagggagtcttgctctgtcaccgaggctggagtgcagtggcacgatctcggctcactgcaacctccgcctcctgggttcaagctattcccctgcctcagcctcccgaatagctgagtttgcaggcgcccgtcaccgtgcccggctaatctttgtattttagtagagacagggtttcaccatgtcacttaggctggtctcgaactcctgacctcaaatgatctgcctgcctcggcctcccaaagtgctgggattacaggcacgggccctttgcaccttgccagtatgtttatttctaaggtgagagagacttgagcatccagtagtctccccacttatccgctgggtatatgttccacgaccaccagtggatgtctgaaacctcagacagtaccgaacccaattgccatcattcacaccatctttctgtgcatcttccacctggaaatgtaatgccttttccatcttaactaagcacttacacacactgtggccataactttcatagtttgaggtacgacagcaaaactccatgaatttcttttatcttcctcacaatttcatggaagaagattcatttttaccatagatcttagcaacctcagcgtattattttctttccttatttagttgagaactttcaccttttgacttcaagaaagcactttatggcttctcttaggcatatctgaattgccagcaccactgctactgctcttgtgctttggggacatcattagggcaaataaaggctacttgaacacaagcactgcatactccagtagtcgatctgataaccaagacggctataaagtgattatggggcgggtggcatatacagtgtggatatgctggacaaagattcatatcctggtcagatggtgcaagattcataatgctactcagaacggtgtgcagtttaaaaccatatatgaattgtttatttctggaattttccatgtaatatttttagacaacagttgactgctgataaggaaactgggaaagtgaaactgaagatagggcgtgggctactgtatggtcatataccacatattgacgttttgatcagtggtggactgcatatacaatggtagtctcattataatgtatttttactgtactttttctatatttagatgtttgcttaccattgtgttacagttgcctgcaatattcagtagagtaacatgctgtacaggtttttagcctaggagcaacaggttttaccacatatcctaactatatagtaggctacaccatttttgtggatgtgtgctctgtgatatacagatgtacacataacaaaatcacctcatgatgcatttctcagaatgtatccccattgttaaacaactcatgactgtgcttatgtgcagacaagagtttgtagagaaggagagggcttatttcgagcaagatccctgagaaggttttggaggggcagaattgaaaattcagcagaagtagaagctttggacaggagggattcctctttccttgattgaatttgtggagtaggaagtgctatgaaccttggcttccctatatacatgccctagggaaggcctagaatcttcgtcagttaaatatcactatttgggatttctctccaaatgaagtaactatgcagaaaaacatttggttgtttttgatttgatctaaccctatgctatccaatacagaagacactagccatatgtggatgtttaagttaattaaaatgaaataacatgtagtttattagctgctctagccacatttcaagtgctcattagtcacaagtggctaatggttactgtattgaacaatcaaacattctgttgtacagcaatggtctaatccatttttaaaacaaaaagtttctgtgagatacataatcttaaattgtgcaatgttatatataccaccattaattcattctaaaaatataacctatcttattcatgatccattgaaaaatggaaaaaatagatctaatagtttttttttaatttcggatttaatatcatttgatttaaaaagatattgtcaaatttaaataacttggaagtttcatgcatgctagaacttttcactggttcttaaacctattaatctcatttaaaaattcagcatagagtgatcctggtattatacgtaagcattactcttaaacatggtttttaactcttttctgaaaacattttcagatgacattcctgaaagctcactcttctcaccaatgccatcagaggaaaaggctgcttcccctcccagacctctgctttcaaatgcctcggcaactccagttggcagaaggggccgtctggccaatcttgctgcaactatttgctcctgggaagatgatgtaaatcactcatttgcaaaacaaaacagtgtacaagaacagcctggtaccgcttgtttatccaaattttcctctgcaagtggagcatctgctaggatcaatagcagcagtgttaagcaggaagctacattctgttcccaaagggatggcgatgcctctttgaataaagccctatcctcaagtgctgatgatgcgtctttggttaatgcctcaatttccagctctgtggtaagtcagtatcattttggtctttggaagccttttcttttttcgttatgagtggtataatacatctgtgtgtatgtgcaggtggatgggtggatatatgttttataatagatgcatagtgagtttatatgtatttgtaagatatcggtttcttagaaagtgaaaatcgttaagttgggtacccatcccaagatcaattagcagttgacagctgaagttatactaatttgatgcaaatccagagtctataatggaatgatagagcctcttcttagtcattaaggagagcactgaaaattaagtcctctgttataatgctttaaatatatatatgagaaatttatataaatttatcaaatatttctgaaaagatatataacaaaatagtagctatagttgcctccaggaaggcaaattgccaaacagggtgtgatactttcactgtatatccttttgaaatgtttgaaacttttactttgtgcatgtgttacctcaacagttttcaaaaaacaatcttaaataaaaaggaaaaataatttcgtgtttctgaccattgtcttttagtgtagagctaggctttagaattagacctgcattgaatcccagctgtactacataattagaagtttggctttggacaaggtgcttaatattgcagggctttatttttctatgtgtaaaataggaaaaaaaggttatttggagggctaaataagagtcataaagcacttagcatagtacctggctatgtataagtagttaatctattaactatgaagtacatgatactattttgttaaatttttattgacttaattaaaatgtaatttggtctaatatagttaaaaatttgataaaggtactagtgcaataatatgaataaaactttttttttaaataaagagtgatcatactgctaatacttcattacccatgagtatattatgcagactaacccacatattatgatttaaatcatagcattttttaagttggttttttttcccaaatctttcaaatttgtttgatctattagagagcaaaatcatttcattttcataaatcttacataaaggctatcaagtaaataggacttgaattgttttgttataggactatttttagatattgtgaatgttgtttaccctaagtgttttcatgtttcagaaagctacttctccagtgaaatctactacatctatcactgatgctaaaagttgtgagggacaaaatcctgagctacttccaaaaactcctattagtcctctgaaaacgggggtatcgaaaccaattgtgaagtcaactttatcccagacagttccatccaagggagaattaagtagagaaatttgtctgcaatctcaatctaaagacaaatctacgacaccaggttacgtatttataaaaaatttagttattgctgattatattcaggatatctattctcagcattttaaatattcaattgtgaatggtacagcaatgatttgccagggccaatgcctgaatgttccaaatgagacctcagctttagttgattcaatgaatatttattaacgtagactagcctacttactggttaaaggacttaatatgttacattttaacagtttaaacatgctttttccaggatgatcatgctagattttttttctatattttttgattcagacaaagcatgtttaactggaaatcacattttaggggcataatggagaaacattcttgtagccaagtgtgcagagcagtgcttctcaatcttgagtatgaaggcacctctaatagcagagggaagtgaatgtgcatgcaaatgactccacttctaattttatttatttactaaattgataaatgatagaaatttttgaaaaaattgctgtttattgataaataatagatgtatatatttcgggagtacatttgataacttaatacatttatataattcgtaaagatcaaatcagtgtaacgaggatatccatcaccttaaatacttgtctttatgctagaaacatttgaattcttctcttgtagctattttgaagtatacaatagattattgtaaactatagtcaccctactgatctatcaaacactgggtcttttttcttctgccaaactgtatatttgtactcattaatcaacctctcttcatcccccagttatatttatctgtgtgtatattgtgtgtgagcatttacatataaaacaaaatttcttaccatcgtaaactgatactccaggaaatgccatatttatcttgtggtgatttataccttctggcacacttccacgtactgttaattgagaaacacaggactaaaatatatggtaattgagtttattctgaactgtattcattttcattggaaagacttttaattctaaggtttaactttttgaaaatacaacctctgcagaaactatagttcatcataaaggggcagtaaacagaaatgagagtggggaagcggttatggggtaggtagaaatctgcaatttccagttgagccagaatgagaattggaaacaatagcaagatccccagatggaataggactagttagtcccaattttctaaagacttaagcttagataagaggcattctttttaattgttcttggctactggatatacccagaatcacatttccagggtttcagagatatttattttagatacttcattgtattcttaatggactctagtttggaatatggcctgaagtagtaataagtgataggtgaagtcctcaaattatggccgtggctcaaattctgccctttgcttgtttttgcaaataaagttttattggagcacagccacacccatttacttacatattctctgtggttgctttcattctgtaatgcagagcagaatagttgtgacagaggccatatggcccacaaagctcaaaatatttagtgcctggccctttataggaaaatatatgctaatctttgatatagataagcctatttttttataatacaaccttagaatcctcttaatgggagtgatataggcccaatttgccctactttaaatttacttcatactatttcaatgagtgctgtggggttttttgttttgttttgtttgctgttttttgtttttgagacagggtctcactttgtcacccaggatggagtgcagtgagtggcatgatctcagcttactgcagcctcgacctcccagattcaagagatcctcctgcctcagcccaccaagtagctgggactataggcatgccactacaagtggttaattttagtattttttatagagatgggattcctccatgttgcccgggctggtctcgaactcctgagctcaagagatccacccgcctcggccacccagagtactagggttacaggtgtgagccactgcaccccgctgaatactattttaagacactgtaaagtcaaggtgtccttttgataaaatgaataattcctaattttccttctgaaggaaaaaaaggcaaaattcctttattttcacgttaggcttcctaaaagcagggtaaaataaattgactatagatatatgtaagttgttggaagttaccatggccagcacacttcgtgatgaaggtagatttattaatatacatacagtcaatttctaattatttaaattctggttgttcagtttgagagttttctaagccctactgccctctcctcattctaccttttcaaaatttttttttttttttaaataactaaattctatgagtaggttttagggcatgtacttaaatagaatagtaaactttttaaaattttgaagtatttttatagtctactttgtgaatgaatattcctgatagaatcaaagcattttgaagctgtaatgtagtttagaactttttccatagaaatcgtaataattttttattttgaatagcctccaaaaatgtgtgtgttttctgtaggaggaacaggaattaagcctttcctggaacgctttggagagcgttgtcaagaacatagcaaagaaagtccagctcgtagcacaccccacagaacccccattattactccaaatacaaaggccatccaagaaagattattcaagcaagacacatcttcatctactacccatttagcacaacagctcaagcaggtatggtgtactgcatttaacattattcatcacatggtctctgcatagaacctagaaatcaaaatgggttctgatgccagtctttttgactgagataagtagcatcttggttttctgtatcactaatttcagacaagattgggcacattcagggtggtatggccgtagacagtatcactcatctcaaattagaaatattgtcctgaattccatgtgtattatgaactttttaaactgaaaactgtttaaactttttaaacagtttaaaactgcaaacaaggaaaattttagtagtgtttggatgttaaacatgctaccggctcttgtgtaaaatacagcttttgatgggtttaggaacgtcaaaaagaactagcatgtcttcgtggccgatttgacaagggcaatatatggagtgcagaaaaaggcggaaactcaaaaagcaaacaactagaaaccaaacaggtaatgtaaacaagaaatataaaaacgaacttggtccccaaatagttgggatctaatttgtagttctgtattggcaaataattctttacacatttttcttttccaattaactctgtcacttttcgtttataaatcccttaaatgtgtgtaccaactcttgcttttcttgtgatatttttctatttcagtggaactcttcaccatattcattgatgaccttaaaatcaaattttacaaaaattattttcatcattcatttgatttcagagtctacttaatattccacttagatggtggttctaaaatatttcgagagtctacttttctcaatgatgactgtatacctttccccagataccatgtctttagactatctgggatcctttcagtcaccacatacctcccacattgctctttattccggtcaaagttcattaatcagccttcaacaaaatctctacaatgtaagctgtgttctgtttaatttacatgtctacaaagtactgtgttaggatatgtttttaagctaatagaattatatttacagtggggactaatagaaagtaaaataacagtaaatttaatcagtattctttgagaaagatctacttgattgatttgttttttatcagttcacttgcttaacaaatcacatttcccagagttctgatctcaacctttttttctcagttgctctggaacatctcttccctgtccacatacctagattccgataatcactgaaatgctgatgatgctcagctccgttgtgctgatatctctcctgagctctaggtgtggttggctagcaaagcctgctatgctttgctgtagtatcttccccttgtagtctctgtcttctcttgttggtttgctctataccttgtcatctaaaacaatctggaagttcttccttgacttcttcctcttgtttactgtgtcttcccttctgcttgcccctagcacacatatgcataaacacacacgtgcagtgataagttttctaaatctgtcacccacctgcctcgtcttccatattttcctctgctattaccgaagttactgctgtagctttgtactgaacatcctgcttctagtctcgctaccctccagtccaccttatcagttgctgccagagaaatatatatatatatatatatattttttttttttttttttgacatggagtttcactcttattgcccaggctggagtgcaatggcacgatcttggcttactgcaacctccacctcccggcttcaagcgattctcctgcctcagcctcctaagtagctgggattacaggcatgcgccaccacacttggctaattttgtatttttagtagagatggagtttctccatgttggtcaggctggtctcgaactcgtgacctcaggtgatccgcccgcctcagcctctcaaagtgcagggattacaggtgtgagccaccacacccagccgagaaatatttttaaaagacgcatattcatgtattcacttgcttaaaatcttgaagtgctcctcatagtcatcatcagaaaaaatgcgtaaactgcttggcttgacatatagaatgattcctcacctggctcctccccactgctcctccacaggtatgcttcagtcctgccatgcaggctatttgcagtttctcaaatatacccatgtttttatatctctctgcctttgccttctgttctctgccaggaatatttccctggtgagctcctacttcattaagaataggtcaaactttaatcccctctaggaattcttccttttctcaaagtgtcccactttttttcacccatgtcatcctgtgtatacctcaactagaatatttatcttcctgtgaatgttgtaagtttgcattccaccactgcctatgggagtcttctccacctctgtgtccttagtgcctggctcagactaggggctcaacaaacttgtatttgaaggaagaaatgcgtttgctgatccttcccatcagcatataacaagctattatctgccatctgaaaaaaaaaacaactcttgcaacccattcccctccttttctttgcctccatgtcatgcagactcttctacaagttattcctacttgctgctttcaggtttcccccttctctttagaattctatctgcttaagctttgccaccactccttccacgactcagtatcctaatcacgtttgtcagtgatcttcacctactaatcaattttcagttgattagtagcatttgacattgtcgatcactcttctgttgggagcgccttctttacttggttgccagtgtatcatattctcatggctttctgccagtgtctctagaaagtatagagcagggttcttaaactattttgtactaaataattcccaataaacctgtgaaattcctcccagaaagttgcacatatgcatgtaaacaaaattctgaacacagtaacagtgcagagcactcatctgtggtctccacagactaagcagccaaagagctaggaggaaaatgtagttgaaggcagtgtctttaaagtcaaggggctcggcgtggtggctcccgcctgtaatcccagcactttaggagactgaggcaggtggatcacttgaagtcaggagtttgagaccaacctggccaacatggtgaaaccctatctgtactaaaaatacaaaaaaaattagccaggcctggtggcgggtgcctgtaatctcagctactcaggaggctgaggcgggagaatctcttgaacctgggagtcggaggttgcagtgagccgagatcgcaccactgcactccagtctgggcaatggagtgagactccgtctcaaaaaaaaaaaaggaaataaagtcaagggaagaaagaaaactttcgagaaggaaggcatggttggtattgttacgtttcaaatgtgggttaagccaaatctactgggttttgaagcaagaagtttgctgtaacgtggcaagagcagtgttagtgaagaggtgagggtggcgtgcaggtggtgctgtgtcgaggagggaacgggcaagaggagcagagccagtgagtgcaggcatttcttagtttggtcctaatggaggtgataaaggaggtagtggctagaagagatgaagaaaagtatgatttgtatgtgttttgtcctttctgagacctaagtcaatttgtgtgatgggataaggggtgataattgatgggatgaggtgagaatggatgaactccgcacagtgaagggaacagaactgatgaggacaatctcctgtgtgacgaaaaggaaggaggaaagtagcatgtaggggtgatggtagtcttagagttaggatagcaaaaactgatggactttcttctgaaagctcctgttttattcatccttaggaaagggaaggtgacaggggaaatactgtatggaggaaagaagagagagctgactcagacataggaagaatagggggtagtattgaggcttagatgagatatgagaccgtagattttatagtggaaccatttgatcgtttactttgctttttgtgtttttaaaaaatttttatgtattttttaatccactcatctgcatgctaattacattgtttttacacaaccaaagctgcttctaacttgagagacaataaagtctggaactagacctggaacaagagtacctgggtttgtatactggctctgccagtcactaactgtgtgcaagatacttaacttttttgtgtctcagttctctcatctgtaaaatggagatactagtacctaacatagagggttattgagaagattaggtgaggcaatagatataaggtgcttagaaaggtggctggcacatattgagctctgtataagtattagctgcctttattttactcttatttgattatttctactatgacttcattcataaagtcttcttttatttctttgctgaaataatctgtacaacaatataaagtctttaaacatacaaaatagtgaatgttcctcttaaataaccttgctaatgaataaaaagactcagacgagggaatgttttcttctcttctcttctttccttaccttctgatctgttttgtccttgttttctcttgctcttaccctccgggtaactgataattaaatggaatcctgatgtgtaggagctgtcaccagatgttataggtgtgggttgagataagtgacataggggtgggtgtttttccctttgtgtggctttcactttgtttttttattgttattttattttattttattttattttattctaccaaatacccagacttcaaggagaggctttcactttgattggcttatctaaaactgagccctgatatgaattttcattctttcttgccacctcctctccaaaaaaatttttacatactgagaattaccaagaatgtgaactagcactgagggtttgtcgtgttctgaacaaggctgggcctattcacatacactatctctttggttctaaggaaacttatacagaataatatttaataataatcttgtttcatttaataacatagaaagataaaatatatagttttgagaaataaaatttacttttcattcgctttttgcaggaaactcactgtcagagcactcccctcaaaaaacaccaaggtgtttcaaaaactcagtcacttccagtaacagaaaaggtgaccgaaaaccagataccagccaaaaattctagtacagaacctaaaggtcagtgtttccagattgttcatggttagtatgtagaaactcaaatgatgtttgtgtgttgattttgtattctgtaactttgctggatttgtttgttctaacgttttttggggggaatctttagggttttctttcttttttcacttttctttgagatggattcttgccctgttgcccatgctggagtgcaatggtgtgatctcttggctcactgcaaccctcacctcccgggttcaaacgattttcctgcctcagcctcccgagtagctgggattacaggcgcctgccaccatgcccagctaatttttgtatttttagtagagatggggtttcaccatgttggccaagctgttctcaaactcctgacctcgtgatctgcttgccttggcctcccaaagtactgggattacaggggtcagccactgcgcccagcccagggttttctacatgtaagatcctgtgatctgtgaatagagataattttactccttttctaattcaggtgccttttattttcttatataattgctctggctaggactttcaatgctgtgttgaatagaagtcattaaaacaggcatctttgtcttgttcctcatcttaaaggaaaagcttttaatccttcactgttgagtgtaatgttagctgagggcttttcatatatggcctttgttacgttgtgtaccttccttctattcctagtttttgagtaattttattggcactttgtttttaaagtaaaaaacaaattgcagagtagtggtatgtatggtatgatcacaaaacaaaacaaaatgatatgtaaatatgcacaccttgggggaaactggaaaaacaaacaataacctggtaatattgctgtcccatttctctctcggtgggggaaaagttaatgcatttatgcctagtgttccattattggaacgctaagcttatgggagttacttatgtcctcctgctcaaggttgtcaccaagaactgatttttcacaaaataaatttgcaacctccagcataaatgggttaagagaggacaggtgttcagggaggggtgtttctatacatttctgggtttggatattttaaaacgaatacatagttttataatcagaaaaaaaaaacacacacaagattccataattagaaaattataggttcttatatatattaatatggtctttcttaaacatttttaggtttcactgaatgcgaaatgacgaaatctagccctttgaaaataacattgtttttagaagaggacaaatccttaaaagtaacatcagacccaaaggttgagcagaaaattggttggtttttattctttatttattattaactttgcacatactataggaaataatatattgatagaagcacatattcaaattgagagtatctctgctttttaaattaaatcagaatacactgtagcttctaccaagatgtggtactgttaacagttactgctagctcacaggcacctgtgaaagtgtggttaagaccctcactgactttgacagggataggaaagttgctgccctcccacgctctgtactggtagaggggtgtttcagggaaaaactctctgggattatgttttcctctgttttcataccaccacaacaatcatcaacacagaagacttttgtgaccagttcaattcaattcaattctgacactagctacatggaagtagtgtcagatcccacaggttggggactcagtccccaagactgcctcctctccttcagataccagttgcaagtgcaagtccaggcctctcaaacttcctttttttttttttttttttttttgagacagtctcactctgtcgcccagactagagtgcagtggcacgatcttggctcactgcaacctccacctcccaggttcaagcgattcttctgcctcagcctcctgagtagctgggactacaggcgctgcccccacacccagctaatttttgtatttttagtagagagggggtttcaccatattggccaggctggtctggaactcctgacctcgtgatctgcctgccttggcctcccaaagtgctgggattacaggcgtgagccaccatacctggcccagggctctcaaacttctaaccgaccagcttcaagctgaggtttctgtgaccccctctttagcttggattaattggctcacagaactctgggaaatacttacgtttactgctttattttaaaggatatgggtgaggtatacggaaaggggcatggagcttccattgccttccctggggcgccaccctccaggaacctccacgtgttcagttatccagaagctccctgaacccagttctcttgggtttcagtggaagcttcataaagtcagcattccctcccccagggtatgaggctggatcctctctggtgaggggtgaggtgggtgtgggggtcgtcttaagaaccacaatgagaaagataggagaagattagagtcctgccgtggggcaggtgaaaggatggcaggagagttctgtttcctgtgaggcctaatgcacccaacattataacgaaagacagtaactagggatacagcagttatgagctaggaactgtggacgaaaaccagtatatatcataataccacaaggtgttagcagcccctgaaggttattatcgaaccctgccctaagtgacattaatattttcctattattgactgctgtgtgaaagggtagctctcaacgatagaaaaagtcatttgagagaatattttttgaaagtctgaagtctttggctattattctacatttgagttcttaatgcttttacttaaacccaaggtattgaatcagttttgatagacccaatattcatttctttttctttttcttttttcttttttttttttgtctcagacagagtttcactcttgtcccccaggctagagcgcaatggcacaatctgggctcactgcaacctctgcctcctgggttcaagtgattctcctgcctcagcctcctgagtagctgggattacaggcacctatcaccacgcctggctaattttttttgtatttttagtagagactgggctttgccatgttggccagacttgtcttgaactcctgacctcagttgatctgcccaccttggcctcccaaagtgctgggattaccaatattcatttcttagaaagtgttattgaagctgaagattttcttggtttcatttattagtagtattttcttatttttctttttaggaggtgcttttttttaaggcattttttcctatttagtaagaatatgaatattaaattttctttgttatgcctttaattcttaaatatctgagtcacagtgtccacctattgaaatatttttcagaagtgatacgtgaaattgagatgagtgtggatgatgatgatatcaatagttcgaaagtaattaatgacctcttcagtgatgtcctagaggaaggtgaactagatatggagaagagccaagaggagatggatcaagcattagcagaaagcagcgaagaacaggaagatgcactgaatatctcctcaatgtctttacttgcaccattggcacaaacagttggtgtggtaagtccagaggtaagaaaaggctaactaaacaggcccaggacataagtaaactaagtagtattcgtatctcccctttcttttgttgacagatggacatttggctcagtagccaagggaattttgcagacctgttgtctgttctcttaaaagaaaccttaaaactcttgagtggtttccttttgaccttagatgaaatccaaagagtaacatggcttaaaaggccaggcatttgggctcagcttttgactctgccatttgctgactgtttattggtcaggttatttaagctctctatgccaccatttcctcttatgttaaacgaggttattaataatacctatatagtggagttgatgtgaacattgttgtattagtatatcggtagttagctccaaacacatgtaactaacatttagttacagctaactgctgttattagctttcaccctcaattgaataactgcagctctggggattgattcaactagaattttttttttgaagtataagtttcagctgtctttgtagttttatttattcttttatgtgttaggaacttagtttgctttgtttttatgatgaatcaatcagcttactggatttttttcttaatattaatggagaattcattgattttcacagaataaaatgaattatcatttaggatcaatgttaatatctgatgcgttttcccacagagtttagtgtccacacctagactggaattgaaagacaccagcagaagtgatgaaagtccaaaaccaggaaaattccaaagaactcgtgtccctcgagctgaatctggtgatagccttggttctgaagatcgtgatcttctttacaggtaagaacatttctggaaggcattcactcactaagggtcatggtttagattgacataagtcgtgttataatttgtaattataatgttattaataactcatctgtataaaagtttggaataacttttgttagcctctctttcaccaaatgagagttccattctgttgtgaaatgttctgctgacatgttcaatatcagtgtcaaattctgctgatatgttcaataaaggatagtgctcagtgtgttgctggatttctaatagagtgtaacttacctcttgaagcattgatgcatatagatctcaaagattcaaagaaacagaacgtccatcaataaagcaggtgattgttcggaaggaagatgttacttcaaaactggatgaaaaaaataatgcctttccttgtcaagttaatatcaaacagaaaatgcaggtatgtacttttgtggaaaggggctttggaatgtttcttgcactaggctgtgagctctgtgaggacaaagggcccagccttacttatctctgaaccctgagtggccagaatagtgtctgatgcatagaagctcagtaaatcacatttgaattcagtttatttttggaaaggtactctttttgaaaacttggaaactcatttgatattgctgaaatatttatttttaaacaagtttttcataaatatccttaaagtataactattaattggataatgatgtagtgggaaatttgttatgctcttcaaggttttttcatgctaaggaagctttttttttttgagacagcattttgctctttgttgcccaagttagattgtaatggcgcaatcttggctgactgcaacctctgcctcccgggttcaagcaattctcctgcctcagcctcccaagtagctgagattacaggcatgcaccaccacacctggctaatttttatatttttagtagagatggggtttcactatgttggtcaggctagtctcaaactcttgaactcaggtgacccacccacctcagcctcccaaagtgctaggattacaggcatgagccaccatgcctggcttttaaaaaaaatattttaattataaaaaaaaatagagatggagtctcactatgttttctaggctgatctcacactcctgggctcaaatgattcttgtgccttggactcccaaagtgctgggattacgggtgtgagccaccatgcctggccctaaggaagcatattaaaaaaaaacagtgtaattgtaatttaaataaaatgaatcagatactttctaaatttctacgttgttggatgtaaccccaattttaactttaataagtatgaattggaagttttttcataaggaataatatttatagcttaattattgtaacatgctaaatgtttttggtgcatagtcgagaaacttgagcagtgaaactaacattttgactttcatctggaaattctagaaactatccaatcaagttagttagaattaaaatttaaagtgaaaatgatgatttaaaatgtgtatattttttctcctctcattggttttcctaggaactcaataacgaaataaatatgcaacagacagtgatctatcaagctagccaggctcttaactgctgtgttgatgaagaacatggaaaagggtccctagaagaagctgaagcagaaagacttcttctaattgcaagtaagtgtgatgcacctgaaagagttccaacaaatttctaaccagggaaaactcattttgatatttagaaatctttaagtttagagaaagggcttttcctagtcatctgttccagtggatctattttttgttcttgtttttataaggtttaagaactctatgtaaaacaaattgtagtttgcatgaaaggtagaagcaaccgaaaggcatttgaagaaatgcagttgtgcagattgaatgaatgaatggatgaatgaatgaatctctatatatacacatgtacacatacattctctctctctctctctctctctcccttccttcccttatcaataaatagctaaaacaacttctgtgaattttgctgtgtgcgtatatgtggtgatgatggggcattttggggtggacagatgataccacacatgaaaactagccgaaagttgatgtattaaattataaggacttggtaaatgagcaaccaaggttttccccaaccacctaccatgttttataaagatagtgttactgatttcgtcttcgctgttacgtacagtttccatatcagtacacttttttgaatttgctctcattagaaacagttacgattttaatatttggaatattgcgttgttttacatagctgggaagagaacacttttgattgatgaattgaataaattgaagaacgaaggacctcagaggaagaataaggctagtccccaaagtgaatttatgccatccaaaggatcagttactttgtcagaaatccgcttgcctctaaaagcagattttgtctgcagtacggttcagaaaccaggtatggtggtgatttttctagattgtgtgttaaattatgaacctcacctagattgaattgtacagaatagaaacaagtaaatcatgcataacaatgcaaagtttgtatctttggcctttaggtccttttattgagatataataaaaataagaaaacttcagatatatatagggataccaatctacacaataatggacattgctcttactgaaagtttgaatataaagttttattaaatgttggatatggtttttaaagttccttttaaaattttatttgtgtggaacacaaatttttttgtgtgtgttctggaataccaaagaaataaaggaatactgaactgatttatacacaatttattttaaaaaatttctttttgaggggaaggagggctagacataggtgagaagcaaatttcaggcatagggaaagtaaatggaggttgtgaaaggtttgagcacttttgtaggaataaggtaatttaggttctaattcttgatgttatctgattttgatggggtgtgggcagaaatttattggtaatttagtatgcgtctggaggtacgtggttattaatgacaaatggtgaagaaatagtttatgtttttattatcatttatctctgagtaacttttatagaaatacagtattttaatttcagttttgaaataacaaaccataatttacccttttgagatatgtactattagttaagaattaagggtcactaggtaaaattcaaaatcagcagaaattgagaaatgtggagtgaaattatttcaatttacataacagggagagaccttgatgatgcttatttcaggattatactgcctacttaagtcttatttagctttttgtgtctggaaagttgattttagtaattttaaaaataaattgtatataaatcagttcaatattcctttatttctttggtattccagaatgctgattagctaaatctgattttgcttgtgcttactatgtaatatgattacttcttacagatgcagcaaattactattacttaattatactaaaagcaggagctgaaaatatggtagccacaccattagcaagtacttcaaactctcttaacggtgatgctctgacattcactactacatttactctgtaagtaaatcaggcttttgatgattcgaatgcatttttctttttgtagagttgatacagtctaaagcattcaggtggcatttataatctttgaaacgccttatgcacattctttttatattgacaaataacccatctttcaatttgttgctttaactcatatgtttctatccttccttttgttgaatagcaccttttttccacatgactgtaggtattacatattttgaaatgatatatacattaaacctggaccatagatttttaacatatgccttaaatctcataatgtacttaacattcagtcttaatgaaaatacgtttatatttagtgaaacatttatttttaaataagagtcaaagtgcagtttgaaaaataattactacttttattattgaagattgtgagttgtaaaacacggaggaaaatattttggacttgcattatagggaaaaaatagacttcttaacaatttttattgactttaaagtcatagtggattcctttacttagagtcttgtaagagtatttgtagcatcatttttaatggtgtgattgaggttttctctcaaggttttacttaatgctttatttttccaggcaagatgtatccaatgactttgaaataaatattgaagtttacagcttggtaagctgataaagccttctaaaataatgaagagtatatttttcttaacaatatcagattataaattaattatgctttgggtttgtgcgtaggtgcaaaagaaagatccctcaggccttgataagaagaaaaaaacatccaagtccaaggtgagaattaaagaaacccagtaaaaatattttcatcagaagtaatagatatcatcataccagttttaatttatgtacaacttttaatgattaggaagtttttggatcagtttcatgttccaatttgtagttactatgttaaataggtatgaatactgaaaataaactgtgagtgatcatgattgtcagtataagttcctgatacactcgggctagataattctattttctctacatttacttggcaacttttataactgcttaaaacttttctcaagacttttccctgagccctcttctctctgtgttctctataccagtacttaataattatgtggtcactttgcaggcataaggttgctttccagccttcccagtctgtgttcttttcttaagtcatcattttaaaaactttttttttttagctctaacaaaaaaggactaacagtataagaaagccttaatcagggactcaagtgtaatgttttcatatttaagaattaattactcaaggactcatgtgtaatgtattcatatttaagaactcattctttttttttttttttttttgagacggagtctcgctctgttgcccagactggagtgcagtggcgtgatctcagcccactgcaacctccacctcccaggttcaagcgattctcctgcctcagcctcctgtgaagctgggactacaggtgtgtgccaccacatctgactaattttttgtatttttagcagagagggggtttcaccatgttagcaagggtggtctcaatctcttgacctcatgatccgcccgcctcagcctcccaaagtgatgggattacaggcgtgagccactgctcccggctaagaattaattattttctatgtaggaatttctcaaggttggatagttttactttctgagacataatgtttaataagaaatatatatagtaagctatcttttcttttaggctattactccaaagcgactcctcacatctataaccacagtaagtagaatttttgagaaattgagcttccttgagaaatcttcatcttacccatacagttttaaattggttaaccatttctgaaccttgagcactgtggaaaattttaacatgtactaatggggggatatccctgtaatttatgtaggaaaagtgttttctgaaatgtatttcttattgtgttaaaagagatgagtgattcatatttaaatctttgtattaaataagggaaataacttatgtttcttcttcacacctttttttttttttttagaaaagcaacattcattcttcaggtgagtgtatcttgaactatttgaaactttagaataaggtaaggaattaagcacttgcatatttacatatatataggccatcttgatttgtgaatgtttaccttgatctcctttggaataatattttctatgtgagtttcttagtaacaggattactggccagagtaggatgcagtttggttgcacctttgttaggtaccaccatagaggcaccagtcatcatgttattcagctctagcagcaggtggcattactctttacttcaacttctattgttctatagatttgttttgtgctttccatactgcagattttacttcttttagctttactgatcataactggcgttgtatcatgtcagaaatgcatctttctagttcactgggaactggaatgctgttaagccaggaaaggccttctttagaatgactttaggcctatctttttccaaaaggaattaggatggagctggtttcactcacttcctttaggctattggtctctttcttctctgtggtgcaagagagttactaagagacctgtacagagatagtttctgctgctgattttgtcaccctgcattataactagcactgaagtcttttccatgttttttatcgggaagttgctttttatgcatacatttttaggtctatatctttaaaaacacatccatcccaattattaaggagtgcttgtacctctttcattaggaaataagttgatttttccccccacatttaaagatgaaggaaaatgaggcagtttttttttctctgtggcagcttaattttcttctactgggatggggtgaggaattgttacttatacttaacaaaagtcattctgaactaaacttaatttcctcgttcttcacagtcatggccagtccaggaggtcttagtgctgtgcgaaccagcaacttcgcccttgttggatcttacacattatcattgtcttcagtaggaaatactaagtttgttctggacaaggtaatccaactttatttctaagggtgtggtgttttttttttaatcttagaaaaattagctcaatggaaatgccacaatgcttttaggtatttgaaatcttcgactgaaaacatatgttcttagaattgcacatttttgctaggtatgagtgtacctaaatgtttttttttttttttgtcttggaagtatgtctcccttttaatagttagaacttcagtggatgcttgcttattctaagtatcacttctgactaaagaagtattacttcctgcatttagatgttaagtttataattttaaaacataatatcttgcctatttccatttctttgtggttttttttgtttttttgtttttttgtttttgagacagggtctcactctgtcacctaggttggagtgcatggctcactgaagcctcagcctcgcgggctcccaccttagccttccaagtagctgggactacaggcacgtgatgccacgcctggctaatttttactattgttttgtagagatggggtttcatcgtgttggctaggctggtctcgaactcctgggctctggccatctgtctgccttggcctcccaaagtgctgggattataggtgtgagccaccttgcccggccagcctatttgaacctatattttgaaatgaacaatattttatgaatttagttttgacaagacagtgaaaggtagattaacctcttagaaaagtacttacgaatctaagagatttccttctcatacttccctttcatattagaagcttcaaaaatcagatctgtgttaacatcactattgagtctttttttcaccaagactattttaaggagtaagacaactagaggcaaattttatttcttgggttgacttctatataatacagtgataatttatattatcatgtgagatttctgtagtgcgaatatagagatgaagaagtgtaaaaattagaagccctggtttctagtatttacccttagtgatttactctttaacattgagcaaagtcacctcatctctctagggtcttgttttccagtacagaaatattagtttagcctgaaacaatctaaaattctatgaaatgctttcttttagttgatggacaaaaagcagactgtatttgaagttttgattactattaatgcatgaatgtgttttaacaagttaattttaaaaatttttgtaactttttatttagtaattcagctactttaaccagttgagtgatcctgggtctttttttctctgtctcttattttgtctgttttagataaattatgatgtaagagagcgagagctactgggctatttgttccaggaaaaggttgccattattttctttgcttgaaattaatgagcttaaaaatcaatccttaatttttgatctacatatatttgttttactaactatctttttgtttactttgaataattaaggacattatgtacattattctatcatgagactcttatagatgggtgtctttttctccactctcaatactttaaaaccttctttgaaagttttctattttttcaatgcatgtttggtgtttgggtctttttccatattctttcttctctcttatagttcattataatcctatattcacatcaatattgatttttctaggtacaattagaataccaattagtaactatatttaaaactaaaaattattcaatatttttgacctgtatactggaagagctattggtgatgttttaaataaaagcagattttttttttttttttttttgagacggagttttgctctgtcacccaggctggagtgcagtggcgtgatcgtggctcactgcaacctctgcctcctgggttcaagcgattctcctgcctcagcgtcccaagtagctgggactacaggtgcatgcaaccacatctggctagtttttgtatttttagtagaggcagggtttcaccatattggccaggctggtctcgtgctcctgacctcaagtgatcagccctccttggcctcccaaagtgctgggattacaggtgtgaacactgtgcctggccaaaagtagaaaatttttatggtcttaattggctaataggtatattgctagatagatgaccctttgcttgttaattttgaaattataatacatttagcactgaaattatactgaatataataatatattttggaagactttttaaagttttttttttgttttgagatagagtctcactctgtcacccaagctggagtgcagtggcacgatctcggctcactacagcctccatctcccaggttcaagcaattctcatgcctcagcctcctgagtagctgggattacaggcgtgcaccaccatgcccagataatttttgtatttttagtagagacagggtttcaccatgttacccaggctagtcttgaactcccaacctcaggcgatctgctcgccttggtctcacaaagtgctgggattacaggagtgagccactgcgcccatctaaagatttttaatatttttgtaaaggtcagttacaaacattctcttggttaaagagatgctaattaacaaaatgctggatggtattttttattttattttaaattcttaaaataggatttgcaaattagataaccataagaattgggattttacgaactgtgttttttactcagtattgtcacatagccagtttctacatatgtaagagatttcattaatctctaaaatgaaagagatttcaatgacatatcttaaatatagactgttcttttaaaaactttttttggctgccattttgaatcaaaatgtcacatttacaaattaaaattaaattatattcccattcacttaactcctttgaatttataacttaaatagccaaccacatgattgagtgcaaaatcaaaccactcagtttaatttgttgtgtcttttactcttgagactccttctcagtcagatacagtacgatttagaagtaaaatctggaacaaattttgtgcttttctgagtgaggaggggaagcaaatatttgttccaattgcctgggtttgatgtaggagaatatctaaaatagttaagtttgaatggtcttgaagttggtgggaaaaatttaaggccttctacactcatgtaataatcctatttaattgtcactgaaagagtatacatgtctttcctgccttgtcagatactgtcagtacaacgcagtcttggtttattttactggtgccttgaccagtaatacaacaatcacagaggttatctgtgaggtccttccagagtggaatttctgttgaggttaatccagttggtttgctctgcggatttaggacaccactgtcagtggatttccattttatttgaggctattcagatctgatttaaagcctggcatcctggaatttaaattacaaatcttagtgagtcagactttcaaaccctttctttgaatagggaatccaaaacagtcatagttttattatactattatagataaagggagaaggatgtcccaaagttcctcttctgacttaaaggaacctcataggtatttataccttttaggaaatagaaatgtcaatttaaatattattagagcaaacaattttgaagtaaaacaaccaattaggattatacagttttgggattgaagaaaatggttaggcattctggtatgccctgaactatccagtttatacctgttggccttgtgtaattattaatggtgcccctttcaccctcaaaaatatcccagcatataacacattacacagtctccctggttgtaggttatattttacagctcttaacataatctttgaagtgtggatgtcttaaaagactcctttgttaaacacaaaacagaataggatcatacattttcacacaagtctccctccacactcaactagggggaggggtagtaaacttgacgtttttgtgaatattttcaatttacttctttatcaggacaagcttctaaccaaaaatattgtctacttttcctcagctacagagtaagagggcacattttcttctcattgttctgatttttgttatcagtagcatgctctgtgctaaacaatggaattctgttaaataccattgagaggaaagagcctaaggaacttaaaactcactgtaaggaaaagcaaaaagggaatttttacaaaataggatgatgaggcatatgatgttttggttctgcattgtggatcggtttcaaatttgggcagttggaggttcatctcatgaaattagtctactgaaatttatactttttgtcttagaattccccctttaagttatctttgctatgttagagggtcaaatcattggaaactaattatactaaaaactcaaatttagacttaactaagattaatccagttgggatgccattctttttccctgggcaatagaaatgacagacacttccatcttcctttctatcttgactcagaagtcaatgttactttagatatctgtctatctatctatctatcatatatatatgtgtgtatatatgtgtgtgtttgtgtgtgtgtgtgtgtgtgtgtgtgtgtgtgtgtgtatatatatatatatatataatatatatatatatattaccattttattcttgatttcagggacaaatcattgatggaaccaatccaggccttgtataaccaaaagactagcagttggcgtttatcttttcccttcaaggcttgggtgttagcagctttatagataagggcagttctgatcataaacccacttacctttacacaaaacaggagttagcctatcccttctgccttaaattctggttctcacttccttgctaataaatgtcccttgtggctttcttttttcccccccagaatagggcacttttatctgaattaaaaatttgttcaggttgggcactgtagctcatacctacaatcccaacactttgggaggccaaagtgggaggatcgtttaaagccagaagttcaataccagcctgagcaacatagatgatgaaaacagttttttttcatcaaagaataaaaaaatattagctgggtgtggtggtacacacctgtagccctagctattcagaaggctgagatgggggaattgcttgagcccagaagttcagaagttcaaggctgcagtgagctatgatcacgccactgcacttcagcctgagtgacagagtgagaccttgttttggaaaacaataacaaaaaacaaacttgttcaggcagatatcctttttcttcactgattttcttaatggtgtctgggaactcatctcctgtctcatttggtagaagctgcttcttctgttgtatcttgacatttttaaagcctctttctaaaattatcaaaccatcctttgctggcattaaatattcaagttgaagatccttcaccttcctttaatcctatattagagtctataggtgtgtctttcttatagcaatcctgcactcacataaaaactgtattttcaatataagatcaaaatgtatttcacaaaaaatgcatctttatatttgtttacatttctcctgactgaatggtgccatgtacagtctgtgtaagttatagaaaacgtttgccaactcgtagtctaccattttgttatttgttttctatttgtttcgtctgttctttactgctttgttttccctttcctgccttcttctggattaattgagtattttggtaatcctttttaatctcctcttttggattttttagctatacttacctgtttttgtttttgttttttaaggcgttggtaggaaataatgtatgcatccttaccttattaaagtctattttgaaatactgttacactgcttcatgtaacttacaatatgaacctcacaacagtatagttcattttcccatcccagtatattttacttctttgttataaaccacacaatgcactgttgttactttttctttaatcagtttttttcttttttaagagatggggtcttgctatgttttccaggctggccgtgaactcctgggctcaagccatccacctgccttgcctcccaaaatgctggggttacagttgtgaactactgtgcccagcctcttgaatcaatttttaaaagaaacttttatatttttataaactggtccttatatttaccatttctggtgttcttccttcttgtagattgagaattccatctgaagtcattgtcctgtcaagaagaactgtctttattatttcttgtaatatagttctgctggaaatgaaatctctaggttttgtttgtccagaaatatttttatattgccttaatttctgaaggatattgtcactgggactgctaaattgacaggtttttatcttttcaattctttaaagttgttaatttattgtttatggctttaattgtttctaataagaagtcagccagccatcattcttttctgtttttttattttgcatttttaacggtttgattttaatgtgcctacgtgtagttttctttgtatttatcctgtttggtttcactgagctttatgatctgtaattagttgttttataagtcttagcaaatactcagccattgtctcttaaagttatttcttctgccctgctctctcctttctgaaactccagttaatgtagactattgactatttttctacaggtctgtgacattctttttggttttcatttaattctttttttctttgtgcttcatttttgatggtttctatttatcagttcttcaagttcacctgtttttttcttgatgtgatctaggctttgaagcctagccaatgcatttttaaattcagacttttttttagttctgaaattttcatttggattttttttatggtttcaatttctctgctgaagttctccattttctcactaatttttctccatcttttcatctaaatattttaatgttgtataaatgtttttgttttctaattctaacgtttagatcatctgtggatctgctattgacaggatttttttccccttgataagctccgtgttttcctactttttcacatgtcttgtaattttttaactgtaggccagatattatattataaaagaacagtagagactgaaataggtaataccttgttcttttgtctttcagacagtatagattagggactggtctcttatgtaatcagaaacagctgaaattaggctatggatagatttggttcaagttttgttttaaatgctttgagaatggtttcaggccccacttttgagcagaactttgagatctaagtactgcacgtctacaagatttctctctgctttttagacatgtcttcaaccatcacttctcagcaaaattcctgttggggagaattggcaggtagggagagctagctctgcctctgcttcttgagatgcctgtctacctcagcctgggctcaaccattgaaggctcaactggtttctccttttccctgcaaaatttgttgcttatggcaaggttgctcctctgctaagttgctaagaatattttcttacatgtttaggttccttttctttaaaaatacttctttttggccaggcacagtggctcatgcctgtaatcccagcactttgggaggccgaggcggctggatcacttgaggtcaggagctcaagacctgcctggtcaacatgatgaaaccccatctctattaaaaatacaaaaattagccaggtgtagtggtgcatgcctgtaaccccaggattacaggagaggctgaggcacgagaattgcttgaacctgggaggcggaggttgcagtgagccaagattgtgccactgcagcctgggtaacagaatgagactctgtctcaaaaacaaaacaaaacaaaacacttgtttttgttgtgtaaatggacatgcatgaaaaatcacctatagcaacagaaagcgtatcattggtttcctggagatgggaatacatggaggcaggattatgggagggagctttagagggtgatggaaatgttcattattatgattgtggtcaaggtttcatgggttataatatacatatatcaaaattcatcaaaccctacactttaaatatgttcaatttattgtactcaatatagttgtaaaaagattatgttcagttaattatagacaccttaagtgtagcattcagtgagttttaacaaatgaatacacctatataaccaaaacctagtcaagataagggacatttccatcactcccatctagtcaatcccagccactacaggcaaccattcttctcatctctgttttcaccctagattcgttttgcttgttcttgagcttcatttattgtttttattttttatttttatcttttaaaaaagaaaatagagatggtggggggggggtctcagtatgttgcccaggctggtcttgaactcctgggctcaagcgatcctcttgcctcagcctctcaaagttcagggattacacatgtgagccgccatacctgggcttgaacttcatttaagtggaatcaaagaatgtgtactcttttgaatctaatttcttttgctcagcgtgatgtttttaagatttatccatggccgggcgcggtggctcacgcctgtaatcccagcactttgggaggccgaggcgggcggatcacgaggtcaggagatcgagaccatcctggctaacacggtgaaaccccgtctctactaaaaatacaaaaaattagccgggcgtggtagcgggcgcctgtagtcccagctactcgggaggctgaggcaggagaatggcgtgaacctgggaggcggagcttgcagtgagccgagatcgcgccactgcactccagcctgggcgacagagcgagactccgtctcaaaaaaaaaaaaaaaaaaaaaaaaaaaaaagatttatccatgctgctgtttatgttagtagttcattgttttcaaaaaataatgtattgaaatgaaattcatgtaaccaaagtaacaattttaaggtaaactattcagtggcatttagtacattcacaatgttgttcaaaatacctctgtctaattcgaaatatttttatgtctctaaaagtaaaaagtcttactcattaagcagtctttgcccatcttccctcccccgagcccctgacaaccatcaatctgcatttggtttctatggacatatctattctgtatatttcatataaatgggatcatcatacaatatgtaactttttatgtctggcttatttcccttagtgtaatgtttcggaagtacatccatgatgtagcatgtattagaacttcatttctttttatggctgaataatattctattatatgtatatacagcatttcatttatctgttcattcattgatagatatttgggctgtttccgcattttgcctattgtgaatagagctgctttgaacatgtgtgtgcatgatttgagtacctgttttcagttcttttgtacgtatacataggatatacataggagcagaattgtgggatcatgtgataattatttttaggaactgctaaactctttttcaaagcatctagaccatttgatatttctaccattaatgtgggttcccattttcctacatcttttccattgtttattttctgttcgttttatttttaaattataaccatcctagtgggtgtgaagtggttcctcattgtaggtttgatttgaacttccctaatgactgttgatgttaaatgtcttttcatgtgctcattggaagacaaaatgtgtatctttgaagaaatgtctattcaagtcctttgccaaattttcagtttggtttgtctgagttgttttagttgggttgtctttttgttactgagttgtaagagttttctttgtatattctggatattatcagatatataattgacaaatatttcaaaccattccatagactgtcttttcactttcttgataaagtgctttgatgtgcaaaggtctataattttttttattatggtaaataatacatggtatttatcttttgaagaaatttttaagtatacagtgaattattgtgaactataagcattatgttatatagcagatctatagaattttcttcattttgcatgactgaaattctgtactcgtggaactgcagctcctcatattctcctccccactccctggcagccaccactgtagtttctgcttctatgaggttggctactttaaagatttcatatgttgcttttcagccttttggataaggtcaaatgtagatacttcatgataagtggagtcgtgtagtgtttgtctttctctgactagcttatttcatttagcataatgtcctcaaagtttgttcatgttgtagcatatgacaggatctcctttttctatgctaaagaatttttcattgtatgtatgtaccgcatttttttggcctcttcatttattgatgggcacttagattatttccatctcttagctattgtgaataatgctgcaatgaacgtgagagtgcagatagcacttcaagaacccatttcaatccttttgataaatacctggaagtgggattgctgggttatatggtagttttattttttcattttttttttgtggaacctctgtagtaatgaaaggtttttaattctggtgaagtctaatttatctattttttcctcatgttgcttgtgcctttggtatcatatctgaaaatccattgctaaatccatgatcacaaagctttacctctatgttttctttctaagagttttattttattttattttattttaaaaatttttttttgagagtttcactcttgctgcccaggctggagtgcaatggcacaatcttggcacactgcaacctctgcctctgtgttcaagtgattctcctgcctcagcctcccgagtagctgggattacaggcatgtgccaccatgctggctaatttttgtatttttagtacagatgggatttcaccatgttgaaggtgaaatcccttcaaggccaggctgatcttgaactcctaacctcaggtgattcacccgcctcagcctcccaaagtgctgggattacaggcgtgagccaccgcgcccagcctttctaagagttttataattttagctctcatacttaggatattatccatttgggtttaatttttataaatggtatgaggtgaaggtccaccatcactcttggtgggtgtggatatctaattttctctgcaccattttttgaaaaggctgctcttccgctttaaatggtcttggcatccttggcaaaaatcagttggccataagatgtatggctttatgtctggtctctcaattccatttcttttgtccatatgtctgttcttatgccagcaccacactggtgtttttgattttgtttctttgagacaaggttttggtcttttgcccaggccagagtgcagtggcatgatcatagctcactgcaaccttaaacttttggactcaagtgatcctcctgcctcagccttccaagtagctggtactacagacatctgccaccacacctggctaattttttcatgtttaatagagacgaggtctcgctatgttacccaggctggtcatgagctcctgggttcgagtgatcctcactccttggccttccaaagttctgggattacaggcgtgaactaccatgtccagccagcccacactgctttgattaccaaagttttgcgttacgttttgaaattgggaaatatgattccttcaactttgttcttaattttcaagattgatttggttgtttggggtctcttgcaattacatatgaattcaaggactggcttttccatatctgcagtttattgttctttattgctgggtggtattgtgtggtgtgaatttacaggttggtttatcagtctcttattgagtatattctcctgttgatggagaatagataaacccaaatattgtcgtctgttttctttctcacattaacttgagacttagggcttttggttttgtcaagctttaccttaaatgaatttattcttcaaaagtatttgttggtaaggaaccaatggctttttggccatgtcttttatactccaactttagaaaatgctctgttttcaagttgtaatagtctctgttcatgatttatacatgatttatcaagaaaaatcacactttgaacctgttttgcaaataatttacctgttttctttgcaggtcccctttttatcttctttggaaggtcatatttatttaaaaataaaatgtcaagtgaattccagtgttgaagaaagaggttttctagtaagtaacatcacttagtctttaacttccttttttccattttgtgaaatacagacttgtttcccataggaatgaaatcctttgtgattaagtaataagttggttcagtaaagatttgttttatgtcctttatatgccaatcactgtgctgccattggaatgtaaaagaccacaaaaaataattcctctgctcatgagtttttagtttagaagagagaaatacaaacgaacagacaagcacaatataatactctaataggagaaaacagggtgcatcggtgtcaattggtgggacaccaggtcttgactgtgtgtggggtgggataaagggaactgctgagagaagtaatttctaaactgagtaagttaatctgagagaaagatgagaagtgctccagatagggggagaatgtacagtggcttgaagggcccttctttgtcactcctacccaaagaaaagaagaatgacacatgcagacagtggaaggtatttcaggatagctagagcttagagtttgagggcatgcatgtgattggtgggtggggaatgaggaggaaagtgtggttaggggaaatggggcaagagttcaagggccttttaaagaatttggactttatcctagagtcagcgagttactcttacaggattttaagcagaggaaattatccaacttgggattgagaaaatcattctgaccaatgtggaaagcagattggagaatgacaacccgaagaagactagtcagttcccaccaatgtgggaaattttaatgagttaagttttacgtgatttgaattttagatgcctggaaacatgtgtgaaagttctgggtttggagctcaagacagacatttagtagaggtaaagatgtggatatctgcagcatggggaagcccagggcaagtgagggaagcagagccaactcactggaggagtgccagcattgaaaggacggatggaaggagggaagcctcagaggagactgcagggagagaaacggagaatctagcatcatggttgtcaatagaagagaacattgaaaggagggagtggttgagttagatcagattctgttaggactgttggacttattattgggtgatcattctggcgcaggtgagggcagatgctagactgcaaatgggtccagagtgagtgggagatgaggaatgagcacaggagcttggaaactcttggaaacactttggcagtgaaggagtaaggagagaagagtgttgtgcttgcagaggtatgtagggtgaaaggaggattttgtcaacattttgttaagatgggagagacgtaagcggctttaaatgtagatgggtagcttctaatagggccaaagagattgaagatagaggccatggaggacctgatctagggcttatggggtaattcatagagcaaggtcatgagaatgggaagaattaagcccaagccacaattcacaggatttatttgatacagaatttacagttttctcattatcagaggaggaaagtatgtgtgtagaatgcatagaagattgtgagtatggtacaagaagtagagaaaatccacttgctttggtgttctctgtgaagcaagaacttgaatgatgcaagggatgttacaagtcagtttgtaactgctgtcaaaggttcagaaagaagagctagatattaaggaaagcccggtggtctaagtaactgtagccaacttcccaaggattgggaattgctacttattaacagtattttttccttccttattaggttttatcacatataaatccagcaggtggcactagatagtcttggaagagtgtaaatttctgacttgaaggcagtatttgcctaatgaccttttcttttcatgtaaacatttttatattttattgttgatgcctttagcaatggataggctctgttaagatagctggtccatttgcatataacgtctcacctaattagttttttagatgggctcttaacgagcttgttagatctcttcaagtttactctgtcttgaatcctgtagcccattcttctcacattcacacttacaaaaatgtagtaagaaagagctctggattccccgacataacttctgtcctctgcctaaacattgcattttaattgcctctaccccctataaaaaattagaggtagtaatggaaatgtaagctcctcagctcagcttcctttcctgatgtgccagggctgccctggaggagggcgactccaaccaaagagacaggtaagtggttctgacagggtgccgggctagctctgcctccactgaggagcagcaagaggcaggcgctctggattggcagccagaaggttcaatttttgtggtctgtgtgatgtcacttaatttccttggccctctgtttcctcagctatagaaatgaaaaggccgtccttttcttattcctctctgattatagtatgatgtcataatagctggtgttaatcttgtttatcaaaagttaccttgtctgtttattacctttatgatgtaaaaggtgaacgttaacacaggagggagctggtgagtgatttgtgttaactttcatgcttgagattgaaataacgacattcctttctttcttccttggggagctgtaagcagtgttgcctagaaaaaggctgctttgggaggaaaatggaaggattaggggaggaggaaaaaggtgaggcaggagagcatatggttggagcaagccaattaatctgaggtgtcaatctagcttggtaacatttgctcccacacgtcatggccagaaattagactcttgattcaagccaccttttgggaaatttacataaaacagtgaattgagaagagtgtatatcctattgtcatagggttggagtaaggactagttgagataatttaaaaatacttagaggagtagttgagataatttaaagatatgcttagaatggttcctcacagcaacaaccaagtaatactagtttattcttagcttctcaacaatcagagaagtaaagttggaatatgaaggtaatctaaaatcaaacgcaaagatgcctttggatcatctgtatcagagggcagcacagcagccctcactgactgtttttatagtctttgattggaacataggctgatctgcttacttagcatctgtgactgcttctgtgccacagcagctgagctgagtagctgtggcagggaccgtatggcccaaagtctaaaatatttactctctggcccttatagaaaaggtttccctgatctacagcattgttatgtttttaccttgctttgttctttaacacagaagttcccagatgaatgttgttttttttaatttttatttatttatatttttatatatttttttgagacggagtctcactctgtcacccaggctggaatgcagtgacgtgatcttggctcactgtaagctccatctcccgggttcacgccattctcctgcctcagcctcctgagtagctgagactacagatgctcaccgccacgcctggctaatttttgtatttttagtagagatgggatttcactgtgttagccaggacggtctcgatctcctgacctcgtgatccgcccgcctcggcctcccaaagtgctgggattacaggtgtgagccactgcgcctggcctttttgtttgttgtttttttttttaaattaaaagtgagggcttctatatagattagggctctgttatgactataactaaaaaatagtgggggaaaaactcttagcttctacttaccctgtttaagtggaagtgcttccgtggaacaaaaccagatgttattagttgcctattctggagccctgtttctatccagcactactgccttgcctacctttagcatatagctagcatccctaaggacaaacgcctgatggcagggaggcaccacttcaagcgtgtctcacggcccagcagtgggcttggagttttgatgtttatcatggttattgaccaaggcttatgatcataagttaactcttttctaatcctgttagaaaacttgatctcctgaataaagattaaatgccagtcttgcatattaagataggtttaacttaatatgttatcattaattttttaaaatatataaggtatggtaattttgtattattaattctccaacacttgaggcatttctgttgtttaaggagcatttgattagggacactatactttttaaaagtcttaaagtaggtagaggtatttaatttagggttgatatctgaatgtttttaaatgcttgtagatgatgttgaagtaaatttctgatatgaataatcagtgatttttattattaagataaaagacatgataaaaaaacatacaaataggttttgagatatgaaatatgtcaacatactacagttagtgtacagaatcagcatttcattgttaggacattttcctcaactttctaaagccagcatttcaactgacttttccagaccatatttgaagatgttagtggttttggtgcctggcatcgaagatggtgtgttctttctggaaactgtatatcttattggacttatccagatgatgagaaacgcaaggtaatttatatagtactgtttagtggtgaaagccctgattgactttcgtgtagtgttcatgcaaatgttccctctggcccccatcactcacccaaattaataaccctttttgtgtactcactaagccattaaaaatgttcttgttggccaggcgcagtggcttacgcctataatcccagcactttgggaggccaaggcgggcagatcacctgaggtcaggagttcgagaccagcctggccaacatggcgaaatcctgtctctgctaaaaatacaaaaattagctgggtgtggtggcaggtgcctgtaatcccagctactcaggaggctgaggcaggagaatctcttggatccaggagaccaaggttgcagtgagccgagatcacgccacggcactccagcctgagcgacagagcaagactccatctcaaaaaaaaaaaaaaaatgtttttgttgtaggtgtgtgtgtgtgtgtgtgataatcctttaaaatttttatatcctatccattccctatgatttgaccactcttaaaataccttaacatgtatatttttccttcttttctactggatgtttaattatattttttgttgacatttgaagttggaaatgttttaaatttaattttttatcttgttagttagggtaaaacagtaatggaaacccacccacaggaacagtggtttgtattttgtttctaaaatttaataataggattttgtgtaatatatcatgtttttaaagaagttaatatcattgcccaagtaacattatttattatccccaaactggaaaatagaaataagcagaattaaaaaggaaaatcatccataatagacatagctattgttcatattttggttagatatgttttcaaacttttaaaatgtataatatataataattattcatttatgaatctttttaaaaggaaaagcatgctttttataatctgattttttacttgataaaatattctaacatctttcagcatcagtaaagataagtctaatgctgtgttggatagctatgtgtgttacactgtagtcattacaattattaatattttaaaaatttgtgaaatgtttgagacatccaaaagggcgtaaaataatttcatcaacctctgtgttattattccagttgaagctccccatgtaattctctctcccgcagagataacttctaccctaaaattgtttattgttcccatgcacttatttaaatttttattatacagattgaatatcccttattcataatccttgggatttagaggcgtttcagatttgggattctttttttttttttttttttttttttttcagattttggaatatttgcattatacgtgccaattaattatctcctaatccaaaaattcaaaatctgagatgctccaatgagcatttcctttgagcatcatgttgactctcaaaaagttttggattttggagcatttcagatttcaagattttcagattttggatgtttaacctgtacatgtatataaacaatatatgttgctgcaattgcatgtttttaaacattatacagataataacatattgtatgtattattctgcaacttgccttttttgggtcagtatggtttgtgaaatttgtctggggtggtatgtgtagctttagattgtcccctcttctctgtatagtatacttttgtaagagcacattacaatttatccattctcctgtttagagacccttagattatttctaaattgttgtatacagacaatgctgctgtgattcactttcttctcattttgttttggtttgtaccttttacagcccacatgcaggaagatttagtttcttgtacacatggatgagagttcttttttgaatgttacctagtagcagaattgctgggttgtagggtttgcacatctacaacttgattttgtcaaatgagtctcaaaagtggttgtacgattttccattcccaccaggagtatttgaaagttctcagcttttcatattcccaccaatacatcatatgtcagccttttaaacttccatcagtatgatagatgtgaaatatactcttatttaaaaaaattttgtatcttcttgattactagactaagtatcttttctaagcataagagtgtgtatggccatttatattttctctcgtatgaactgattgtctctatattattcattttaatattttttgatgcattgcaattatatttccctagtcttaggcctggcgtatcttttaatttatctttatagtgtcttttcatgcacagacttttctaatgttaaggtaatcagacctgctagtctattgctttgtgctttttagggtctaatttaagaaactatccttatcctggagtcaaagatttcttttatacctctttctaaagttatagagttttatacttcacatttaatttccctagaattgattttttttttcatctgaataaccaattgggccagcatcattgaatggtttgttctttccccactgtgttaggccattcttgcattgctatgaagaaatacccaagactgggtaatttttaaattggctcctgattctgcaggctgtactggaagcatgatgctggcatctgcttagcttctggggaggcctcagggcgcttttactcacagcaaaagatgaagtgggagcaggtacatcacatggtaaaagcaggagcgagcgagcgagcaagtgagcaaggggaggtgccaaacatttttaaacaatcagttcatgcgagaactcattcactattgtgaggacagcaccaaggggatttcttgagaaatccgcctgcatgatccagtcacctcccagtaggccccacctccaacactggggattacaattcaacatgagatctgggtgaagacaaatatcaaaactgtatcattcactgatccacaatgccatttctcatgtgtatcaagatgtcattatatgtgtaggtttatttttaggctcacggttctgtttcctttggtctgtttccctatcccaatctcaatgaccgtagctttaaaataaatcttaatgtctgctaaggccagtctcctaacttatggagtaatgtatagtagttcccccttatccttagtggacgcgttccaagaccgccagtgaatgcatgaaaccatagataagtaccagacccacttgccatcagtcataacacgtttctgttgatgtcttacacccacaaatttaatgccttttgtattttaattaagcacttaccatttactgtggtggtaacttttgcagttggagatgtgacaacgaaactagcatgaatttctttttctttcctcacaatttcatggatagaagatttattcttactgtagatcttgacaacctcagcatacgattttttttctctccttattaagttgaagactttcaccttttcacttaaaggaagcactttatggtttgtctttgcatatctactcttgcactttggggaccttattaagtcagataggggctacttgaacacaagcactgcatactacagcagttgatctttttttttttttttttttttttctgagacggagtctcgctctgtcgcccaggctggagtgcagtcgcgggatctcggctcactgcaagcaccgcctcccgggttcacgccattctcctgccttagcctcccgagtagctgggactacaggtgcccgccaccattcccggctaattttttgtatttttttagtagagacggggtttcaccgtgttagccaggatggtcttgatctcagttgatcctataactcagaacgctactaagtgactactgagcaggtagcaggtaaggcgtggatacgctggacaaagggaggatccacatgccaggtgcgatggcaggagattacatcatgctgcttagaatggcatgcagtttaaaacttacgaatagtttgtttctagaatttttcttttaatatttttcaactatggtggactgtgggtaattgaagctatggaaagtgaaaccatggataagtggggggctactgtatgactattcttggtccttgctttttccatacactgctgcacacacacacaccccctgccatcacctcatggaaatatatatacatatatgtttcacttttttcttttctttttttttgagacagggtctcgctctgttgcccaggctggagtgcagtggcacgatctcggctcactgcaacctttgcctcctgggctcaagcgattctctgcctcagcctcccgagtagctgggactacaggcaagcgccaccacgcacggctagtttttgtattttcagtagagatggggtttcaccatgttggccaggctggtctcaaactactgagctcaaaggtatccgcctgcctccacctcctgaagtgttgatattacaggcatgagtcactgcacccagccctgttttgcattttacagttgaaaatgttcaaatgtacacaaagcaaaaatagtataatgaactttcagcttaattaattattcgttttcaggtttcatttatctccccacaacacacatgcatttttgttttgttttgttgctttgctagggtgttttaaagcaaataccagaatttatattctgtcatttctaggttgcaggtcttaagtgttggcaaatgccccaagggaagtcagggtttcagactagcttactattcttcattctcccttgctcattgattttggcctttgaaggatttttctactttcttgtcaatttaattatctagcatttggcggcttatataatgggaggattttcagactatttaatgtatcatatttgctggaaacaataccatgatttatttaaatagtcccctattactgtcattgaatttgtttggaattttttgctattatgaaaaaacagtgactacacatattagaatctgtgtgtgcatatttatatatttgcttcggataaatttaggtgaaactgtaggatcagaaaatgctcattgttaatggtttttgattactgttatcaggttgcctacgagtaatagatcatattatactttcaccagtgatgcataagaaactgtattactcactccctaaccaatcaacagaggttgttactgttttttccagacttagccaatctaaggttttaaattggtatgttctatttttatttttaaaaattctaatagagttgacacacttattggctgttggctcatgtgtgcctatatgtgtttcttttcccattttcaggaccatttggtctcgtgaatgttttcctccactttgactcgtatcataggaattcatggctgccaacaatccagggcagttgtctgcccttatctttcatagatatataaagaaatatttacacatgaaatccaatgtctaggtttccttttatagaaaggggagaagtgggtaagttgtagataaaaggcacttgagtgtgtttctcattgttatagctggttttggtacctggggctcattatactgttgtttgtattttttatttgaagttcaccataataaagagctttataggatagttggcaagagctaccagttgatatttttgggttttatttttatgtctagctaggaacaataataaatgttaaatatgtttctctaagcccagtgtaactaaattttaacttttaaataatagctttttaatatttaatttgtaccaacttaaatgctgcttaatgcttactgacttaaatagtcttattttctactaatttctcttaatttgtttttaaagaatcccataggaaggataaatctggctaattgtaccagtcgtcagatagaaccagccaacagagaattttgtgcaagacgcaacacttttgaattaattactgtccgaccacaaagagaagatgaccgagagactcttgtcagccaatgcagggacacactctgtgttaccaagtatgtattggcctataaatatttctatcaactaagcaattgattgcccactatgtacttaccactatgagaaatatcacagatggtccttgacgttgaaaagggcacagccttagtgagaaaacaaaacacacacaaagcagtaagtgaaccatctataataactaaattaatgtagttaaggaaagtataatactcaggttgtatcttagctaatgttttccagtatgctcacagtggaggcattttcatggcagttagataataatctttgggttaagtttaaagatttcatgcgtagttgaggagtcaagcattattcaaagagactttacacatcccttccttccattcccagaataccctcgtgtaatcagatgactcacagaaacaatctcattctattctgcaaatttctggatggagattaacagaataaaacttttgggagtgccccttttttaattaaccctgatctcaagtgtaagatacgaaggcttattgctaggattctaagataggtttctttgcttggatgcctaagagaagcttgaagaccaacttcagtgtacagagttgtcattagggacaaaagttagaatttgataagatgtttggtaattaggctgttgctggatattgcagatggggggagattggtaggactagctttatgagtttctaatgtgaaaatattagaaagctacagccaggagacacaatactaaaatagaacaaagttgcccagagactgccgatttgttttaaaatagctagatagaggactcatttgatggaaatttttgatgtctagattacttccagatttattcattttaactcaattatttcaggggccttctatgcagtggtggaatcagacagggcaggacaggcaaaatggatttctaatcattttgtttgatagcgacgtgtccatggtcacggtcagtggaggaaccaaccaaagtgcagtatccaaatagttcctgaccacagcggcccacttcagccattttgaatatcacttacatttttttgtataaccttattttttactggttgcgtaaactctcttagacttctccgtagaccttcccctgtgataaaaatagcagattacatgttgctttaattactctgtacctcatgtacttgtagtctttctcactataaaattataacttggatgggtacccttcgcccaagcatatgagagtagtacattctcaattcagtcttggctgagtcttcagctttgcttggtgacctaaaatttattttacttttttgatggtgagaatataaacattctgcagttctgcattctcctttgcctcactgatgtgtttccttacggggccttgggccttttggacttaggccttttacttgaatttaatgtacctcattttcatttctactaactaagcttgttgtcaatgctaaagatttttcttctgatctctactgcatacttcaaaatagagactacacattgaaaccagaatgttttatcacatggggaggcagtagttacagtggagctttgaagtcaacggacttaagtttaaatcctgactcatcaaatgtaaccatggcaggtcacttaactttgctggccctctgaaatcttttgtgtcaaaaaggaaaaataacctccacagtgactagagattttttttatttttattagcctcttgaaccagaataggttcacagagacttcagacaacagagatgaatgagtaaacacacttagcacagtttccagtacatggaatgagcttaacaagtggtggctattataagtgcagtattttcttcattgactaccagaaggtggtaaacttcacttattcatgtttacaccatttctagtaccaatggggagaacttaaaaagttgtagaatgagtgcaatataaaaacctaatggctggctgttctctggaagcatgttctggctatgaggtagggaatccccccttccttactctggcctgccccatcaactagttatttagtcaacttgtagctaaatatggatgaaaggaaaatattcctaatatggacagagaggttaggatagacaaagtcttaggatcttttgatagtttattttaaaatcatgttctactaatatagtaggacaaatctaatgggacacagtgcaaactaatattacctgtagagccaggtgaaggtccatgggtctgtgattgcagcttttggagaacctgactctgaaggttatattgggagtgcccatattcagggagtgcctataatcaggccttaggtgctcttgcagagaagttgcccacactcagtgggtgtcctataccatcaggttacccaggccgcacactacctgtataaaacacctgttggaaacaccatcctttaccaagtgtaattagtgtaagttagcatcaattaaccaaactggggataattttcctctgttttatttggagatgcacctcactaagtggctgtggattagcatccataaaaggtggttaaaggtaattcatttactggtttatttagtcatttttttccctagcaagagtacatgggggtatggaatggagggagaagaattctgacctctttggttgtttgttcctgtaggaactggctgtctgcagatactaaagaagagcgggatctctggatgcaaaaactcaatcaagttcttgttgatattcgcctctggcaacctgatgcttgctacaaacctattggaaagccttaaaccgggaaatttccatgctatctagaggtttttgatgtcatcttaagaaacacacttaagagcatcagatttactgattgcattttatgctttaagtacgaaagggtttgtgccaatattcactacgtattatgcagtatttatatcttttgtatgtaaaactttaactgatttctgtcattcatcaatgagtagaagtaaatacattatagttgattttgctaaatcttaatttaaaagcctcattttcctagaaatctaattattcagttattcatgacaatatttttttaaaagtaagaaattctgagttgtcttcttggagctgtaggtcttgaagcagcaacgtctttcaggggttggagacagaaacccattctccaatctcagtagttttttcgaaaggctgtgatcatttattgatcgtgatatgacttgttactagggtactgaaaaaaatgtctaaggcctttacagaaacatttttagtaatgaggatgagaactttttcaaatagcaaatatatattggcttaaagcatgaggctgtcttcagaaaagtgatgtggacataggaggcaatgtgtgagacttgggggttcaatattttatatagaagagttaataagcacatggtttacatttactcagctactatatatgcagtgtggtgcacattttcacagaattctggcttcattaagatcattatttttgctgcgtagcttacagacttagcatattagttttttctactcctacaagtgtaaattgaaaaatctttatattaaaaaagtaaactgttatgaagctgctatgtactaataatactttgcttgccaaagtgtttgggttttgttgttgtttgtttgtttgtttgtttttggttcatgaacaacagtgtctagaaacccattttgaaagtggaaaattattaagtcacctatcacctttaaacgcctttttttaaaattataaaatattgtaaagcagggtctcaacttttaaatacactttgaacttcttctctgaattattaaagttctttatgacctcatttataaacactaaattctgtcacctcctgtcattttattttttattcattcaaatgtattttttcttgtgcatattataaaaatatattttatgagctcttactcaaataaatacctgtaaatgtctaaaggaa

SEQ ID NO: 41 - DNA, 19433 bp, Homo sapiens
ggcttaggctgagccgtggccgccacagcccatcgtaatgccgcatggtgcttggcactccagagagccaataggaatgaaagaattcatttgaatcggccaatgccggcgggttagggggcgggggttgaaaaccctataaaggcgtcgatcggccggacaggcggcagcggcggctcctgcagcggtggtcggctgttgggtgtggagtttcccagcgcccctcgggtccgaccctttgagcgttctgctccggcgccagcctacctcgctcctcggcgccatgaccacaaccaccaccttcaagggagtcgaccccaacagcaggaatagctcccggtgaggcgaccgggtcgcgcccgagccgcgcggggctgaggggctgggagggccgctgccggcggggcctcgcgccggtcgttgcgggtaacgagccccgtgcgctgtgctcgcgccggggcgggtggcggggttctgccgtcggcgccgcctttgtgccgcctggcgagccctgcgcgccggccccacccgggtccctgctgctctccattcattccttccacggagtcaggggctgaggaggccggggctggtcgcccctcggagcacggccggttttcgttaatcggaaccttcggggagggcttcgctttctcctgtgtgcatcccggctggtgcatccccagggtggtgggcttggccccccaggtgcccggggatcctttagggccccatgcatggtcaggtcctattgtcccattgatgggccacgcgctcctgtctctcccccgtggcatgcggttggtctcgctctcgcgcgcagccattggatccggagaccggatcgatcaggtccggcgggctccttaccctcgccgtgcccccactccttattcggacctacctgacaggtgcatgtgtggtcgagcggggctggtcatcgcgacccttcaccccccattgaggacccaatcgttcttcccctcttcgaagtgcctcccctcttccaagtgtctccccttcctaacaaaggaaagaccccttctccccatccctgcgctcatttctaaggcggggggcgggggcgggcgcggggaacgagccaacccgagtgggttttctgcgcttaaaccttcggaccgtggcctttgcatcctaccttcgcttcctcctttgacgtttgcccagtgagttcatccctggccctggttcccttgcaggaggaggtttcttgttcttgggcggggccggagacatccattgtctctaacgtggtagcgctacctgggaagcgggggatttttcttgcccttcttcccactgctttttgggcttggggcactgggtacagtgtttggacaggaacccttttccaagtccttgcttaacttacttggtggaagggtttggattctgtggaaggtgtccacattgtctcagctaattgcacactgttctttaaggtgggttacagttatgtctgggatcctcttcaaggcttggaagaagcttaaatcacttttttgagcatgtattttacatcgattatgacctgcattcatgtgtggctaccctcggggtcctggccaagtggcacaaagggagccattttgtggggctaagaagacacgtgaaatagccatatctcacaggggttagagaacttgggaacaaaaagcacgcctcactcagcaattgagccttaggaggaaagcatgggaaatgacattcctttacaactcaatactttcaggtttacaaggtcaaaaagactaggtaagattaaaaaaataaattggtgattactgggaggatggggtacttaagtagcacagacctaggaaactggtcgctccctttctgttttctttccaatgagatgatttcttcagagaacaggaagagattgagccttggtttttcattttgtgttacgaggccaactttctgccggttagacttcagtcgtcggaatgataatgtgtaatctggggttttattctttggggttgagttgatattagtgttttgtaaagaatttcagtaattaggtcaaatgaatcctcacacttagtttttcatgtgtacatttgaaatgtgagacaaatgagttctgatcctgtgaaatgaatgtttaattcacctttcgtcatcaatttccctccaatattatgctctagggactgtagtagcattgtcattttattgtctctctaccttccctttttctatattctcacctaattctcataaacttaattttgtccagtaatgttctcctggccccataaactcgttataaatttagtctggtagggaatgatctgcaaagatatacagaaacttcaggattttaagagagaagaaagaaaaggagcaattttttaaaaattgctatttacagtacatggacacatttttgttcagtcttaaatatataatcctgatttagttgtcgtgtatgattctgaaagaatagtaggatcctaaaacattgagatactttctgccttatgatctacatcctttgtttggggatatctcactattacaaatggtctctacaacactgacgtcatccgagttggttactacctgctattgcaggaggaacagagacctttaaaaagtgggactggttagagttttgacttgctcttaagctggtgttcgggtactagtgtctttttcttgattttttttttttttttgagacgcagttttgctctttttgcccgagctggagtgcagtggcacaatctctgctcaccgcaacctctgctttccaggttcaagcgattctcctgcctcagcctcccgactagccgagattacaggcatgtgccaaaacgcctggctaattttatatttttagtagagacgggttttctctatgttggtccagctggtctcgaactcctgacctcaggtgatccgcccgcctcggcctcccaaagtgctgggattacaggcgtgagccactgcgccctgccttattttttttaattaatttatttttttgagacagtctcactgtgttgccaggctggagtgcagtggcatgatctctggctcactgcaacctctgcctcccgggttcaagcgattcttctgcctctgcctcagcctcctgaatagtcgggactacaggcatgtgccaccacgcccagctaatttttgtacatttgtagtacagacagtttcaccatgttggccaggatggtcttgatctcttgaccttgtgatctgcctgccttggcttctcaaagtgctaggattacaggcatgagccaccgctcctgaccttaattttattattattattattattatcattattattttgagacggagtctcactcttttgcccaggctagagtgcagtggtgtgatcttagcttactgtaggctccgcctcctacagggttcaagcgattctcctacctcagcctccggagtagctgggattacaggttcacatcaccacgcccagatagaagtgctaaatattcttagaaaaatgtttcttggccgggcgcggtggctcacgcctgtaatcccagcactttgggaggccgaggcgggcagatcatgaggtcaggagatggagaccatcctggctaacacggtgaaaccccgtctctactaaaaataaaagagttagccgggcgttccggcgggcgcctgtagtcccagcttctcgagaggctaaggcaggagaaaggtgtaaacctgggaggcggagcttgcagtgagccgagatcgcaccattgcagtccagcctgggcaacagagcaggattctgtctcaaaaaaaaaaaaaaaaaaaaaaaagaaagaaaaatgttgcttattcaaactgccttatgaagaaacaaaaccagaccactcatatcaccagtaaaggaattgaatcagtagttagaaagtctttccatattctgcaattacacaggcagtaagaaaacaaaaaaaagaagttaaaaaaaaagttggctgggctgggtagctcatgcctgtaatcccagcactttgggaggctgaggcaggcggatcacctgaggtcaggagttcaagaccagcctgaccaacatggtgaaaccctgtctttactaaaaatacaacaattaggccaggtgcagtggctcacgcctgtaatcccagcactttgggaggccaggcgggtggatcacctgaggtcaggagttcgagaccagcctggccaacatggcgaaaccccgtctctactgaaaatacaaaaattagctgtttgtggtggtgggcacctgtaatcccagctactcaggggctgaggcaggagaatcgcttgaacccgggaggcggaggttgcagtgagccgagattgcaccactgcactctagcctgggcgacaagagcgagattgtgcctcaaaaaaaaaaaagaaaagaaaaaaaagtatttctataaaaccacctgcattttctgttttgagaggtggcaagaggagttaaattgagtttttccaaggaggagacaaattggtcaacctatggcagaaagatttggaaatgttaaaaaatatattaccatgttgaacagaaagctacagatgatattcaaaggaacactgatatagaccatgtcatggaatcttatacttaattgctcatactgactttgccctcatgggtagttacttatgtttattgtgagaatagtgaggtacaagtatgtaaatggctttttagtgaggttgagatagaagagactattatcagctcttcttgggcttctaaattggtcaagctgacttaagtgtgtgtgtgtgtgtgtgtgtaagtgtgtaagtgattagagatggggatctcactatgttgcctaggctggccttgaactcctgggctcaagcaatcctcctgcctcagcttccagaatggctgggactataggggcctgctactgatcgtgcccaagttatttatctagttgaaaataagaaggaagtgattttttaaaatttatttactttttttggctgggcgtggtggctcatgcctgtaatcctagcactttgggaggccgaggtgagtggatcatgaggtcaggagatcaagagcatcctggctaacacggtgaaaccccgtctctactaaaaatacaaaaaattagctgggcgtggtggcgggcgcctgtagtcccagctatccgggaggctgaggcaggtgaatggcgtgaacccgggaggtggagcttgcagtgagctgagatcgcgccactgcactccagcctgggcgacagagggagactccgtctcaaaaaaaaaatttatttactttttacattttgagacagagtcttgctctgtcacacaggctggagttcagcggtgtgaacacagctcactgcagccttgacctcccggccgaaacgatccttctgtctcagagtccagtgtagctgggaccacaggcatgcgccactacgcttggctaatttttaattttttttttatagagacacggggtcttgccatgttgcccaggctggtcttgaactcctaggctcaagtgatgatcctgccttggcctcctagggtgctgggattacaggtgtgtgccactgtgcctggaaatgatttttaaatgaataataacaagaaatacttctaaacttctttgaaagtatattcagccaagcccagtagagtaaggtccattagatcttttgccatttctgaaaaggggacaccaaccaggctgttatttatgatgagttccatgctgtttcagctgccttgtgtgatcgatgaccttattacaagtattataaagcagtatttagtatcttaacatccagcactgaatgtagacactgatggagttgattcttttttcctgttagcagctatctgttgtaggggtgagggagatgaatgggtgaggaaagtgaaatgaaagttgtctgaaaagatttatgccaagaaatgtttcagtatgatctgaagttgatgttttgccattatttgcagagttttgcggcctccaggtggtggatccaatttttcattaggttttgatgaaccaacagaacaacctgtgaggaagaacaaaatggcctctaatatctttgggacacctgaagaaaatcaagcttcttgggccaagtcagcaggtactcttgttatctgtgctcactgttcaaagggatgggcccagcatcaacagccacagatgcagcttgggcaccagcatgtgcccccgtgtctaaaaaacaaaacaaaacaaaaattagctggtggtagtggcagtgtgcatttagtccctgatactccggaggccgaggtgggaggattgctgagcctgggaggtggaggctgcagtgagctgtgattgagccactgccctccagcctaggtgacagagtgaaaccctgtgtcaaaaacaaacaaaagaaaaaccaactacagctggttttgaactaataacaaaatctagcttacaacagtttagacttagcctgagaggaaagaaatgggaaatactgagaggctgtgtgatggatcagagtaaggactgaagtcagactgggttaatgtttaagtgatcagcttaacttccttaagactgtttcctcatttcataatgtgagactaacacataacgtcaattgctgaagttttttgtttttgtttttgagataagagtctcattctgttgcccaggctggagtacagagtgcagtggtgccatcttggcacaccacaacctccacctcccgagttcaagtgattcttctgcctcagcctcccgagtagctaggattacaagcatgcaccatgacgtccagccaatttttatatttttagtagagacagggttttaccatgttggccaggctggtcttgaactcctgacctcaggtgatctgcccgcctcggcctcctaaagcactgagattacaggcatgagccaccgtgcccagcctgaagtgttttgctttaggttttttctattgtatttctgaagaaagtatattttgatttttaggtgccaagtctagtggtggcagggaagacttggagtcatctggactgcagagaaggaactcctctgaagcaagctccggagacttcttagatctgaaggtcagtgtgacagcatgaggccagaaaggctttcaggtcaatatgattctgaaatttgtactaagagtttcagttcacccactggaattttacattgaggtagttaggaaagggactgggccatattgataatggaagattgatagtaaaatcatagaagtgtgttaacatggtctcagtctgtttctgtatctcttttaccattaggatttgttttatctcccctattgatttttggaacttgtggatctttctcacttcctgtgtgtctcatatatagaagcatttctgagttcagaactgctttgcgttgaactccaggagactagtgctggcattaccattggttgtgtctgcagttgaatactgccaccaagccccccagggggtgtgctgcgaagtggaaagaccccgcccgactaagcactaaagccctcagagcacagtgaggcatcacctgtctgagtggggagagaactggagaagggctttggaactgataggggtccttccataactattatctagtttccccttatcggggaaaggagagagaaatgaaaggagagatttaccagttttccattctaataaaagatctctgaagtgctaattggtgttaggtcctcagaggaaatgttggggtttgttgtagacgtggtactagcactagagcaatttatcatgcagaatttttgcatagcattgtcctgagttggatagaggtagcagactgaccctgtgcttgattgcaacacaatgaaatgtcacattcggtttcaagtagatgttagctgctatgaactatgactgttttgcgtgttccaaaattaaaataggaagtaaatttttgaatttttttcttttctagggagaaggtgatattcatggtaagtacttctgaagaccaaatttctggctctgtccatggttttaggacagatctgaatcttgatttaaatcatgtcttggggaaagagactggggagtgaaacctggccatgccccaagtgccgccatactctaatctgccagtaacgcgatcaatgctagaaacataatagaagggaaaaaacagagaatcctttaaaattacatatattggctgggcatggtggctcacgcctgtaatctcaacactttgggaggctgaggcaggcagattgcttgagcccaggagttcaagaccagcctggaaacatggtgaaaccctgtctctataaaaaagtacaaaaattagcctagcatggcggcacatgcctgtagtccagctactcgggaggctcaggtgggaggattgcttgagctcaggacgtggaggttgcagtgagcagagatcacaccgttatactccagtctgggtgacagagtgagaccttgcctgaaaaaaataaactaaaccaaaatatatctaaacacacacacatacatattaatcaggtcagtatttgttacacttaatgagagcttttttttttgagaccaggtgtctctctgttgccaaggctggagtgcagtaggcaatcacagcttactgtggcctcaacctccttgggcttaggtgatcctcccacctcagcctccctagtaactgggactacaggggtacaacaccacacctcgctaatttgtttttatttttagtagagatgaggtctcactatgttgcccaggctggtctcgaacccctgagcttaagtgatcctcccacctcagcctccccaagtgctgctattactggcaagagccccagcacccagctgagagctttttgtatttatgtagctatttatcacagactagccaagtgcagtattgagaagaggggaaagagtaaaacaaggaggttgatctgtaactatgaacaagataactcactaccagccagagagagctttttaatataaccatttcaagctcagctcacagcatccactttacaaagttcatttgtttttatagggagatgcttattcagcaagacattggttacctgcttggtgattttgtaaatgatgatttagggggcagatgtaaattttcagctaaccaaccatattacgaattataggtggaaatgagctgtaatcattgacttaattatcttaaatcttggaggtatttattggcatttctgtaacaagtgctaaagacttgccgatgagtgcaaggtttgtaagtgtcaggcagtagcagtcagtgaagtgcagcagtcacaaggccctctggtctagacagaagcagcagcttcctcttaaggccttttcctacccttatgttttgtggtgtgcttacaaggacacacggaaaggttgaagaagcagattcctctcctgccttctcacacagtgttctgtttttttggttgtgttttttttttttttttttttttgagatggagtctggctctgtcatccaggctggagtgcagtggcaggatctcagctcacttcaacctctgcctcccgggttcaagcacttctcctggctcagcctcctgaatagctgggattacaggcacgcggcaccatgcccggcatgagccactgcgcccggcctcacagtgtttcttggtgggcttagaggagaagctcctgagcctttgggagcattgcctgggttcttccttataggacctgtttagggggaaaacactcaaacgtgtttttcctctttttttcacaccacaacaatcatcaacacagaagacgacacctgtgaccaaatatggggggtttctccccacacgccaatcagtggacaccagttgggagtcctccaatccagtttccacaccctctgcctgaagataacctcagattcagcaggttgagggtcagtcccacaagactgccccttccttcccaccagttgtaagtctgggcctctggaacttctgaccgactggcttcaaattggggttcctgtgaccccttctatggttttgattaatttgctagagaggttcacagaaagaactcagggaaacacttatgtttacaggttcattatgaatatatgatacatttttttttatttttttctaaactgaatcttgctctgttgtccagactggagtgcagtgtcaccctcacagctcactgcaacttcaaactcctgagctgaagcaatcctcctgcctcagcctcctgagtagctgggatacaggtgtatgccaccatgcctggctaattttttttctttttttgtagagatgtggtctcactatgttatgttacacaggccagtcatgtgatcctcccacctcagcctccaaaagtattgagattacaggcatgagccactgtacctgggttgttacgaaggatatttgaaaggatacaaataaacagcccagtgaggagatacttggggcctggtatggaaaggtcccaagtacaggagctcctgtaccttggagttggggtgtgccaccctcctggcacatggatgagttgttgcaccttcctgtcagcttccacatgttcagttatccagaagtcctcagaatccatccttctgggtgtttttttaagactgggttttggtcttaaccaggctagagtgcagtggcacaatctcattgctcactatagcctcaacctcctggactcaagcagtcttcctacctttgcctcccaaagtgagccactgtgcccagccccttttgggtttttcttttttttctcgagatggagattcgctcttttttttttctgagatggagtctcactctctgtcacccaggctggagtgcagtggtgccatctcagctcactgcatcctctgcctcccaggttcaagcgattctccttcctcagcctcctgagtagctgagattacaggcatgcaccaccatgcccaggtaattttttaatttttagtggagacagggtttcgccatgttggccaggctggtcttgatctcctgacctcaggtgatccaccctcctcagcctcccaaagtgctaagattatgggtgtaagccaccatgcctggccaagtttcacactttttgcccaggctggagtgcaatggcatgatcttggctcactgcaacctctgcctcctgggttcaagcaattctcctgcctcagcctcctgagtagctgagattacaggtgcacgctactatacctggctaattttgtatttttagtagagacgaggtttcaccatgttggccgggctgatactgaactcctgacctccagtaatccacctgctttggctttccaaagtgctgggattacaggcatgagccgctacacctggccccttttggttttttatggaggcttcattacataagcatgattgacaactgtacagaaatacgattagacaaaaaaggtttgatttcataccaatggactgaacaagggaactcagaaggcccgtctgttagattcttcttggcctctccatgtagcattccctcctccagggtatggagcaggaccctctggattaagggtcttttgacctgccatcagattacagtcctgccctgggcaggtaaaaggaggacaggaggtcacaaagagattctgtttcctgagggctgctcctgaggcttaatgcaccccattcaaaagacttttaagggctatgggagttaccagccagtagctgtggacaaaaacagattttgtgtgtgtgtgtgtgtattttcatatacgtatgtatatcataatatcacaggaccagttacttttgcattggaccgaagatgtatgtattaattactgtttgtgttctatttgtactgttctggaaagacttctggaggtaaaatctaggttttttgattccacttcttgcttccttccttcttccctcctctcccttcccctcccctcccttctcatcccttcccgttcccttcctcccccttccctccatccccccctcccctccctcccctccctcccctcctctctcccccttcccctccctccctccctctccctccctctcccctcccctccccccttgacggagtttagctcttgttgtccaggctggagtgtagtggcacgatcacggctcactgcaactccacctaccggtttcaagtgattctcctgcctcagcctccctgcgtagctgggattacaagggctgccaccacgcccggctaattttttttttattagtagagacagagtttcaacatgttggccagactggtcttgaactcctgacctcaggtgatccacctgccttggcctcccaaaatgctaggattacaggcgtgagccaccaggcccggccggttctactgctttctatattctgaatactttcactgtcagaccttatttaacaagaatcagctaatctttattcaattattttggtcagttaatacaactagaagttaggggaacttggagaagtatgtcaacaatgtgtcaatagtcctaccacataattaataattctgttcccttttcagtccccttcacagtttttgttttttcgagacagagccttgctctgtcacccaggctggagtgcagtggtatgatctcagctcaaggcaacctccgcctcccaggttcaagcgattctcccgccttagcctcctgagtatctgggactacaggtgtgcgccactacagctggctattttttttacttttagtagagacggagtttcaccatattcaccaggctggtctcgaactcctgacctcaagcgatctacccaccttggcctcccaaagcgctgggaggcatgagccactgcgcccagcctcgctcaactaattttttttatttttagcagacacggagttttcgccatgttggccaggctggtcgcaaactcctaagtcctttctttttccccccagtggttatctggttacctgttgttgttttttcctttttgttttttttgagagtctcactctgtcgccaggctggagtgcagtggcataatctcggctcactgcaacctccgcctcccgggttcaagtgattctcctgcctcagcctcccgagtagctgggactacaggcatgcaccaccatgcctagctaatttttgtatttttagtagagacagtatttcaccatgttggccaggctggtctcaaactcctgacctcaggtgatccccctgccttggcctcccaaagtgctgggattacaggtgtaagctattgtgcccggcctttttaagtttctgatctgatatattctgtgtggctgactgctgcaactttagttcatctgtcttaaaatgaaaaggggcacaataatatttttttctttactgagacaggttctcactgttgcctgaaccacgagtgcagtggcacaatcaccactcactgcagccttgacttccgggttcaagccatcctctcacctcagcttcctgagtagttgggactacagttgcatgccaccatgcctggctaatttttgtggttttgtttttgttttgtttttgagatggagtcttgctctgttgcccaggctagaaatgcagtggcatgatcttggctcactgcagcctccacctctttgattcaagcaattctcctgcctcagcctcccgagtagctgggattacaggtgcccgccactgtgtccagctaatttttgtgttttcagtagagacaggatttcaccatcttgcccaggccggtctcgaactccttacctcgtgatccacctgccttggcctcccaaagtgtcgggattacaggcgtgagccaccgtgcttggccaatttttgtagtttctgtagagacagggttttgctatgtttcccccggctggtcctgggttcatgttgatcttcctgccttggcctcccaaaattctgggattacaggtgtgagccgctgtgcctggctgaggtacagtaataagatacatctggaggattaaaggtcaaccccaattcagtttaaataagatagattccctttggatatacgggaaatttattttacctcttgggcaattaaacgcaggaatggctacaggaatgactttggagtttccatcttgagaaatctaagagggagaaggtccaggaagttcaggcagagaagtctccctgactgcgggcaagttagatggtcggctacatttcttccagttctgattctttgatgcttacaatgaatcattttctattcagatagagatgtctttgttcagttatcttattgatgtgccaaagaaaagagaccaggagtgtctaaaatgtatattttggtagaaataatttcatttaaagccctttttttttttaaattatcttcagcagacaaaagctttctgtgtcaaattggcataaaagtttctaaacatttggctgggcgcggtggctcatgcctgtaatcccagcccttcgggaggctgaggtgtgcggatcatgaggtcaagagatcaagaccatcctggccaacatggtgaaagcccgtctctactaaaaatacaaaaattagccaggcgtggtggcacgcgcctgtaatcccagctacttgggaggctgaggcaggagaatcgcttgaacctgggaggtggagatagattgcgccactgcactccagcctggcaagagagagagactccatctgaaaaaataaatcaaagtttctgaacacttactctcaattcctgtacttatctcattatgggctggaaacaaacaaacctccctcctctgtgggtggagtacttctgactggacagacatttatttatttttgagacggagtcttactctgtcgcccaggctggagtgctgtggcacgatcttggctcacttcaaactccgcctcccgggttcaagtgattctcttgcctcagcctcccgagtatctgtgaatacaggcgcgcacacacgcccagctaatttttgtacttttgtagacacggggtttcaccatgttggccaagctggtctcaaactcctgacctcaggttattcagctgccttggcctcccaaagtgctgggattacaggtgtgagccactgcacctggcctggacagacatttaaagtaaggcctactgctgcttgtttagtctccataggtgcttttttatttttttcttcttctttattagtatgttatgtatttgtgaaaaacaaaacagttctagtaataatgtaagacaaatataagattagtagtattgagcttgattcatctgaagaggattttatgaaaataaaccactatggcaggactgcaagataattttttgttcttcagaatgttcattaactgctggattcagagagagaatgaagacttcagtagatcctgtatgtatagcaggaggccatgtcccaccagcagaaatgaaactgcttgaactaacaagttgtctcagtccgaattctctttatcttgaatattttaaatgtggagttttgtttttcttttatatttacaattatatttaggttatttcagggacacttattgtaggacttgtgtgtctgatccagtgcatttgatcttgcttcttttacaatggatgtaaccaaggaaactaatgggtgaccctctctgagttttagttcataattgtgacagttgtcattctgaaaagcttcatactctatttttgcttgtagttaaatagtatagaacattttatgttactcccatagaatgttccagaaattcatgaaatgttaaaagcagcagtagtatgttaacattaacaaagcatgaaaaataaataaataaaataaatgtctgtccaatgagaaatactgcagccacagaagagggaggtttgtttgcttctagcctatcatgagataagtacatgaattgagagtaagtgttaaagacctcttcttggccgggcatggtggctcacgcctgtaatctgagtactttgggcagctgaggtgggtggatcacttgcggtcaggaggttgagacaagcctggccaacatggtgaaacctggtctctacaaaaatacaaaaaattagctgggcatggtggcgggcgcctataaccccagctattgggaggctgaggcaggagaatcgcttgagcctgggaggcggaggttgtggtgggccaggatcacgctactttactccagtctgggcgatggaatgagacacagtctcaaaaaaaaaaaaaaaatccattaatataggagcattattaactgcccttactgccttttcaggcaaaagggattctatgaaatatttttacgaatatcttagaatatgcaactgaatttgattggttaacactgaaataaacttgctattaaaaagaaaactaaggcccagtatggaggctcacgcctgtaatcccagcaccttgggaggccaaggcaggttggatcacctgaggtcaggagtttaagaccagccaggccaacatggtgaaaccctgtctctactaaaaatacaaaaaattagtcgggcgttgtagcgggcacctataatcccagctacttacttgggatgctgaggcaggagaattgcttgaacccgggaggcacaggttgcagtgagccgaaattgcactgttgcactctagcctggacaacatgtgtgaaactccatctcaactaaagaaaaaaaaggaaaactaggccgggtgcagtggcttaatgcctgtaatcccagcactttgggaggccaaggtaggtggctcacttgaggccaggagtttgagaccagcctggccaacatggcgaaaccccgtctctactaaaaatacaaaaattaatcaggcatggtggtgcatgcctgtaattccagctactcgggaggctgaggcaggagaattgcttgaacccaggaggcagaggttaaagaccctgtctcaaaaaaaaaaaaaaaaaaaaaaaaaaaggaaaactaggctgtgtgaagggtgaaggtggctcatgcctgtgatcccagcacttagggagggtgagatgggaggatcacttgagtccaggaatttgagaccagcctgggtaacataaggagaccccatcttttaaaaataaaaaaaaaaaaaaaacaaaaatagccagttgtggtggtgcgcgcctgtagtcccagctatttgggagactgatataggaggattgcttgagcccaggagtttgaggctacagtgggctgtgattgaggtactgcactccagcctgggccacagagtgagaccctgtctcaatatcctccacctgccaccccacccctccacaaaaaacaaacaaacaaaaaaactaaaaatatgtatactattaagctcttagtaaaagtttcctttcatagaaaatatagaatttttgcattcactttgcactttgaatcagttttttcccggtttagaaacaaccctaatgagagacaattcatttggaaaattggatgggttccagtttttttgctgtcagagaattggataaatagcctatatcatgtgataattactataaagcaatgaagcttgacagtgaggtgagggatttgaaaacatacagttaataagcaaggcgaattactaccctgtttgtaaatatggatacatttccaagagtgaaaaaaagaagttgataccatttatgttaaatataaccaaaacatgttacatgttatctggctacatgtaaatatacataaaacaagtggactagaaggctgcacaggacttgcagtgggacctctgggaatagggggagcaggatccacccggagctggaaggggccgtagagctagagttccctgttcttatttaaaaatcttcatgtccttgggccaggcgcggtggctcacgcctgtaatcccagcactttgggaggccgaggcaggtggatcacaaggtcatgaattcaagaccagcttggccaggatggtgaaaccccatctgtactaaaaatacaagaattagccgggcatggcggcaggcgcctgtaatcccagctactagagaggctgaggcaggagaattgcttgaacctgggaagtggaggttgcagtgagccaagactgcaccattgcactccagcctgggcaacagcgagactccgtcaaaaaacaaaacaaaacaaaaaaaaacttcatgtccttatatatttgtgtaatttagaaaagaacataaacaacaaatatgggaaaagatgaacaatggttaattctgtggagtgggagcatggtgggtgattattttgtttatgcttttaggtatgtttccaaccatcaaaccaaaaaaaaaagaaaaagagaaacagatccttgatcttaacaggaaatggctgtcattatgagtattatttctattccctgttttcatagaaaatgtggacacagacttgccaggcagcctggggcagagtgaagagaagcccgtgcctgctgcgcctgtgcccagcccggtggccccggccccagtgccatccagaagaaatccccctggcggcaagtccagcctcgtcttgggttagctctgactgtcctgaacgctgtcgttctgtctgtttcctccatgcttgtgaactgcacaacttgagcctgactgtacatctcttggatttgtttcattaaaaagaagcactttatgtactgctgtcttttttttttttcttttgaagaacaggtttctctctgtccttgactcttgggtctgtgggccatggcatgagtgttttctagtagtagattggagggaaagctttgtgacacttagtactgtgtttttaagaagaaataatttggttccagatgtgttagaggatcttttgtactgaggtttttaacactttacttgggtttaccaagcctcaactggacagaccataaacagtccacaggcaccgttcctgccaggccccaacccacagggagtctctccgcagagccttcttggtgttgccctaacttgccagtggcctttgctcagagcctcctcctgtgacatgtgaacaatgaagaggcctgcgcctcctgccttgccgcctgcaaagcaaagaaactgccttttattttttaaccttaaaaagtagccagatagtaacaagactggctggctgatgagcaaagcctttgctctcacgcagaggaaggcttggatgtacaatgaaactgcctggaactaaaagcagtgaagcaagggaggcaatcacactgaagcgggtcttcctccaggaacggggtcccacaggcgtgttgttttaaataacctgatgctgtgtgcatgatgctggtgcttgaccatgaaaggaaagtctcatccttaaaatgtgttgtacttcacaatcctggactgttgcttcaagtaaacaatatccacattttgaaa

SEQ ID NO: 42 - DNA, 73334 bp, Homo sapiens
attgtttgaatttgaaaacggtaacatcgcagtgctgctcgcgggtctggctagtcaggcgaagtttgcaggtgaggaggtgacccgcgggaatgtgtggggaaggaggtgggtgactgcgcatgtatggggcctaaggtggggaaacggctttggcaatgtggacatgttccgacagggctcataccccagtggaggttactgtcaggaactgggttgcggagcgatgcgaacacggggtacgcagcgaggaatgagtcatactaattcggttacggtttaaatctcgcctccactgctaattagctgagtgacgcaagacaattcatttaatctctctctgtaccttagttttcttatcagttaaaaggctgcaatgaagtgtctatttctttcggcttttgtgaagattaaatggtaatgtgtaaagttattagtgctggcacacagtaggtactaaatgtttgcagttattaatattattattgttgttgcttctgttgttgttgaggaacaggcctgttttgccacacctagttttctgaagctctgaggtgagcagtttgctcggctggtaggtaacacggcctttttgcggggggagccctgtggtagcctctgtgcacttatttccagactactcctactggtccttggggcttgcccttctagggttttgcagtgccaggctgaagagtttgtggcacagtgactgctgtcattccccagtttagaaggctttctccatctcgattcgctcgctggttcagtgatgcatgtctggcacagttctcttatatttcttgctaaactactagtttacagaagttcacgccttatgggttaggtagtgtaacagtgtatttatcttacatgtccaagactccagattttaaattgtaaaaataacataaaatactcatcgattagttgtgaagactttttttgaggctttgtgttgtagaccacattcagaaacctcattcagcaacagattctgctatttttcaccaaagtctccaattgtggattcttattggagagagggtaaatatgcagttttccagtcagagcagccttttgaaatgaaaaatgaggtcttggagcctgctgtcacgaaagataatattacagactaggaccgacttttttttttttttttggaatagtattttctttataaccattattttaagtcattaggtagtctttatccctgcataagtcgctgaatttgttataggggatacagagtggtataaggcaaggttcttgccatcaagaagtttccagtttagttgggaaggccacgtataagtagaagtcatctaaaatcgcaagaagttacagtaagtctgaacacttttagaaatgctaggaagtagtttgttcattgaaaaatgagcatatgaacaaatactttattataactgcttttagtacataggaatattctttttaattcagcaatttaaaagatttatcaacacttttctttaaaccaaaaattattatttgaagccacaggtgttttttagttttctgggcatttccatgaactctgtgttatgaaatgtcaggccggtactttaacgttttgcagatgctcccccctctgcacccccttacccatgatctagatcagtgctttccttagtctttttgcaatttaggggaaaaaagtcaactatgttcttgtgatacgtttaggaatttcagcctgatcaaggaaaaagattgacaacaagatggcaggaataaacaaggattttgacaggattgtaggcaaaggaaatccgtctcagtttgggaccttttctagaccagggtgaggggccaccatctagaggggaaagagggcaaggggaatggggagtcggggaggaaagaatcatagaggggcttacatgcctaaatgatgttgcacagtggagagtctccggatcatagaaactctcaagggcagcagtggcttgggggtcttgataatcccgggttttatgtgtctggcaaatgttgggtgcagtttcatggggcattcaaacctggcaggctctaaatggctaaaaatatgcttattttgggccattttgaaagtaaatggatgcttcagaatttgactttggcgccccagcaggcttttcccttttttttttttttttttgacgcagtcttgctctgtgttcaggctggagcgcagtggcgcagtctcggctcactgcagcctctgcctcctgggttcaagcgattctcctacctcagcctccttagtagctgggactacaggcgcatgccaccacacccggctaatttttgtatttttagtagagtcggggtttcaccatgttggccaggagggtctcgatctcctgacctcgtgatccacccacctcggcctcccaaagtgctgggattacaggtgtgagccactgcgcccggccgtaggctttttaatttttattttaaacattcatggtccttgatccagtgggcttttgagctaagatccctaccagctgtgaagaagtttacactgtagagctattatgcaagggccatctttggttcattttatataatacctgtgggtgatggtcgttactactttcttgagctaggaaccttagtttgggagtcactgatctgtatattttttaatcttgtcaaaaaacagcacagagtcctcctcctctctctggtattgtacatctagtagattctcagtaaatattagaatgttagtattttttagttaaggttatccttaagtttaccttttagtttagtgatttgatgtttaattcaatggtaatagtttactgatgcattattcctatttaacttaaaacctgtgatgtgtcaggtactgttttgaatgtgtttacatatattattttactttttacttgaatttgaaattgaaaacaatttttcagataactgagttttgttttgttttttttttttgacggaatctcactctgtcacccaggcttgagtgcagtggcgcgatcgcgattcactgcaacctctgcctcccgggttcaagcaattttctgcttcagcctcccgagtagctgggattacaggtgcctggcaccacgcctggctaattttttttgtatttttagtagagacggggtttcaccatcttggccaggctggtcttgaactcctggcctcgtgatcgacccgccttggcctcccaaagtgctgggattacaggcgtgagccaccgcaccagacccagataactgagttttaacttttaaatgctaaaacaaagtctgtaagtaacattctacaggagtcactaagtagatgacacaaggttataatttaccctgtgatctccttactatttgagttttgagaggatttcacggagagagtaaatattttataccatctttacagattacctgtactcacgaaacctctttgaatggatattatatgaaaatagtaggctgtgttcagtattattagaatcagagtctgtaaatataatttgatctttagtctttcctgtagggcattgtgttataaatgaagcaatgtaatgcgtttcttttctaaaatctagttatttggagggaagtagtgggctagacttttgaaagtgtgggtggcttacatgctgacttattaaggttgttaaagaagttgctgttattcttgcagaatggaatctaattttaatcaagagggagtacctcgaccatcttatgtttttagtgctgacccaattgcaaggccttcagaaataaatttcgatggcattaagcttgatctgtctcatgaattttccttagttgctccaaatactgaggtaagtacaagaaaagtattgtgttgattatcatgcctccttctaatgcaagggttggcaaacaatggcctgtttttgtattacctgtttttgtacttagatacaagctaagaattgtttttatatttttaaatagtggaagaaaaatcaaaataggaataatgtcacataacataaaaattatatgaatttcaaacatcactgtccataaagttttattgcatcacaatcgtgcttattggtttatttatttactacatccgttgtggcactataatggcagagttgagtagttgtgaggagactatagggtctctagaacctaaaatattagctgtctagctctttacagagaaaatttattgactcctggattggcatgatgtttttgagatttgtcgtgtgtcatacatcagtagtttttccctttttattgctaaatagttgtctgttgtgcagatatgccacatttccatttgtcgtttgatggacatttaggtagtttacagtttgaggtcattataaataatgctgctttgaacattcatgtgcaagcctttttgtgaacttgtgttttcatttttctttggtaaatacctaggaatacaaactgtataagtttaactttataagtaactactaaactgtttttcaaagtggctatcccagcagtggcaatgtatgtaggttccagtgcttctacctctttgctaacacttgataatggaactttttatttctagtggatgtgtaatggtatcctgttgtggttttagtttgccctttctaatgagcactctttcaagtattcttggccatttttctactttctttgtaaagtgtctcttcagatctttttcccatttaaattaggttgtttcattagtgttttgtgagaaatctttatgtatacaaatcctttatcagattaatagtgtcttgatgatcagacattttaaaatttaaagacattcaatttaacattttcttttcttctttggtgaatttttttgtgtgtgtgttctctttaagaaactttcgccttccccaaagtttttgtcttactttttctagaaattttagttttcatttgagtagttatatctgtggtccattttgaacagtttttgtgtgcagttgatatagggacccaggttaacttttttctttttctttttagcttccatacatttttttttttttaactacataagtagttatttcagcattatctattgaaaagactttcctttccctgttgttttggtgctttacaaacggctgtgtatatgtggatctatttctggattttattctcttcctttgacctatttgtccttattccaacacaatactctctatttctgtagctttataatgattcttgaaattaggtagtgtgaattctccagttttgcttttctaggaaaattttggcttttctaggtcctttgcatattcataaattttagaatcagcttgccagtttctacaagacagcatcttgggattttgactgggattgcattaaatctgtggatcagtttggagagaattgacatcttgacaatattgagtcttaatccatgaacacagtattcttcattttatttaggtctttaatgtcttagcagtattttatacttgtcaatgtagaggcctttcgtgtcttttgtcaaatatatttataaacattttatgttatttgatgctattgtaaatatttttagttgctttatttaggcataatgaaacactgcatatattttagatacgcagtttgataagttttgacatgtgcatacacttatgtaactgtcactacagtcaagatagtgagtataaccattaccctcaaaagtttccttgaggctccttgtaagtgctccctcccatcacacctccaagtaacctctgattagcattttgttagtatacattaattttttgtagatttgttggattttgtatgcgtatgttcatgttgtttctaaataaagaaaattttatttcttccttcccaatttggatgacttttgtcttttcatttcctttttttctttccattttttttttccttttctttcccctcctctcccctccacttctttctttcccttcttcccttcccttttacctttctttttcctttccttttctcttccctttttctttcccttacccctccttttttcttcccccatcccctttcccccttcacacccaattacaccagctagaacctttaatacaatgttactagaagtggggaagcagaaatcctcttcttattactcattttgctgctcatcttagattgagtctttcctgttaagtttgttgttagcgatagattttttgtaagtgccctttatcaggatgaggaagtttgcattcattacactttgctgagaatttttattacagatggacgttggattttgtcaaatgctgttttcccatctgtagagataaaagtttctcttcatttattcttttaatatggttaattgcctggattgatttttgaatgctaaacagactttatattcctagaataaaccattcttggtcagatgtattatcctgttttatatattggctagtattttgtgtgggaaattttgcgtatatcttaatgtggtattttgttttctaattttttcctgaggatatctttgtcaattgtgttattcggcttatgtcaaactcaaaattagttaaggtattttctcttcctatattttcttaaagagtttatgtacaatttgtattttttttttttttgagacggagttctgctcttgttgcccaggctggagtgcaatggcgccatcttggctcaccgcaatctctgcctcccaggttcaagcgattctcctgccttagcctcccaagtagctgggattacaggcatgcaccaccatgcctggctaattttgtatttttagttgagatggggtttctccatgttggtcaggctggtctcgaactcccgacctcaggtgatccacccgcctcggcctcccaaagtgttgggattacaggcatgagccaccgctcctggcctgatcattttcttaaatgtttgatagaatttactgttaaactactagggcctgaatttttttttttgtggcattattttgtttgaaaatggattcagtttgcttcatagaaattgggttattcagattttctagttatgtctgttttgattaagttgcatttatcaagttgtttcctttttacttttttaaaaaaacattaaaacatttctttaaaattacattttctatgcacatttcttcctcagaaaaagtaacaaggagaatggtacatagtaaaaaaattctgaatacctcatggaattgagcatttgaataatagaatattctagttacttttgatttattctagagttatattttccaatgacttagggcctcattaattatattaggcttttgtggaataaagcctttttataaacttcacgtataaatacaggagatggaggaaattggatcttttttggtgtattttgtttttatttaaatagatttattgagtttttctaacattattaaaagcaggatagtgactgcttagaaattctttatcatctcagattattatgtaaaaagtagccatgttaaggaaaaatggtctctgaaaagccgtatctttcaaaaacacaatgtttttctcctttattttttaaggcaaacagtttcgaatctaaagattatctccaggtttgtcttcgaataagaccatttacacagtcagaaaaagaacttgagtctgaggtttgtgttgaatttaatagaattttaatattttactttcatttaaaatggcaaaatactagtttttatttattgggggtatgttttctagggctgtgtgcatattctggattcacagactgttgtgctgaaagagcctcaatgcatccttggtcggttaagtgaaaaaagctcagggcagatggcacagaaattcagtttttccaaggtaaaactgaagtgtttttgttttttgttttaaagataaagagacttggcttaggctaaattgctatataattgtatataatgaactatacattttatgcttatgcaacttagattttaaggataagactcaaatctcaggtctggaaatatataattggatgtaaagagatcactgtagtgttattaaagttattattactatatttttattaaagttattattaatatatttttaagaaatattcttttcaaaacttaggtgaatacttgattccctggtacagatttctatcttgaaaactttctggtagtaaaactatcaaatgtatttgtgggagtggggatgtggcacctattttaagaatgaatcttttaaatttttaaacagtagtgttgggatggaacacactattaatattaacttgaattttctaaaaagagtttttaaaaaatgtttgcttaggtttttggcccagcaactacacagaaggaattctttcagggttgcattatgcaaccagtaaaagacctcttgaaaggacagagtcgtctgatttttacttacgggctaaccaattcaggaaaaacatatacatttcaaggtaaatattgttttattttggttggaaaggataaggaagcaataataatcactcagtgtttttataatacatacatgtagttatgttgctattacctagtatgcgtttgctctatttttaatagtactagcatattattacgtattgctgtttttttttttttttggcgggggagggacagagtctcactctgttgcccaggctggagtgcagtggtgtgatctcagctcactacaacctctgcctcctgggttcagatgactctcctgcctgagctgctcagcttcccaagtagctgggactacaggcgtgcgccaccatgccaagctagtttttatatttttgtagaaatgggggttcaccattttggccaggctagtctcgaactcctgacctcaggtgatatgcccaccttggccttccaaagtgcttggattacaggcaagagccaccatgcctggccttgctattggcttttaattcaaatttatttaattcatttgtaaaaatactttacccattgatagagatttagatgatgattaaaatccagaaaaagtattgatgtgatacagagaattaagcataaatgaccagaagaaattttatatttcattttacttttatagtttgtgattatgggtggttacaaatcttaatatggttgcattatctgaatgtaaagtttcatgtttacatcagaataatagtcaataaaatgttggtaatactgtgaataacaaagtgatggaaaactgagtaatccttagctatcatttccgtttcagttgttgactcttgcctattggtagtataaaaggagctttaataaacaagtaaagtttcctctttcctagtagactgagagagtataacacaaaaattccttttgcagggacagaagaaaatattggcattctgcctcgaactttgaatgtattatttgatagtcttcaagaaagactgtatacaaagatgaaccttaaaccacatagatccagagaatacttaaggttatcatcagaacaagagaaagaagaaattgctagcaaaagtgcattgcttcggcaaattaaagaggtatggaaatattttagtatgtaaaatatgtataattcctgacttcttataaaccctttagattgtttcaccatatattggaatctggtttgtggtggtagtgttttttgttattatttatgttttcgagaaaaataaagcttaaagtgtgaagacatcttttgtatttatattataccaacagcaagaatgtttaaacaatacaaatgtaaatggttctgaaatcttttttgattgttgtagagccagcattgtgctttttatgtaatgattttttaaaattctgttttttaattgtgaaagtaatatgtacccaaaatttaaaatagggaatgtgagaagtaaaaagtaaaagtttcctttaatttcattcctaaagaaaaaattattaatagattgggaagtattgtttttggaccttttctctctctatataaaatccatatacagagctttctatctgtatatacacaaacatggtcatatatatgatgtgtatatcttcatacctttgtttttatatgtatgatataatttttttttttaaacaaaaaagagatcttactatgcttaccattctatgacttggtatttcatttagcgtatcttaaatctcttcctaccttaaatcatgtgcgttttatctgttatgtctttaacttgtttttttaaattttaaatcagcttttaaaactaagtctccattgatggacatttgtattgtttctgtgttttactattttgaacagtgtttcagtaaagaaacattccattgcaaatatatttggtgctaattttcccaaactcaggccaagattggatatttaataatgtctggtttgataggtgaaaaatggctcacttgagcctactttatatttttttaattgtaaattagttgattagtacatcttagaattttttcctgtgaattgtcacatgttctttgtccatttatctagtattgtatgacttttcttgtttactgatttattaaaatgtatttaaaaaaatgaatacattattaatgtattagtgtatgggttgcaaattttctggcttattgtttgcttctcccctgcccccattgtgtttttcttttttttcttcctttttttagtttttagagacaggatcttgctttgtcatccaggctggagtatagcggtatgatcatagctcactgctgtcttgaactcctgggcacaagtgattctcctgcctcgacctcctctgaatagctggaactacaggggcatgccaccactcctggctgttttgattttttttgtagaaatggggtcttggtatgttgcctaggctggacttgaactcttggcctcaagagatcctcttcccttggccttccaaagtgttgagattacatgtttgagctgccaagcctggcccattgtgtttttcagtattcatctattcagcaaattttattaagtcatctgttttttttccaggcaatattttcagttttgaggacaaatggtactgccctcatggagactgacaataaataaatatgtaatatactgtgaggaggtattgttttatataaggtggtaccatataaacttttaaaaatgaagttatacttgtctgtttattcctcttgtgccttctggattttgtagtatattttcagacattattctattcaaggctgttaaaaactactaattgtttttgtaaatatttttaccctattattattaatgcaaatttttcttttttaaaacatttagaaaccagggttttaaggcagtaaaaagtgtgttaccagtggagttcaaagttgagtctgtgactatggtctctgaaagtagaatagtgttttaacaaaatttatggggattggtggataactccatagccaattcatagaggaaattaaaatcattaataatgaaaaaaatttttcactgggcatggtggttcatgcctgtaatctcagaactttgggagactgaagcaggctgatcacttgaggccaggagttggagactagcctggccaacatggcgaaaccccgtctctattaaaaatacaaaaaattagctgggcatggtgactcacacctgtagtcccagctgcttgggaggctgaggcacaagaattgcttgaacccgggaggtggaggttacagtgagccgagattgcgccactacattccagcctgggtgacagagcaagactctctcaaaaaaaaaaaaaaaaaaattctaacaagttatccagttaaaacatgatactgttttgcctatgaaatgattaaaatgttaaaaaaaaatgagataatgtgctttcatatattgtaaatggttctagaaagcaaattggcaatagtgtgttaagagtgagaacattaaaatattttatatcttttcatccaccaattcacttttaggtgtatactccaaggaaatgggtttatttctatttctaaggaaataataagaatgcagaagaaaatatgtaaagatgtttggcaaaacttggtgaataaattaaatgtttaataataagggaataattaagtcatttcacatgttttatatagccatcaaatgttgtaaacaatttttaattatggggagaaaaagcttacaacataagtgtggggaaaagaatagaagggaaatattttaaaatattaatagtaaccaaccagagtggcaggattatacatgataatattctttttcatagttctctgtatttttccatgaaactatattatttaactaggaaaaattaaagaattcattgaattgagtagatgaaaggttgtgatttggtagtgacttatttggataggtaattaatatcttgattatttaaccttaatgaaaatgtttttttaattttttaaaacaatcttttttttaggttactgtgcataatgatagtgatgatactctttatggtaaggtttcgttgctcacttatctttgatgtatcgattatatgaagtacacttgaaaagcttttaatttttaaatcacttctaatgttttatttttattattaaaaaatttttaggctgggcgcggtggctcatgcctgtaatcccagcactttgggaggctgaggtgggtggatcatgaggtcaagagattgagaccatcctggccaacatgatgaaaccccgtctctactaaaaataaaaaaattacctgggcgtggtggcgcgggcctgtagtcctagctacctgggaggctgaagcaggagaatccttgaactcaggaggtggaggttgcagtgagccgagatcgcgccactgcactccagcctgacaacagagtgaaactgtctcaaaaaaaaaaattttcaccttgtatttatttattttttttctatagacctcttctttggttactaaggatttaatttctataatgacatagtcggtgatacctggaaaatgatacatatttatatgaaatgtcagtcattgtgatgtttcgtttgtattaaatattacagatatcccttttactggttacaattttaatattgaatttgaaagacacttgtttttctttgtcctttacatttaatttctattggttcattaacatattttcaaaaagaaaggaattataagaagttgtctaactttggttaatccacatattatttacatcttcctttgttccaaaaagtttttaacatagatggtcaaaagattaagcatacttggtttttcaagtgtgagaatcgatttgtacttttgtcacgtttttagtcagttgcttactttcgtgattgttttttctttttcttttttttgtaggaagtttaactaactctttgaatatctcagagtttgaagaatccataaaagattatgaacaagccaacttgaatatggctaatagtataaaattttctgtgtgggtttctttctttgaaatttacaatgaatatatttatgacttatttgttcctgtatcatctaaattccaaaagagaaagatgctgcgcctttcccaagacgtaaagggctattcttttataaaaggtatactaatgaatatttttatcttattgctctgaagttctcttcctgggctttgtgatagctgtaagactaaaacaaatagaaaattgaaaattgtaatgctaattattaacattaagagaagaagataattttgtgctttggaagtatgttttggtatatttattaaacttgaatataaaagggtctattttggtattgtatttgcttgagtatcattaattggatttgtggtgatgggaaaagctgtgtatggttatgttcacgttattctcctgctttgtaacagtgtccaaattttggagctatgaaatgttactattcttccggagtggtttttctaaccttttaaaacaattattcacagtaggaaacacatattaataacatcatgattcagtacctacatgcatgtatatatattcatatgtaatatttacaactcaaaagtttcgttaattatacttttactacaaggaatgcactgtaatattttctatattctttgtcatttctacaaaatgctggccagatgcagtggctcacacctgtaatcccagcactttgggaggctgaggcaggtggatcacttgagctcaggaattcgagacgagcttggtcaacatggcaaaacgccatctctacaaaaaatacaaaaattagcctggcatgatcgtatgcatctgtagtcccagctactcaggaggctgaggcaggaggatcacttgagcctaggaggtcaaggctgtagagagccatgatcacgcctttgcactccaggctgggcaacagagtgaaaccttgtctccaaaataaataaataaataaataaataaataaaaattaaaatactggtcatgattcaataaatctgattttatgattcactaataaattacaatcttcagtgtttaatagctaggtaattttacaggtttaatctgtactgtactttgccactctttttttccctgagtgtctaattctaaggaattgttactgtattcaattttccgtttggcagactctgttgacaaacatttattttgtgtgtttgtgtaatttacattctagaacattgttacaatcttctctggtgtaacctgaaatagctgagttgactccagctaggatgtgttgttagaagaaagatttcattatatgtcactaggaaaagactttcaaagagattacattgtagaacacattctttgtctcaataaattaatatatatcctctttattttttaaagatctacaatggattcaagtatctgattccaaagaagcctatagacttttaaaactaggaataaagcaccagagtgttgccttcacaaaattgaataatgcttccagtagaaggtaaagaataaactctgtaagagtaaactcgaatcaccgatagtattctgtgttaatttaaacacagctaattttacattaaagtgggcagtaggttctctcgtgttaaattcataaggcataaaaaacatttggtatacagaataacactaaacacgtttatcaatactgtttcctgtcctgacagtagatttattaatttataggaaatctctgaggtatttttactctttctttatgtcagtatctaagctcagtatttttggagttggtaataatggtggccttttctctgggtctttctcacttatcccctgaatactatataaatatactcagtgagggtataatctcaaggggttaaggaaggaagttttgatgggattgggggatgagaggcaaaggaaataagtttaagcagtgagataattaaagcaggctttttcttagagaaggagccctgttcccgtagtcagttgggcatgggacaatacaagatccggatctataggtcaaatgtatgctttgctttaggtatgtattcagagtattggctagctgtacataatatcattttaactaatattatcttttcaaacaaaatgtcgctttattataaatgatactattaatagaagttgaactgtcaggatataatttgagggatttagagctaggcaaaaggtgattttaggcatttgggtatgtaagtgacagtagaacactggcttgaaatatttaacagctaattggaaaatgcaatggtggactgtagttatactagggtataaataagattgatttgaatacttgtctctcctatttagaatgcagaaattaaaaatgataagataacatttgatctttgtatttcagtcacagcatattcactgttaaaatattacagattgaagattctgaaatgtctcgtgtaattcgagtcagtgagtaagttgaatattctttaaatttaattatttgtaattgttttgaagaacttttaaagtactttttttttcttaattcagattatctttatgtgatcttgctggttcagaacgaactatgaagacacagaatgaaggtgaaaggttaagagagactgggaatatcaacacttctttattgactctgggaaagtgtattaacgtcttgaagaatagtgaaaagtcaaagtaagtgtttctgaaagtgttattagcatattaaatattacaatatttaaactttcaacttttttgtttttagaaagttcttttttgatttttaaactgcttcttatgtaatgactgtgtatagattgtgattcaagtacttaagagatcttggattaaagacaatgatagaaatgtcagttgatgccagtaactcatcaggtaaagtcagtattttccatggcaaatctataccaatagacactgtaaatgagaagcttctaatgctggtttaggatctaaaaccactttattcttattaatgcattgtgtgtggttctagatgcaatagatttttacattaattagcattttaggctgagtaaatataaatcagccttcaccatttctatttagggtgtttcatgacatctcttatatacttgctctatactagggaacataacccagttaaatgtggttttctttataatttacatagtgggttattgttagtaagtagcagcagttaaaacaaacagccaggcatggtggcttatgcctgtaatcccagcacttttggaggccgaggcaggaggattgcttgagcccaggagttcaagaccagcctcatctctactaaaaataaaaataaaaaaattaaccaggtgtggtggcaggcacctgtaatccctgctaccctggaggcagaggcgagaggatcgcttgagcctaagatgttgaggctacagtgagctctgattgtgccactgtactccagtctgggcaaccgagctagaccctgtctcaaaacagaaacaaaaacaaaaacaaacaagaaaagataaaaagaaaactgagaaggactattacatctgaaactaatcactaccctaaagtttaatttcatgataggtggcttaattatttctttgtaaaatgtctcagcaccctgatttcatgagatgttttttaacttacaatgttttctgaaaattttttctgtaggtttcaacagcatgtgcctttccgggaaagtaaactgactcactattttcaaagtttttttaatggtaaagggaaaatttgtatgattgtcaatatcagccaatgttatttagcctatgatgaaacactcaatgtattgaagttctccgccattgcacaaaaagtaaatatttattttattaagcctcttattattagaatattaacagtttttcttgaaataaatattttttacttaatactgtaagcctaggaaataattgaaaattaaaaaggtaaatatttaaccaagtaggaagacatgagaaaggattgaaagttgcccatgctaggattaaaatgacctttagtaataagaattagtaataaacatcagttataaattaatgagtatttttggaatgaattgtctgctctgccattcatcttgttcatttggtacttctgggtgattggaaaaccctctgctaagattaatactgaacacttagcccaggaagatagatttttcctctagtttacatgtgtaagtagcttttttcctatcagaatgttcttttagggatggtgattcctgtttgtatgtttgtttgaatagtttttccttaacacttgagtgttcatttgacttaaatttataaaataatcattttctagtggacagttcttgtcttttctgttttaaaagtcacattgaatattttaacaggtttgtgtcccagacactttaaattcctctcaagagaaattatttggacctgtcaaatcttctcaagatgtatcactagacagtaattcaaacagtaaaatattaaatgtaaaaagagccaccatttcatgggaaaatagtctagaagatttgatggaagacgaggatttggttgaggagctagaaaacgctgaagaaactcaaaatgtggaaactaaacttcttgatgaagatctagataaaacattagaggaaaataaggctttcattagccacgaggagaaaagagtatgtattaagaactcatacttctatgcttgtcttcttattctgaagttaaggttaaatcttaaggctctctctcttcagtttttttcaacagtacactgaagtttttgtgttcaactttatattttgaaaaatttcaaacctatagaaagactagtacaatgaatactcatttatccttcacctggattctccacttaccattttatgagtatgtgaatacacatcttttggtctgtacaatttgaaaataagatccagacataatgacaccttacatctaaatatttgaacatatttttctaagaacatgggcattttcatcatgatcacaagaccatgaaattttcatacccaaaaaatttaatattgatacactaatataacctcgtatactgtttgtattgagagttccccagtgttccaaatatgttctttatagccactttgtttttgtctacagccagagttaacacattgcttttgattattgtgtttctttaatcatttctaatctagcactgacatttttgaaaagtgggtcctagttttctcatagaatacctgcaatttagatttgtttgattatttcttcatgatttaggtttaatacattagggaagctttttatgtaggttaagttgtaaattttccattgcatcacaccaagagccacatgatgtctgatttttccattcttagagatgctaagttttgctcacttggttaagataacagtatttcagatctgtattgcaaaaccatattatctgtggggtgttacttatagaccatgtgagtatcctttcactaagtgattttatgtattccatcagacctttattttgcagtctcaagtacaagtgttaaaaatatctaccaagtacctatgatcccatatcttcaaaaacactaattgtttgtcgtcttgttattatgataaataaataagatttaacggttgtttttttagcttctgtccaattatagtatttatttatttatttatttatttttgagagagggtcttgccctgttgcccaggctagagtgcaatggcacgatctcggcttactgcaacctctgcctcctgggttcaagcgattctcctgcctcagcctcctgagtagctgggagtataggcatgcgtaaccatacccagttaagttttttttgtatctttagtagagatggggtttcaccatgttggccaggctggtctcgaactcctgaccttgcgattgcccgcctcggcctcccaaagtgctgggattataggcatgagccaccttacctggccacctattcccatctttaattggccataactccgtgagtatagatggagtcctcttaccagtgtcctacaaacactagtagacctgtgttcatgggtgtgctttaatggtgttgacacatcacacatcacagtactcttctggattgcagaagtataagtagaacgatgatgtattaggctaaatactctcattttaataatttaccttcatgtccctgaaagcaattattgaacatatgtttggaaacaagaatgatagcttcagatgtagtacaagtcccactttatctggtcactatgtgattagaccgtgttacttgggcttctgtaatgtattaaatagtacctcctcagtgacgaaaggagcctttaatagtctagtttggctggtgcagtggctcacacctgtaattcgagcactttgggaagctgaggtaggaggattgcttgagctcaggagttcaaaactagcctgggcaacatagtgagaccccatctctacaaaaaagtaaaattagttaggcatgatgatgcacaggtgtagtcccagctacttgggaggctgcagtgggaagattgcttgagcccaggatttctaggcagcagtgagccatcactgcactactgcactctggcctgggtgacagagtgagaccttgtcttaaaaacaaagaaacaaaccaaaaaacccagtttttttttttcatttcaaagttgaaatttttgtataatgttggttagtaaaatttctgaaattactagagaaaaatatttaatgctatagtttatgatggattatatagtataaatgcttatcatataagattgactaaatattttaaggaaattcatcaaaatgtctaatatttgacatttaaaaatcaatatgattaggtgttggcatgctttatttttttcttctagagacaaagtcttgctctgttacctaggctggagtgcaatagtgtagttatggctcactgcagcttcgaaatcctgggctcaagtgatcctcttgcctcagtctcctgagtagctgggaccacagatgcatgccaccacccctaactaatttttaaaaatgttttgtagacatgaggccttgctctattgcccaggctgatcttgaacccttgggctcaggcaatcctcctgccttgcaaagcgctgggattacagatgtgagtcaatgtgcccagccctttcttgacattttaattaaaggattgggacttttaaaaaccattataaaataccttggtattagcatacatatacttaaattcgtttagctgtaatagccagcctaaattttttcagcaaaaactttatcagatgctaacaatgataaaacctaattattgaaaactattaaacttcccgccaggcgcggtggctcatgcctgtaatcccagcactttgggaggccaaggtgggtggatcatgaggttgagagattaagaccatcctggctaacacggtgaaaccctgtctctactaaaaatacaaaaaattagccaggcgtggtttctggcgcctgtagtcccagctactcgggaggttgaggcaggagaatggcgtgaacctggggggcggaggttgcagtgagccgagatcgagccactgcactccagcctgggcgacagagtgagactccgtctcaaaaaaaataaataaataaaataaacaaacttcccaaggtttttccacattcattctgatgtctccttcaatagttattatttattgttttactcagaaagtatgtagtttaaaattattaaaatagtattatgtatttatagtagagtgaaaaagaaaatctaaatataaagatctctcaaatctaccatgaatgttaatggatttttattatatattactgttttgtaacctggtattctttatataaaaataaattgtgaaaagtatgaattattaatataggttatcattgattacggtagtttatggtagtaccataattaaaccaatcctttaacattggttgagttgggttcactttttcattatttaaacacaactaccatcacaaaacaacaacactgtgatcagcattcatacaaccagaacatggggttatattataattattttcagtataaattcttggaggcagagtttcaaagtctggatagctgtagaactattttcaaatataaagttgagacattggaagatctgtagcttagagtttattgtttaatttgttgttgagtaactttaaatagaaacattaaaaagaatatgtagctgtttccttaatgctacaatttatgttatgaatgtataatggtcatgttaagtgttttatttattgctttatttatatattgcacatttttcatgattatgtatgtgtttcaaaggctatagaattgctgttgacatctggatagttataaaagcctaatataagtttatgtaacatctttatttgacagattagtaagtgggtgttcttagcaacttctctggtgtatgcaatccttgggctttagacttttacaggccacttttaaactcaacctttagcatttaccagagatctgatccttatgcttcccacctgtgaaatatggatgataccaagctcacagaaagttgtggattaaatgaagcaaatatggaactccccagagtagttcttgatagataataaatgcactaattaactttacttattttcttagtatagctaaacagtgagacgagttaccaaaggtctatttctaaaatgtggaaaggccaacctgatttttcagttaacaaatctttgcaaacatataattttcagtgagaacattatcactattaaaaaggacacagaattacaattgactaaatgtaaagttttattttttgaacagttggacggtatttctcttgggatatatttattcttttataagaattttatcatttacatgtaatagaaactgttggacttaatagaagacttgaaaaaaaaactgataaatgaaaaaaaggaaaaattaaccttggaatttaaaattcgagaagaagttacacaggagtttactcagtattgggctcaacgggaagctgactttaagtaagttatttatttcatgtccaggtaaaaattgagaattttatttagttttttagtttttttttttacttagtttactttttatattaggtggcttctgaattctgatctctttatacaagcttgaaaatagctgttactggtctggtgcggtggctcacgcctgtaatcccagcattttgggaggcctaggcaggcggatcactgaaggtcaggaggtcgagatcagcctggccaacatggtgaaacctcgtctgtactaaaaatagaaaaattagctgggcgtactggcatgttcctgaagtcccagctgctttcaggaggctgaggcacgagaatctcttgaacctgggaggtgtaggttgcagtgagctgagattgtgtcactgcactccagcctgggcgacagagtgagactcttgtctcagagaagaaaaaaaagaatatagctgtaactaatcccatgcatggttatttaaattttctctcttttttaaatttaaattttaattttttgagatggagtcttgtgctgtcacccaggctggtattgagtggtgcgatcttggctcacggcaacctgcacctcctgggttcaagcaattcttctgccttagcctctcctgccttagcctcctgagtagctgggattacaggcacacaccaccacgcccagctaatttttgtgtttttagtagagacggtgttgctgtgttggccaggctggtttcaaactcctggcctgaagtgatccacccgcctccgcctcccaaattgctgggattacaggcgtgaaccactgtacctggactaaattttcttttaatctagaatatacttaaacttagatgtttaaaacaaaaacacaaagtagttcgttttctgtttcttaatgggattaatttgtattttgaagggagactctgcttcaagaacgagagatattagaagaaaatgctgaacgtcgtttggctatcttcaaggatttggttggtaaatgtgacactcgagaagaagcagcgaaagacatttgtgccacaaaagttgaaactgaagtatgttaattgaagtatttaaaaatatccagtgaggttttggtaccagggtttagtgtaccacatcaatgatgagaaacaccaagatagtttagaattaaaacaatgctttgtgtgtagctttattataattaggcatgtttttttagaagtgtaaggcaccaagaatttaaatataatgattggttttgaaaaatttatacctctgttatatatatatatatcttattttggtattgcttgaatcattgtgttgtaggcagatagattcttttttgagatttgtcttacttaacatttttaaataaaaagaattttaaaggtgtaagagacctaagacgtcatttacttgctgttctgattaaaacaaaaatgtttatgtataaaaagggttgcccttgccgggcaactaccgtttcttactcttttaaaattttatttgtttatttatttattatagttttagagttagggtcttgccgtgttacccaggctgatcttgaattcctggcttcaagcagtcctcctgcccagcctcccaggtggctgagattacaggtgcacgccactgtgctcagcttattctctacttgtaatataagaaaaattatccttttctgctgcttccactgaagctgaaattgatcagttttttgggggagttggtttttttttgtttttgtttagttttttaatcactcagttcaagtgcctgtgacagtgatgtccagacgtctgctgtcaagcaaaccttatgtatccttgacgtggtttgggattgactgagttgtgaaaatgtaggtttgtttcatgcactatcccaacaaaaccttttaagtctcattatataattgaaagtatacctgaactaggtaatcataattgttctataatgacttgtcacagtttgtaacattgtttttatgcgaaaatatgcctcatggtccatacagcagaaaataaataatggaacacaggtttttcataattggagttgcttctatataatttattttaaagaatttcaagtgatgaattttttgcttttttaaaaactgtctaaattagatggtaccacatgtaaagggtgaaccctactgttaatattaggcatgtggtttttgctatttttaggaaacacataattatgtaggatttgaagatattattgattctcttcaagataatgttgctgatattaagaaacaggctgaaattgctcacttatatattgcatctcttcctgacccccaggaagctactgcttgtttagaactaaagtttaatcaaattaaagctgaattagctaaaaccaaaggagaattaatcaaaaccaaagaagagttaaaaaagagagaaaatggtaagtggatacattttacttttatttagatattgtaaacacataaaaagtactcttggtaagtataagagatttatgtagctcatttaccgtagtgaccagaaaattctttcatctaggtaacatattttaatattttaccatttgtatgactttgtagtaatttactactaaaaatattttttgacttccatttattttagaccaatattattagaaaatgagcttctcaacaaaaaaagtcaaaacaagtgttaactttatgagtaaagctgtaaattttgttatatatatatattttttatgacagcgtctcgctctgtcaccaaggctggagtcagtagtggcatcacagctcactgcagccttctactcctgggctcaattactcctcttgcctcagcttcctgaatacttgggaccacaagtgtgcactaccacagcggctgcattttttttttttcttttttgtagagatgggatcttgctatgctgcccagattggtcttgaactcctaggctcaagtgatactgcctgcctcggcctcccaaagtgctgggattacaggcatgagccgtgctgtgcctggccttgttctatattctttataaattcttgcagtatagaagattcactgttgggatagagtgactactgtggagtggtttaaagtaatttgttagtttgatgcttcattctaactaggagggcattttctttttctgtcttcccccccccttttttttttaaagacagggtctcactctgtcacccaggctggagcgcagaggcatgatcatggctcactgcagttttccacctcctgggctcaagtgatccttccaccttagtctcctgagtagcttggactacagacatgtgccaccatgctgagggcattttatatacataaatagaattgtttgtaatatctgcattttaagaattagttgcaataactgctctgcccttttttgtgtgaaacaaatgggtagaaaataacacgtaagtggtgcctttgcattatgaaatgtacttaaaaagcactagctccttttcttctctgatgctatgccagttctttactatttagcatatgccacctatttttatcctgagttttagaagtggctttttctgaaacattaccctgttgtggttgaattagcagatttttttttaatgagtagggtgtgcttctagtgctatcaaaatcctttttattgaatgtaacagtaaagtgtcactagagcagcatatgtttcatagttattcagtgatacatatttttagatgcttagatatttattttcaatgttctttattttttcagaatcagattcattgattcaagagcttgagacatctaataaggtaatgctttaagttttattttgtcttgataaggtatttaattaacaaaggggtatgaatgatgactagatttgtttattttaaaaaataattaaacagtaatatagtctcttggtatgcatgggggattggttttattctgttattttttctgttcttctttggcttgagtcttcttatttcaacttgtatttatcctttcaaaaagctgaatattttaaaatatgatcagatataaataattcaagatcttggtatctaatatccagtatttaaagaacaaaaatgtacttagaagacattacacctactgtttatacaattcctatcttttcttgtattttttctacttatgaaaatagtagacactagttgtaccaattaccttaagctatataaatagaaaataaaaaatttcccataatgttcttcctaaatttaaaacaaaaccaaaccaacttgtttggaagctctttagactgttactttatgtatgtatttatagaacacttaccatttaccagatactccttcaagtgctttttattaactcatttaaatgttagagcaactttatgatgtaacttgcccagggtgacatagtttttttagttttatttatttattgtttttgaaatggagtctcactctgttgcccaggctggagtgcagtggcatggctcactgcagcctacgtttcctgggttcaagtgattctcctgcctcagcctcccaagtagttagggttacaggtggccaccacccccggctgatttttgtatttttcagtggagacgggctttcacgatgttggccaggctggtctcaaactcctgacttcaggtaatctccccaccaggtaatttggcctcccaaagtgctgggattacaggcatgagccactgtgcctggcccagggtgacatattaaaagggatagcagctaggatttgagcccaggcagtctggctccaaattcctcttatatgctatatagcttcttttttctttgtgtgtgtgtgtgtgtgtgtgtgtgtgtgtgtgtgtgtgtgtatgtaatttttttaaaggcaaaaataagatcatgctgtgcatagtgtgttgccactgattagctttatttaactttaaaatttgaaggaattataaaactgtttgcattattaatcatatttgcattctagttatcctaaagtatattcatgaaacattgctttttcttctttccaaagaaaataattacacagaatcaaagaattaaagaattgataaatataattgatcaaaaagaagatactatcaacgaatttcagaacctaaagtctcatatggaaaacacatttaaatgcaatgtaagaatttaaccttgtgttatattaataaattagataagcatatgttttggttgaaaggaaataatttaaaatagcttatgcaactaagactaatttattgagaatgttgaattgcttatgcaacattgaactcaatttactgttttccaaatctgaatttttgagaacttagacgagggtgtttgacttctttgaacatacttttccacaagatacgctggcagtgctttgcatgtaaaaaggaggagaatatgtagcctttggacgtttaagcctcagctagttggaaggggagctttgaggagaaaggaatttaggtgtacttagaaaaccagattataatgtttcagggaactataacatgaaattcagtaaaattaggtttttccttagaagcttgtttttattatatgtattgttgctattgtttatatgcttaatagcaaggatattttttctaaaaagttatacactgtgacatgtaaagacttaaagggttgtctttcatacaaatttagataatttcatattcagttcagcttagaatgatcagcttgtcttttaatccatgtcttttaaaatggcttttggttttctttttttggggtaagctccttcaaattattcttttatttagaaatggtaaaatatatggtaataatgtagtaagctgagtaaacttagagccaaacatcttgctttgttgaaaggtgcttttttatgtcttttctatgaccaaaagaagcaggcgtggtatcttataaaaagtgactgttgagtttcctttgtatcttgatagtcaaactctaatacccaccaacattccctgattcatctgaactttagatgggcatttgataccacaggggtaaatgaggagcattctagaagagcactctgtctaatctcctatagtaggcctttcttttggtatttattagatacatgattcattctctggtttttctgtacctgaactgggagaaatatcctaatatttaatatgttaataataaactatttagtaataattagtatttaataaggtggaggagcaagaaacacttgtggagtgtccaacgtgtgccaggtactatgctagattattggaattatacagattaataaaatctactaccctaacaatcccccaataagaaaaaaacaacataaatatagttataatacaatgtgcagtcgtagtcaatgtgtgaagctgtgagtgggtggggagttaggaatactttgtggagatgaaaatgattaagttgagccttaaagggtgagtaaaatttagccttttgaaggtagaggaaggggacagtggtagtcaggagagacaagaaggtacattggccttccatgtaccagaatcagagtgcacaaagtcatggaaatgagaaatctttcagtgagtgcaggaaaatacaaacaatttgttgtttaggaagaaagtttgaagcaaggagaggtgagaaatgaggctaggagtagtagaataggataagatgaaagaccttgaatactgcattaaagagtttggggagtcagtgggggagtcattttcaccagaggaatagcaaagaggagtttttcatttgagtagatatttttggaaacttggaagataggattgagatggaattagactacaggcagagagaccagatagctacctcttggaagagttcagctaatagttgatgaggacttcgatttacggtagtagtagtagagattaaggaagaggaaattgatttgtgaagtaaggggatgttaaaattttgagacttggggcagtaaattaattgctgggcctcctggctctcgaaacttttatttggttagtcatcacatgctttttgctctcatctcttgatctggattttaagtctgttctttgatttggtaaataaaaacaaaaaggaaagtcagagacaggtcatttctggtgactacaacttcaaagaaaatagttggaaatttcacatgggattatatttattgctgtagtgtgtttgcataccataatatattagcaatatttaaggaagtgatagtaaaaaaatcaatatttgtaaattagttagtccttgcttgtaaataaactttatagattctagatcttgttttatcaactaacttaatacagtgtgctaaatttaaattgttcacttaaatacatacaaatatacaaagtagtttggaacttacctaattgtcctgattaacagttgatctagggtcactgttccacatcttgtcttgagcgcaaactctttccaataatgaaaaaatttagtttgaattctttgctttttctacccaagcataccctgggagcagaaaaccctcctttcaataactataacttctgaaggatagatttttggtgaggattgtatattttgaagcggggaaaaatgacgggatcattctgataggtaccaaggatcggggaaggaacaacttggacttgttatggagctgtgtcagaggtgtgatctgcctgtcccatgattttgtcatttatcagtgacactaagggactaattgtgagaaagcgtggagattgttctttatgacatcctttgtttagagatactagaaaaactttgccttttttcttaaataacccattactttatgactttaaaaggttatttttatctgtatttcctgctaatacaatgtttgctgattaagcggcactctatcatacactttgttttttcaaattgattgctacaagtttctgccttcaccatacatttgattactctatagacttgcgcttaaatgctgagttttacccttcttctaaatccatattataccctttttttggaagttccccccctctctcagctcccccactttctttctttttagaggtagggtctcatcactctgttgcccaggctgaagtgcagtgatgtgaccatggctcactgcagccttgaactgctgggctcaagagatcccattgccttagccttccgagtagctgggactgcaggcatggaccacaacacctggaattttaattttttgtagagacgggttctcactgtgtggcccaggctggtctcaaactcctgggcttgagtaatcctccggcctcagcctcccaaagtgctgggattacaggcaggagcccctgtgcttggttgctactagccttttcaagggaggcagtctgccttaaaaaaaaaaaaagtctaaatgacgtatctagaagctcagtttcaaagctgtctgtaggctgtatatctttgaatatatatcgacttaaagctaagggcaaaactatttttctaggagttgttaatgtttaagacaatactaatctttaagaggctttggctacaaaacaaaataaatagttgagttcatatttttcttttcaaagcacatttctgatgtgacttcagagatttatcttcttaagattctccagttatccccaaatgttacttatttgctagagccatcagttattttaggacgaaacttaagaaataacttagaaaatgtctcaacaaatttgaaaataaaatttttatggtacaccattgaaagtaatttatgtgatttgtacattttttgtagctttctatatgtgaattatttttaacttattttgctttaggacaaggctgatacatcttctttaataataaacaataaattgatttgtaatgaaacagttgaagtacctaaggacagcaaatctaaaatctgttcagaaagaaaaagagtaaatgaaaatgaacttcagcaagatgaaccaccagcaaagaaaggtactacttcagctgccagcagcaggcgtttaagaaagctaatttctaaaccagtaaatagaacaaggcaaacagaggggcattcacttgtctaaggaaaaatcttgagaaaatctaaacgtcttgaatttttattctggaaagttatacattttctagggatgggcatagttaaagcttttatcttaataaatatgcttttagaaattgtgcttttattatttctttcgcagtctatgtaataatttctgtgcttataatagttaaaactcattactttgattttataaatatagtattttctgcctaaatcccagcacattattttgttttctttgtttgcattctttattcatttggagaaaaggatattttacagtaagactttgagctaaatattattaataataaatgtattcaagctgtatttgtgataccaggagacagtctgatgaaagataatacatgttgaagattattttttaaaaaatctttaatagtaactgggcaagtttgttgtaaatataaagaagggcaaacctttgaattttagaggaggtagactctttagaataaactgaaaatcttgaggaaataaataggaaaatgtaaattgcaaacataagaaacgcttcaaaaagaaactcagcagcttttaagaaaatacagcaggcataatgccttattttaccccttcctctttgaggctggacagtgtaaattatacataataaaaccttgtccactgagcttttaaaattagtctgtattgaagaaaagagatcttggaatcctgtaatgaaattgcacaattacagcttcccaagaacatttagacaattgagtgaaacaaaaaagaacatgcattgcatttgagaaatgaagacttaacaaatacaggttgttttttgtatatacagtatcgaaggcaaaactagataaattctagatgggacagggaggtaagattcccatattatatagtgattcttgggtgggggcatattctcactgggggaaatcagtatcttgagagagctaggggattttaatttatcaaaaggggtcataggccgggcgtggtggctcatgcctgtaatcctagcactttgggaggccgaggtgggtggattccctgaggtcaggagtttgagaccagcctgaccaacgtgatgaaaccccatctctactaaaattacaaaaaattagcctggtgtggtggtgcatgcctgtaatcccagctacttgggaagctgaggcaggagaattacttgaatctgggaggcaaagactgcagtgagccaagattgcgccattgcactccagccagggcaacaagagtgaaactgtgtctaaaaaaatgaaagtggtggtggggggtcatagtattaaaaaaccttgagaacaaacaatcacataagttttttcttctccacattatggtagtacctgagggacctttcataaatgctttggcttttcctttattttgctcataacttcaactgtgattagtatatatggaaatgagtatagaaactcatttgtatatggcatggcagatttcaatttaatgagctttgtaatgatctcaaaagtgctgccttcttcatcgaacagattcattacatgtgcatcccatgggctatcatctcacaactaggatgcacaagagcctgtgagaggcaggctaaaacttaatgggtttgaatttcataactacaagaggtttgacgtttggctcttaaggaacaattacatgcagcagtgctgtcagttaagggctttgtaatgtaacaaactgatatgttaagatcccaaaggtattacagaagtcactgtcaacttctagaaattttcaaaaataataccccagaacactaattctcaaaacgttgcatgtaaaatacatcccagacttaccaaatcactatctttggtatttggtgccaggaatctgcattttaataaggtccctggataattcctcccaataaaactagaaaatcactcttgtgtaaataaatgtttttcagtgttaaagagagaacattaaaattttaaacataaagttaccataaagtaacaaaattaatgtaactggaatatgtcagattcatgaatttacatatatctagaagcagaataaattattattgcaaaaatcacaaagattatttgttttctataccatgatatgtcttagagatagaaaagaagaacatatgtggtatagttaagtttcaaaaatattacatttaggattattattctatttaggtttattgttcgtgatgagtgagatatagggagtctgccatcaaggagcttaaaatctagtagatgagagagacaaacatatttcaataaaatataaagagctgagatgcataggataatattcgggactcattaaaaagaaaaatgtaccatatactttttagagtcaattagataccaatggaaagtagtaagtgtctttttttttttttttttttttgagacagagtcttcctctgtcaccaggctggagtgcagtggcatgatcttggctcactgtaacctccgtctcctgggttcaagccattctcctggctcagcctcccgactagctgggattacaggcgcccaccaccacacccatctaatttttttgtgtttttagtagagacagggtttcaccatgttggccaggatggtctcgatctcctgacctcgtgatccacccgcctctgcctcccaaagtgctgggattacaggcgtgagccaccgtgcccggccagaaagtagtaggtttcttaactagaaggatttcaagccaaacctacattataattgtcttctgctcttatagattagtaacccttgtacttcatattatatctgggatcattaaacaagaagaatttgattcttacatagtgaggatatcacataaaaatacaggttaattaaacagaaatggtcagtgagggagtgaatggcggtcagaagaacatatggaattgattgtattagagcaaagtcgtgtagaaaattcacataaaaattgtaccagaacaatgttgtaaagtctacttgcaaacatcatataaacatcaaaccatgaagtataacaaaacaggaaaaaatttctaaaaacgaagagtcagattctggcctgttttgaagtaaggtttcgaggatctgagacactcatctgacccttaatggaaattgtatgaaatataaaaagatatgtagatataaatttatatatctagaagattgttaattatatttcaagatttaatcatggaatctatgaggaaagtttaaaagaatataatttatactgggcacttacgtggggtgagtttatttgtcagagtgaacttatgaattaaattgtagctaatagtgtatctgttctgggtataatttgatctgtactgattataatggctaaagttcttacatgtatacaacatttatgtagtcatttaacttacattacgtattaactcattttagtctcttagcattattctgtagagtaagttgggcaggtaagggtatctttattctagcaatatacatattaagcctgaaaaaggcaaacttttatgcattttcaattagttgaatccttctgtacagattttcaggttctattaatagttaaatctatccaatgcacagtgtcgtcaacccatttgtcatcttgatcttcacaactttgagataggtggtattattcctatatcacatttgaggaaacagtcgtagtatgaagcagtttattaatggttacagctagtaaggctatattatatgaattcccaaagttttaacatgtcccttctaattttagctatgaaaatttaagatactccatttgcctattgctaatatagtaaaagccacaatataattgtagcttaaaactgttcgttaggatatggaatgtctgcctagggtttctcgtcatctcctcctctctgtcccatattgaaatgacaataaagatttgtggtacaaaatttaaataatactgaaagttagaaatagctggtaatgctactcagaggtaggtagctgccatcattttggtgtacttcctttgctaactttgtattaccttgtgaaataataatttttacataaatgggctcataccacatgttttaaaacctgttttttctttttttctcaacagcttatttcattttttttttttaattagaagtttacttttacatgttttgtatgtttgaatattggcttatatggtgactttttggttttattaaggtttgccagattaataacaattttcttatttttaaagggtctatccatgttagttcagctatcactgaagaccaaaagaaaagtgaagaagtgcgaccgaacattgcagaaattgaagacatcagagttttacaagaaaataatgaaggactgagagcatttttactcactattgagaatgaacttaaaaatgaaaaggaagaaaaagcagaattaaataaacagattgttcattttcagcaggaactttctctttctgaaaaaaagaatttaactttaagtaaagaggtccaacaaattcagtcaaattatgatattgcaattgctgaattacatgtgcagaaaagtaaaaatcaagaacaggaggaaaagatcatgaaattgtcaaatgagatagaaactgctacaagaagcattacaaataatgtttcacaaataaaattaatgcacacgaaaatagacgaactacgtactcttgattcagtttctcagatttcaaacatagatttgctcaatctcagggatctgtcaaatggttctgaggaggataatttgccaaatacacagttagaccttttaggtaatgattatttggtaagtaagcaagttaaagaatatcgaattcaagaacccaatagggaaaattctttccactctagtattgaagctatttgggaagaatgtaaagagattgtgaaggcctcttccaaaaaaagtcatcagattgaggaactggaacaacaaattgaaaaattgcaggcagaagtaaaaggctataaggatgaaaacaatagactaaaggagaaggagcataaaaaccaagatgacctactaaaagaaaaagaaactcttatacagcagctgaaagaagaattgcaagaaaaaaatgttactcttgatgttcaaatacagcatgtagttgaaggaaagagagcgctttcagaacttacacaaggtgttacttgctataaggcaaaaataaaggaacttgaaacaattttagagactcagaaagttgaatgtagtcattcagccaagttagaacaagacattttggaaaaggaatctatcatcttaaagctagaaagaaatttgaaggaatttcaagaacatcttcaggattctgtcaaaaacaccaaagatttaaatgtaaaggaactcaagctgaaagaagaaatcacacagttaacaaataatttgcaagatatgaaacatttacttcaattaaaagaagaagaagaagaaaccaacaggcaagaaacagaaaagtaagctaaatgttattcaaaatattttaaaatacacaaagcattcattttgctatgcagctttaaaaaagttagatagtcatacttaatctggtaaagcgtagcatgtatgatgagtgaagaacttgaactttgtccatataaacctttggaccataggttatgtgaaaagatcagcttataaaaatcatatgaaatattttctgaagaactcattcatagtttggatattccaaatttgtgaaaagatataattttgtaaagattgttaccatttcacatgtatggtcctaagcagttaatgatgcattaccatagaaaagtggtttatgttttttagattgaaagaggaactctctgcaagctctgctcgtacccagaatctgaaagcagatcttcagaggaaggaagaagattatgctgacctgaaagagaaactgactgatgccaaaaagcagattaagcaagtacagaaagaggtaggttatttgaaaagttatgtggccagtttatgataaagattgttttccttatatatcaaacttagacattaatcttaggattgaatagaacatttatccactttataatttttcttaaaattacaagaacagttacttcacgagagaaaatttagctgatttaaacaagctgaagaatgtccaacattaagagaaatatgtaccttatgaaagattagtctttttcttctttaagaattgctaaatgtaagtccttacaaaaaagtggaaagcaacttgtttacagatagtacttaggagaatgtgcagtatgattttttagtttttattataacttaatttttaaaagggaatgcaatcacattattccaaatttgaaatataatagatgtatacaatgagaaggaaatacttcccactccttcgagctgtcaagtttaccttcacagcatcaaatgttaccaatttctttctttttctgcacttctccctccttcccattttcttgtatgaccacttcattttctgtcgtacttagaccttctctaaagattggagcacttttttttttttttttaaactttgaggtagttaccaaataatacttaaatgtgtaaggtctgacaaatattaatacaacaaatgctgtttctaccactataaaagtgactactgaatgttgtgtttatctaaactttaaaaaatataatttaaccatattttttaatctctaaacagtattttcttctcaaacttttatttttcacatcatatttctgagattgattttgtacagtcgtaattaatcattttcacctctgtatagtattctgttgtgtgacttagcgcaatttatttagtctcttgttgatgaccatttagattgtttattattttttgcccatagccataatgcaaatatcttctatatgctcttggtacacatatgcaaaagtttatataccaagtggggaattactgtgttagaggatatgaagtgttatctcatggtagttttaatttgcattcttttgattgctaatgaagtacagcttctattcatatttttatttctatttgtctatcccagtttctgctctgttgaagtcatttgttcattttaattgtgctgtctttttttttttttttttaaagtatgtagtttttatttttacttatttaaaaaaaatttactggtttattataaaggatacaactcaagaacagacaaatagaagggatacacaggacagattaagggggacagagggtggtgcagagcttctgtgccctctctgggtgtaccaccctcctaagacctcagtgtgctcaccaagtgggacactctctgaacctcactgtacaatagttctcatgactcaatctccaaccctcctctcttccacagagtttggtgggtgggactgaaatttccaactctaatcatttttggtcttttggtgagtagccctacccttaagctatttcaaaggagcctccactcaaagctatttcattagcataaattcaggtgtgattaaaagggggctcttttttctaagtttatttattttgttttgggacagggtcttactctgtcacccaatctggagtgcagtggcgtgatcatagctcactgtaactttgaactcctgggctcaagtgatcctcccatctcagcctccctagtagctgagactacaggtgtgccaccatgccctagctccttttaaatttattgtattgttaaagtcttttttattgctacttatagaggtatctcttttcaagtatagatagcagtccccagcctttttggtaccagtgattggttttgtggaagacaatttttccatggaccagggtaggggctggctgctttaaggatgattcaaacacattacagttattgtgcactttatattattattacattgtaatatataatgaagcaattatacaattcaccataatgtagaatcagtgggagccctgagcttgttttcctacaactagacggtcccatctgggggtgatgggagacagtggcagatcagcaggcattagattctcataaggaatgcacaacctaggttcattgcatgcagagttcacaatagggtttgcactcctatgagaatctaatgcctctgttgatctgacagtaggcggagctcaggcggtaatgtgagtgatggggagtggctgtaaatacagatgaagcttcactcccttgtctgccgctcacctcctgctgtgtggcccagttcctaacaagctatggatcagtatttgtctgtggccaggtggttgaggctccctcctcatatagatgactatttaacattactctaatgatgggtattaaaagtattttctatttctcaaatgtgtagttttaaagcaaataataataattatagcaatttaatctaggccagctgctatgctgagttgacatattatcttaatcctcacacaatatcgggtatagacactgtttttaacttccattttgttgataagaaaacagacattgagggatacagtagtctccctttactggcagttttgctttctgtggtttcagttacctgtggccaaccatgagctgaaaatactaaatagaaattccaggaataaacagttcaattgcaggtcattctgagtagtgggtcaaaagcttgtgccatcctgtcctgcctggagttagaattatccctttgcctagcatatccacattgttagtgctacctattaatcacttagtcatctcaattatcagatcacgtgtcatggtatcagggacagtgtttgtgttcaagtaacttttattttacttaataatggtctcaacatgcaaaagtagtgatgctggcaattcagataagccaaaatgttgttgtaaagggcttcctttaaatgaaaaggtaaaagttcttaacttaataaataaagaaaaaaaattgtaatctgaggttgctaagatctatggtaagaacaaatcttccatctgtgaaattgcgaagaagaaaaaagaaatttatgttagttttgctggtgcacctcactgcaaaagttatggccacaattcatgataattgcttagctaagatggaaaaagcattaaatttgtgggtggaggatgcaaacagaagtgtgtttcgattgatggtgtctgggttcaatactgtccactggggatcttgaaatactatccaatgtttcaggtatccactggcgatcttgaaacatatcccctgtggataagggggaacttgtccttgtctaagttcacttgtcttagtcttaataagacttgtctaagttcactcagtagtaagtgctagagccagaatggaaaccgaggcagtccttacatgcatctttgtgcagcacatagcctctattattgttagttatatagttgatgaagatggtgtttattacttgaagcctcatttttttaaacaaaattagcaaatattatgaatatgtgattatcatgtatgtattattggaacataaagcttaaaacaatgtaagaatcctctgaaaccataccactctgagctactataataagggcatcttcaagcctttttttttttttttttttgggcggagtctcactctgttgcccaggctggagtgcagtggcgtgatctcggctcactgcaacctccacctcccgggttcaagcaattcttctgcctcagtctcccgagtagctgggactacaggcacgtgccaccatgcccggctaatgttttttgtatttttagtagagatggggtttcactgtgttagccaggatggtctcgatctcctgacctcgtgatccacttgcctccgcctcccagagtgctggtattacaggcatgagccaccatgcccggccttctctatgctttttatggggcatcttttcatttaatttccttccgtttttgagctctctagcgagtgtgaaaatggagttttggcagtaaagctccacaagggaatagaagagaaggctctgctgccagttagataacttccctctggaaatcctggcaagatgtactgaaaggtttcagagggggttggtatgatggaaactagtataaggatgtacctatattagcttttttgggtgagaaattaatatatatattagtccatagtacctcgatttccctacgtttatggcattagattaccggcaacagcagaaatcaattgaccttcacttgcgtgggtaccttttgattttgtgattgttccattttcttccctgcatgtcattattagcttttaaagtttttcttgtattcctggattatattactcaataaactttggaaatttgaatcagtatttttctctcagaatatctttattgatttttccttggtaattatttccctattatgtatagatgttatgataattcttttttgagagaacttaaaaagtttgagattcttaaataatggaacaagaaattgagtttttcatatgcattcttcattagagtattaaaacattttctaataatttgaagctatagtgtgtttgatttgtagtatattaaaatctgtcatttttcttttaggctgtaaaggatgtgaatctttgaacatagttgccatgaatcttaaataacaaaaagcagttagtatttttaaaatattccatttgttttataaacattattttgtaggtatctgtaatgcgtgatgaggataaattactgaggattaaaattaatgaactggagaaaaagaaaaaccagtgttctcaggaattagatatgaaacagcgaaccattcagcaactcaaggtaaacagttttgtttttaaagatgatttaaatgcattctcttggtatattttagtgtacaaaaaggtacaaatttgtttttaataacatcctgttttgactttttctagaatctagaaataaattatttaaaattaaataggcaaaaaagaaaaaaaaaagataaaattaagtaggccagtagtgactctcttctaatgaatagactatggaaaagaaaaaataataacttcatagtgaagaaacctagcagataccactttaaccaagtgtttaagaataacattaccattagtcatattgatgctgtgtgcttcctggtttgatgtgaccagaaaggcacataccctctttggtattctttccctaaatttataacctcagactcttcacgaaaaaacattagacaaacccaaatggaggatgttatacttactgcttcaccagtatgaagtataaagtgtcagggtcattaaagacaagtaaagactggtgaatgatggtgaagtctggagtgtaattaatagtagtataccaatgttaatttcttgatttttgataaatgtaccatggtagtgtaatatgataacattaagggaagctaaattctttggaactcttgcaaagctaaaattattttgaaataaaatgcaaaaaaacaaaaagagttgaggtcttacagcaaattccttttaaaaatgatatttaaaaggcaaaatccctttattgtatatggttattttttgcttgatatcaaccaaatggatgaggcaacaataaaaaaaatacatttgttatattattttcatgtttgcttttaaatgaagcaaactaatgaatagtcaggtataaatacatgattttaattcttaaggtaatcataataaagcattctataacaataggattcgagatctccatattccataatgattcactcttaagacttacaaagtgatgagatagtggtgacattagatgagattgggggtgaagtttggattacatgataagttacaattagaactgtaggatatctggtccccataatttaatcttgcctcttaaggcttatttttttccaatcttgcagctactttctaggtaaaaggggtggagagctcttttttccttcattttgagtttaagtttaccagtgaggaagcttttaatggtttttcttgttccttctatgttaaatacacagtagaacttcattttcccttgtttctgctttttgtggtttgtaagaaaacatttatctaaaatgttgagtaagtaaaataaccgggtcataacgtagattaaaagtataggctgggcacagtcgctcacgcatgtaatcccagcactttgggaagccgaggcagacggatcacaaggtcaggagatcgagactagcctgaccaacacggtgaaaccccgtctctactaaaaatacaaaaattagccaggcgtggtggcacacgcctataatcccagttactcaggaggctgaggcaggagaatcgcttgaacccaggaggtggaggttgcagtgagccaagattgcgccactgcgctccatcctgggtggcagagggagactccatctcaaaaacaaacaaataaataaataaataaataaagacatataaagtgtttttttttaatttttttaaattttaattttaatttttattttttgagatggagtctcgctttgtcgccaggctggagtacagtggtgcgatcttggctcactgcaatcttggctcactgcaatctctacttcttctttcccctgctctcaccctacccttttctccaagatgaaagacagttggaagcttgagactggtaccagctggtataccagctatataggagactgatttcaaacttaatattgagccctgttttcaagatccactgttaaatattgtgtttttaagttaatttgcaattaatttatattctttcaatttgtaggagcagttaaataatcagaaagtggaagaagctatacaacagtatgagagagcatgcaaaggtcaggaacaagtttgtacttctggaaccagaaaagttctcttattcccctcgcagggcatgcgatgggggtatgacttgcttcattggtgccctgcagctcaaacccctagggggagcatgcagacgggcaggtcttgagtgtgggctctgaccctgtggcagcatctggggttgagtgtttacagctcctgaaggccccagtgggcgtgttctacagggtgttttttcagcctagccgtccacaggcggcttgtgttaatcagctcaattagaccctctgccttattgcaaggacagagggctttctgtatcccgggattcttgctctagtgtactggaaaaatcggatcacacatgggcgtgtagaaggttttattgagtggagttagctctctgcagatgtatggggagccagaaggggatggagcgggaaggtggtcttgccctgggcggccggactctcctctgactgcccgcaaccaaattccgtgtcatctcacagtagatggcctgccagcatctgctggtatctgctggtgtgttcttccagtgtgttcctctagatgttcagctgcttgtgtgtgtgcctgccagggtctcagggtttttgtaggcacaggatgggggcgtggcaggccagggtggtcttgaaaaatgcaacatttgggtgtgaaaacaggagtgcctgtcctcactctgtgggcacaggcccgagggtggagccttcaccagggaccctgcctttctgtacccagcacttccctgcctgcctcccatatcacttccagtactaaaattacaaaacaggtagttgcaataacaactggttaacatttcctttgaaaattctgaagggaagtgagggcaacataagatgcagcttatcaaaagtgaaaagtagtgattctaatgaataatttgttaacttaaagcttattcttagaaaaataaaataagtagtcaaagcaacattgatttcttgtaatggccagtattttgtgaaaaataaagccagtcaaacttttatgtaggtcacaatgaatggcatagatttctggacgaaattgtgtaaagaataaacttcaaataaaatatctttaaaattaaaatgtgtattctgaacggacacttctcaaaagaagacatttatgcagccaaaaaacacatgaaaaaatgctcatcatcactggccatcagagaaatgcaaagcaaaaccacaatgagatatcatctcacaccagttagaatggcaatcattaaaaagtcaggaaacaacaggtgctggagaggatgtggagaaatgggaacacttttacactgttggtgggactgtaaactagttcaaccattgtggaagtcagtgtggcgattcctcagggatctagaactagaaataccatttgacccagccattccattactgggtgtatacccaaaggactataaatcatgctgctataaagacacatgcacatgtatgtttatagcagcactattcacaatagcaaagacttggaaccaatccaaatgtccaacaatgatagactggatgaagaaaatgtggcacatatacaccatggaatactacacagccataaaaaatgatgagttcatgtcctttgtagggacatggatgaagttggaaatcatcattctcagtaaactatcgcaagaacaaaaaaccaaacaccacatgttctcactcgtaggtgggaattgaacaatgagagcacatggacacaggaaggggaacatcacactgtggggactgttatggggtggggggagtggggagggatagcattgggagatatacctaatgctagatgacgagttagtgggtgcagcgcaccagcatgtcacatgtatacatatgtaactaacctgcacattgtgcacatgtaccctaaaacttaaagtataataataataataataaaatttttaaaaagctgcttaataatttagattcaaatcctaggtgctgaattatgaattatgcttttcttactcagattgtattgatttgttgtttgaaatattacaaaattacttttttctttttgagacggagattcgctcttgtcatccaggctggagtgcagtggcacaatctcagctcactgcaacctccgccttcctggttcaagtgattctcctgcctcagcctcctgagtagctgggattacaagcaccagccaccatgcctggctaatttttgtatttttagtagagacggggttttgccatgttggccaggctagtcttgaactcctgacctcaggtgatccacccgccttggcctcccaaagtggtgggattacaggcttgagccaccgtgcctggccacaaaatttcttttatagatgatacatatttctgtttttaaaatgatacagactcctctcctcctcattaccccttaacttctttgttctgtgagtggcagaactaggatttgaacccaggtgtgcttcactcttaagtctcagactctctttactaatccatgttatttgtacttggccaacaaaagaaagggtaacacaaccagattattacttatttagctgacttatacattggtggggttaacttggatgggtaacttggatgtgaaaatatatctctgcacacagtactgttttcttctgcctttcttaggccttgtcaccctaacatctcctatttcataggaaatagttcatagctatcttttaggattcccctttactttggctcctttgtccctcttggtgaatgtggacacatcttagatactctggaaaagtctacccttggaccaggttgccctatagtttttatcatattttaatttttgttttctttgccaaatatggagaagtatggcataggcccaccgtgactattttaatctgacttccaccttttctatgcttctaagtcacttgtaacctacatatgttaaaatctgtcagcattttgcaatccctgctttttatttttcattattttggtgttattgtacactcttcttttcctcagttatatttataaagtagtatttattgtatgtgtattttttctaaatataaaggtaatctatagctcctcccaccttttgaaactctcttgtctcagcttttatgatctattctgtactagttaccacttttctctcagaatgagtctcagccactttggtaacttgcctgattaagatgtcgttatctttttttaaaattattttttcctttagagagaaaatgctcttgtgatttaagttgtgtatgagacatttccctacaaatagacaacaaacaaaactatatctttaactcttaaggctttccctgcctcctaaatttctatttattcacggaatgcctttcacttacctatctttaatattgaattattaaacaatggagatctaatatatgtaacataaaatttaccttttaaaagtgtacagtttagtgggctttagtactttctattcacaaaattgtacaaccatcaccactatctaattactgtgtgtttatagtaacgtaaagtgacaagtgaacatttttgtcacttcaaaaagaaaccctgtacccatcagcaatcataccccattcaccccatccctccagctcctatcagccactaatctactttctgtctgtatgaatttgcctattatggacaattcatgttaagtcagttcatacaatatacggccttttgtgtttgactcttcttagaataatgtttccaagtttcatccatattgtgtatgtatccgtactttattccttgctatggctgaataatattccgcattttatgtatcagttgatagacatttgggttgtttccacttttggcttttatgaacatttatatgcaagtttttgggtaaacttatagttttaattttcttggggatggtaagcaagtgttgaatatgcagcacttgattgcttgttcatttaatagtcatttatttcactatgattgctcataactatccttagataatatctttagatagctatgatgagatatctgtctcagacttctttactttgctttattttccattttatcattttggtgtgtattttggggttctttcctgaaataaaatgtaaattactggagtcaatgactgattaaataattatctttttgcctttactgctctagtttgctagctttcaaataataggtgagtagccattagtgaggttaccattggtgttctggaaattttttaattgataattagatttgtaaattctttttctagtcctcagtttagagtcagaaatgcaaagtgtaagagggagggaattctttgaataaaattataattaattgtgtaatatgaatatatttgaaaatcatgctttttgaaagagatttatatgataatatgaaggtgactttaatcctaggaggaattctgttttactagcacacctgaaagcctgcatcaatggaaaaatactaaaaactgctcatacagttttctcttactgtttagtttgttttacctttgttttatgtgcactttgagggagccatctttgggtatttgtgttactaaaagcagcctgagattgagctatgcatttatagctttatcacctctgacatcagtaatagttggtaagagttctctgaaatgagccctgctactaggtgccatcaccagaggcaacaaactgatcttccctctttatccgtttcctgcagacagggttaatatatagttgcttacaagtaattgctgtagtcattcttcaagggccagaaacaattttaggaaggctgttattactagcttttcaaaagccatttctgaggagctggttttaaataaaaatttaaaatagaaacaaatatttgactctgaatatttttctagaaaaagtaactacttgatgttaaaaaaaatagttcaaattgggattgagcttttttagttttaggaggtaaaggttttagtttgattggagaatattaacactgaaaataagtattttgccaaataatggtttttccccctaaatcctaagatttatgttcatagtaatagttagttgtatcggaatagtttaattgtattagaaattgttaattttacctgaaaaaacttttttccattcatccactcttgcaatcatccaagcatccatctttacaccaaatatatatttagtatgtcatatataccagtactgttgtagacattgaggatattgcgatgaataagacaaagtttctgtctatatggaactaatattctattacagttaataaaaatgtattttaattttagaagaacttaagaaaaattggatatctagaggctattaatttctaaaatgttctcccccgatttttagatctaaatgttaaagagaaaataattgaagacatgcgaatgacactagaagaacaggaacaaactcaggtagaacaggatcaagtgcttgaggctaaattagaggaagttgaaaggctggccacaggtaaaacaagattgcttacatttctctaaatatactttttcatttaaaaaaaaatttcctagatttcttcccttgttaaagtagtacgtattttcagtgattgataatggaaaagtatttggtgttttttgaatgtcctattacttgtcattttccactgtgatgaaaattgtttcactaaaattatatgcagtaaaggagtaaggacactgcatgataacttacgaattatatattgcaagttatggatgataacttgcagtgttccctagatgttaagagtaagttttcaactgagtttcacctttgtcaggcttttagcattatcttgtatgttgatctcaataaatactttgatttcattgctttcagaataccatcagagtttttctagagtatatggaaaaatataacatttactaataaaaatgttatgtgtgattcttgtagaaagggcaagaaatttagaattaagaaattgtctagccattttatatataaccttggcagggtacttgtgcttactcagcctaattttcctcatttgtaaaatgtggctgatgatgataatgccatatgtactattgcacattattctttttttaaaatcatctgacttgaagattcatattgtacattattcttatcaagatcagatgagatgaaaaaatgtaatagtactttgtaaaccctaaaactctattataactgtattttggtggatgaaattgtgatgaggatgaggacagtgagtctgtgtgacttcatacttttctagccactttcatgggcatagaaaacttttttcttgaggactgcatgaagttttctatataataaggttgacaatgaatttattatactatactgtgaatactattcattggattcctgagaagtccctgtagttcctcttcactaagaatttagtaagaactcctaaaagttaaactatagaatagcctcagttccatcttggtctgtgttctttatctgggctctactgatttgtgtctgtagcccatgtcaagtgtatctctacatggtataacttttgcatatgctttaaaacataattttatgtcttcaaatcagaattggaaaaatggaaggaaaaatgcaatgatttggaaaccaaaaacaatcaaaggtcaaataaagaacatgagaacaacacagatgtgcttggaaagctcactaatcttcaagatgagttacaggtatgactttatgtatgtttttatgtatgaatgtatctgtcttcattatatttctaataagaggagaattcagtattttatatttagtaattcacttagatatgggtgaaataatacctggcaaatgttaatatgtaaatataacttttcagtgcacattgaaatgacatggggaagaaattccaagatatagcctattaagtgccagtgaaatatagtgattgggtccttagttttatgtttcacatatttaattcataaaccactgcttctaatgtccttgtgcccatttttctactccttaaacttcttactcatcaaatactgctgtggagaaaatgaccatcaggagaattattttgattactttaaatctcttcaaagtttaattattggaatagaattgtatatctgaacacatataaaactatactatatagaaggtattctattttgtgtgtgtgtgtttttttcttgttcagctttaacatacaacatatgggggaaactttttttttcgtaggatttaccaaatactatttcattttgtacattttattagaagtggcattcataacagaagctgtaggattgaaggaaacataatagttttgggagattgtctgcctctaaattttttaaaattctggctgtgtattaaacatatgctgaaaacaaatacaaaaactactttttttgttacatattatatattctagaatttacccttttcattgtgaaattccaaaagcagttagaacaaaataaatattatgaaaaaagtgtatcaaccgtattgagaatgtttgcattaaaaagtatttgtgtattttgcattgttctaagatgatgtaatcacattagtgtagattataaactttgtaatcctggaatggactgccatactttgtaatatagtgattttagaagttttcttttcgtttttttgagacggaatcttgctctgttgccaggctggagtgcagtgacgtgatctcggctcactgcagcctccaccccctgggttcaagcgattctcctgcctcagcctcccgagtagctgggactacaggtacacgccagctcgcccagctaatttttttgtattagtagagatggggtttcaccatgttggccagggtggtcttgatctcctgacctcgtgatccgcccaccttggcctcccaaactgctggaattacgggcgtgagccaccgcacccagcctagaagttttttaagtggtattattatttttatttcaaatgaagttctacttgggttttttatatatattattaaatgcctctgaacccaaagaatctgtggtaccagtttgaaaattactgatcagcagtattctctgtccagctcttctggatgttcttttaataaatatcctgttgcacaagttattttttatttggcatctcgtaggcccaggaatattttatttttagaaccatccagttagaaatgaccaccacaaacaaagtcttttttattctcttggcatttaggaagatttgagtcagtttaactgtttcagaaatttgaattatttattttttcttaaggtcactgataaaagtatttaaatggacttcatagcaaaattaacttataaatgaaatgcgtttaggaaagcaaaccagttattttattattttttaaataatctgaagctttgatcttgtcattgtttaaagtgaaacattaaagtttttatagaggtgaaaagtaatggattgtatgaaaatgttatagaaacatgtattgactactttgtaggcatgcgataataacttataccatttatatatacaggagtctgaacagaaatataatgctgatagaaagaaatggttagaagaaaaaatgatgcttatcactcaagcgaaagaagcagagaatatacgaaataaagagatgaaaaaatatgctgaggacagggagcgtttttttaagcaacagaatgaaatggttagtaacaattgtatctttgatgtatttcacctactttccttggtgtgttaaatgtattgctggaattaacagtttctacatggttttctgtttttggttttttaaaggcaggttgtcatctttataagataacttctgagccaatttatcttgacattcactaatgttcttgttttaacttgtttcagttgatttagcatgttgggagaataccttattgcttcttactgtctagatactgaagtaaaaaatctcttccttttgaccgttacagagtattccctattatattttaaaactttctgcattttgaactgtagattctaatactgtgtacattttatcacataaagtcacctaaatagtttgtaaaagactatatatatagtagaaatgaccttcagttttacatttactagctgtaggtcttgtaatgattgtcttagcctgttctttttttctaattggcacttagtctgacatgccatgttggcaatcagaaaaaagaagctaaacgttatcgttaatccgaggaaagctattgagcaacaaatattttaaaatgaaaaaccagtgtctataaaaatagtaacttcgcagtatcatattgtcatctgttggcatttcctttttttatgactgcatttgactaaaaacagttaaactttcctataaaaactgaaagatttccttccttctttccttccttccttccttgctccctccctccctcctttccttccctcccctcccccctttccttccctcccccctttccttccctcccctcccctccctcccctttcctttttcctttccttcttccttttcttcatcctgtcctccttcttcctttccttcctttctcctttcccttccccgtgcccatccccttccccttccctttccctttcccttttctttcctcttttaaagagacaaggtcttgttctgtcacccaggctggaatgcagtggtgcagtcatggctcactgccgcctcagacttcagggcaaaagcaatctttccagctcagcctcccaagtaactgggactacaggcacatgccaccacacctaggtaaatcttttattttttgtagggacagagacttgctgtgttgcccaggctggtctcaaactcctggtctcaagcagtcctcctgcctcagcttcccccaagtgttgggattatgggtgtgagccactgtgcattgtacccggcctgaaatgttaattttcaataaggtaaggacagtttttccactttttttcttccctagctttaaagctgcttttaacattgaatattgaacagagttggccagtttttattaaaatgaggctgttgtgagctaaactttccagcatgcttgctaaactccagaccatacatgtattctactccagaaatcaagcccttggttgaagtgtgtgtcctttctgaagctagagagtctaccattgaatgctctgtcctcatgtcacatggtgtaaatttgctcccataaaaaagtttactttttcatgaaatcattttatttacagaataaattttttgaaatcattttatttacagaaaagttacagaactagcacatagaattcctgtatacctatcacccaaccttcctgacccagtagtaagaggcaataagtaaaatcaaaacagaaggctgtcacagttgctccaattccaaaccagtggtttctctggtagcaatgccagcaagtaatcccactttgaatttttaatcctagggaaagctagtttactcttttctctcatatgtttctttataatcatacttaggttgtgtatgtgtctgccatacttaagaaacacatttttgatgtaatgttaatttttgatgtaaaattgtaacatataacatggaaaggaaatagaacatagttcagtgagttattgtgaagccagtacccacttaactaatacctatttcaagaagagaacactgttccaccccagaagctccttcttctgcctcttttccagtggtaataactaatctgtccttcagtgttacacttcagttttgtctgtttttgggttttatgtaaattgaaatatatgaatacatttgattgtacctgacttcttttcattcactattttatgtttgtgagaatcatccatgtttccatgcatgtatctggagttagtccactttcatttcagaatatttaagtgtatgaataaaccactgctaattcattttaatgttgaagatatttggattgttttctggttttggctgttatgaataaattttcctataaacatttttatacatttgttttggtgcacatttgcatatatctctgttgtgtgtgtgtgtgtgtgtatatatatatatatatatatatatatatacacacatgacaattgctagatgatagggtatatatatgtgaaattctagtagaatgctgcactgattttcgaagcagttgtacccatttataccccaactagtgttgcagtagctgtatagtcccaccaaggtatggtattgtcagtcagtttttaaaatggttttaatgtgcttttccctaattactgatgaagttgaagattgtttcatttgtttattggctgtgcctatacaagttcccttacctgtttctctgttggattatctagcttcttatttgtaggaattctttatacttttcgggatagaagccctttttgtaatgtgttgcaagtaccttctttctatctctagtttgctttttctttcttactgcctttttatgagtaggagttctcataaattattattgtagatatggtagatattacaattattgtagataattttattagtattattgtagataattgtcccaatatttttctttatgaagcccaaggacttgaagatggtgtgttatattatttcctgaaagctttgaagttttttatctttcatatttagatactagaattgatttttgtgttggtgtgagatagtggtcaaagctcttgatgtttgttttaatgtgaattaccaattgatgtggaaatatttattgaaaagactgtttctttctcactgctgtgccacttttgtcgtaaatcatttgcccacgggttaattttgtatgtgttgtaagattagggttggggttctttttttttttcatttggttattctgttgttccagccccatttattgggaagattgtccttccttttatttaatttttttgccacttttttaagtcagttgaccatgcatttgtagatcgtctcttctgtcccattgatttctctgtctttacatgctgtcttgattattgtgctaacttgaaattatagataattgctgtcattttgttcttcattttcaaaataattttgagtattctagatgatttgcatctccatataatttttagagtcaccttttccatttccacacacattcacacatacctgaattttgataaaaactgcttttactctctagatctatttggaggagacatcttaacaatattgagtattttgatccttcaacacagaccaatctctctatttatttaggtgttctttaatctctttcagcagtattttatggttttatacattttctttatcagtatttcatgatttttgaacctattgtaaatggtcttgttttctgttttcatttttctgttgtttgttgctattactgtaattttacccactaattttccaaacgttggcagaaatgttgatactagtttgaaagctatagctgtaattgtgtattgaaagaagttaccagtaagctgatttttggaatgagatgggatatggataaaaataacatggacatttaatttataaaatgatatgtgttgttttatagttaaatattttatctagactacttaatttgtcttgtaatcttgtttgcagctatatttatggtgttacatataataatttctaaacattcttagattcataatatatcaaggttgattttaatattttctttatttcctgattaggaaatactgacagcccagctgacagagaaagatagtgaccttcaaaagtggcgagaagaacgagatcaactggttgcagctttagaaatacagctaaaagcactgatatccagtaatgtacagaaagataatgaaattgaacaactaaaaaggatcatatcagagacttctaaaatagtcagtagtcttttttgctatgcctttttaattgaacatagtaattacttaattgactaactcttaaagaataaaaaagtgtaagtctcaatagaccaaaaaggaatcagagtatttaaaatgtggaaatttttcatgatttagagtcttgaaatttatcattaagattgatttgtcaatcaatgactgagatgtagcattttctccaatattttggttatatctctcagtaattagaaaatattagtatttctaattactttggtagagtaattagaaaatcaacaatttatggtttagtccccagtctgcgtttaaaatatggaaatgtgattcaacatgaactcttggtgattttgaatacttgggcccatccttaactttattttataaagatacaaattattttgaaagtaagcctaatggtagagagacattatgagtcattcagctgttacttttatattaccttgagactggaaatcctgaaagaggagagaattgccttttacagatagctgcttcccagtaaatagaatctgggtacatctgaagctagtctttctggaataatctgtacttaaaaatcttctgctttaaagccttcagacaataggaaaaatatgtatgtgtgtgtcacatcaaaagactattattgtaagagagattacttgctttaaaaagaggtagtattgtgttgtttaataatatatcctagaaagtcagaaaaactaggtatcaactgctgtcgctgtggttttgggacctttgagaagaattacttaacatttctgatctttatctaaaacaggtaatagtgttttcctaacagagttgtgaaattaatgaagattgtaaaacaagtagcacagttcttactccagtggaaatcaatatatgctagttactttcccttttatgaattcagtagagtctttcttatttggcagtaatggggaggtgacataagaggtttacttgacttttgattttgatggctgtgatgaggaggtctgtgttacagtttattaagtttaaaaatgtaatctatttctttataaatcgcctaagtagagtttagaaatagaactttatgactgagaaaataggaggaagaatgtgctgcaagaaaagatttagttttccttatggtcttttgtactgtaatgctatagttgcattcctgagaagcctccagtttttcaaaattgtgttatcaaaagcaactgttgggatactgagcaattctaactcagtacagaccttgaccatgccatttaacgtgtgtcgttctctatttcctcatctggaaagtaggaataatgatttttgccagacctacctgcagagttgcgatgaaagtaaagcaagagaatgtgggcagaacacttggaagttgcaagcagtctttcaaatttctccttagatcagagtcaataaactggaaagtgacccagcctttcctgagtatctgaggttgaaagagaaataggagggctaggtggtaattaaaggtgtctttacttagtaatttccattgtttagtttcatacaaatcttgattttatattctttatgtgaagttttcttcaatatattttcaggttacaatgccctgttgctttaatatttccttactttaggaaacacaaatcatggatatcaagcccaaacgtattagttcagcagatcctgacaaacttcaaactgaacctctatcgacaagttttgaaatttccagaaataaaatagaggtgggtatttggcagcacagtccacttatttattctctttatccactattactaaataacacgtacaagtaagttgctgaagataccttactgcacaattagctgtgtgtgctctgggctgtgtgaaagaaactagaggcttttgaggagaggtgaaattcttttgggagattatatgcccaaatgatgttaatctcatcttaaaagcagtagatttgttaatagaaacaaacttgatggtcagaaataggaaatcctactaatgagaaaatagggataatttgctctcataaaaggttgctttaataaacattgtgttaaatagtattttttggaattgtatccatttagtagctttgtcaccagtcttcaataacaactcgtgagtttccttaatttgtattgggcttagggttctgtgaataactttggataatatagagattcttaggttggatatgaaatagataaaaattctatgttacttaaaatttttgaagataaaattactttttaaatttctttttaaaacacatttattgggagcattcagagttgggaacctttttaagcactgaggatacgaacatcaataagacatgattgtcatcctcaaggagtgaagaatctagtaaggtagatacataagtgaatgacttgtttgattttacttcatgggctaagtgttatagtagaaatataaagtgagtactccaaggaacactgaggaagatgaaatgaattttgcctgagtgtttgtggaaatggattaaagaaggtgataccatattgtatcttatgaatggaagcttattaagcagacaatgagaaggaaaagtcttaaaaaaaaaaaaaagaaatggggtttcactatgtttctctggcagctgaacttgaactcccaggctcaagcagtcctcctgcctcagcctcctgagtagctgggactacaggcatgtgccaccatggccaactgagaaggacattttaatctgggaaaataacatgagccattcattttctcttggtttttccttgacagttcttagtagtttcaaataattagcactaaccttggggactaatacaaatcataaatttcacagaaaagtttgaagtttatccataaacaaggcttaattcttgattgcatggacaaacacatataatggaacatttctttctccataaatttatgtatgttgtcctaaaacctcctggttccaattttctaattccagcagttattttatattccacaatttggggaatcatattgttaggctattttgtatgttcttgccttcatgtaatcgatatacttaactgggctgaaagtccaaaatgattaattcagttaactggtagttgattctgggaattccactggacttaatttgtggtctctccctgtggattggacctctcatggcatggtagctggtctgagatggggcattttgagggtgagtgtcctgaaagtgttctaagaggacaggacagaagttgtaatgcttcttatgattgagccttagaggaccataatgttatttctaccacatcctattggctataaggcccaaattcaaatagaggggaatgagagactccatctctcaatgggaagagtagcaaagtatttgcagcctacttctttaatataaccaggctgtttgtcaaagatctcagcctcctcccttggagatttctgatttactgggtttgtggtagagtccaggagtcttttaaacaaattctgtaagtaattcttatgatcatacaagtttgggaaatagcgatgttacccctaattttaacataccatgtgtgagcctgaagaaagtagatgattgctcaatctttctgttcttgctgtgatctagcacgctttttgtctttcccaatgcattgtcttggataggcatttgagagaattaattctttgtggtttataaatgtatactctacaaataatatttttccttttacattctgttgtaggatggatctgtagtccttgactcttgtgaagtgtcaacagaaaatgatcaaagcactcgatttccaaaacctgagttagagattcaatttacacctttacagccaaacaaaatggcagtgaaacaccctggttgtaccacaccagtgacagttaagattcccaaggctcggaagaggaagagtaatgaaatggaggaggtaaatacttaagtgatgagtaaatttaatgaacaaatcttattataaagctgttatagtatagagttaaactgctatattgccctcctgttcataggcactgctgttagagaccaaaatcacaatttatgctatattttataccctttaaggatatcactgtgggccaggcgtggtgactcatgcctgtaatcccagcactttgggaggctggggctggcggatcacttgaggtcacgaattcaagaccaacctggtcaacatggtaaaacccgtctctactaaaaatacaaaaattagccaggagtggtggtgcacacctctaatctcagctactcaggaggctgaggcaggagaacaacttgaacccaggaagtggaggttgcaatgagatgagatggcaccactgcactccagcctgggtgatagagcgagactgtctcagaaaaataaagaatattactgtggtttaatggtcttcagataaaaagctatgtatattaaaagatatagcgtccttgcttcagttaaactataatacatcaaatgatggtggattttactggagagccatttcagtataccagtcctgttcatacttagtcactttccctgtattggaagagaaaagagggttatgtagaaatcagagaaactgaaatagctaacttgcttgtgtataatctttgtcatttaactaaaatcttgtctgtatggtcctagcaagttttaaaagagaaattcttttttcatcagccagtgttaaaatttgggcctctatgtagtggtaggctaaaagctattaacctcttcttactgcagtttcttgattgaagggttgccaaacctaccatgtcctagatgtggagatttggcaagtcagatgaggtttctgatcctgttttctcctttttggaacaatggattaatgtgttgaaaatgcttcgcttttgctctgcaagtggcagttacatttattaatataactattattactatttattaatagttactattaatatttattaatagtattatttatttatatatttttatttatttatttatttattattatactttaagttttagggtacatgtgcacaatgtgcagtttagttacatatgtatatatgtgccatgctggtgtgctgcacccatcaacttgtcatttagcattaggtatatctcctaatgccatccctcccccctccccccaccccacaacagtccccagagtgtgatgttccccttcctgtgtccatgtgttcccattgttcaattcccacctatgagtgagaacatgcggtgtttggttttttgtccttgtgatagtttactgagaatgatgatttccaatttcatccatgtccctacaaaggacatgaactcatcattttttatggctgcatggtattccatggtgtatatgtgccacattttcttaatccagtctatcattgttggacatttggattggttccaagtctttgctattgtgaatagtgccacaataaacatatgtgtgcatgtgtctttatagcagcatgatttacagtcctttgggtatatacccagtaatgggatagctgagtcaaatggtatttctagttctagatccctgggaatcgccacactgacttccacgatggttgaactagtttacagtcccaccaacagtgtaaaagtgttcctatttctccacatcctctccagcacctgttgttccctgactttttaatgatggccattctaactggtgtgagatggtatctcactgtggttttgatttgcatttctctgatggccagtgatgatgagcattttttcatgtgttttttggctgcataaatgtcttcttttgagaagtgtctgttcatgtccttcgcccactttttgatggggttgtttgtttttttcttgtaaatttgtttgagttcattgtagattctggatattagccctttgtcagatgagtaggttgcgaaaattttctcccattttgtaggtcacctattcactctgatggtagtttcttttgctgtgcagaagctctttagtttaattagatcccatttgtcaattttggcttttgttgccattgcttttggtgttttagacatgaagtccttgcccatgcctatgtcctgaatggtaatgcccaggttttcttctagggtttttatggttttaggtctaacgtttaagtctttaatccatcttgaattgatttttgtataaggtgtaaggaagggatccagtttcagctttctacatatggctagccagttttcccagcaccatttattaaatagggaatcctttccccattgcttttctcaggtttgtcaaagatcagatagttgtagatatgcggcgttatttcacaagcattcttatacaccaataacagacaaacagccaaatcatgagtgaactcccattcgcaattgcttcaaagagaataaaatacctaggaatccaacttacaagggacttgaaggacctcttcaagaagaactacaaaccactgctcaatgaaataaaagtggatacaaacaaatggaagaacattccatgctcatgtgtaggaagaatcaatatcgtgaaaatggccatactgcccaagctaatttatagattcaatgccatccccatcaagctaccaatgactttcttcacagaattggaaaaaactactttaaagttcatatggaaccaaaaaagagcccgcatcgccaagtcaatcctaagccaaaagaacaaagctggaggcatcacgctacctgacttaactatactacaaggctacagtaaccaaaacagcatggtactggtaccaaaacagagatatagatcaatggaacagaacacagccctcagaaataacgtctgttaagtattttatttctccttcacttatgaagcttagtttggctggatatgaaattttgggttgaaaattcttttctttaagaatgttgaatattggcccccactctcttctggcttgtagagtttctgccgagagatccgctgttagtctgatgggcttccctttgtgggtaacccgacctttctctttggctccccttaacattttttccttcattttgactttgctgaatctgacaattatgtgtcttggagttgctcttctcgaggagtatctttgtggcgttctctgtatttcctgaatctgaatgttggcctgccttgctagattgaggaagttctcctggataatatcctgcagaatgttttccaacttggttccattctccccgtcactttcaggtacaccaatcagacatagatttggtcttttcacatagtcccatatttctcagaggctttgtttgtttctttttattcttttttctctaaacttcccttctcgcttcatttcattcatttcatctaaaaagcagagcgcctctcctcctccaaaggaatgcagttcctcaccagcaatggaacaaagctggaaggagaatgactttgacaaattgagagaagaaggcttcagacgatcaaactactccgagctacaggaggaaattcaaaccaaaggcaaagaagttgaaaactttgaaaaaaatttagactaatgtataactagaaaaaccaatacagagaagtgcttaaaggatctgatggagctgaaagccaaggctcaagaactacgtgaagaatgcagaagcctcaggagccgatgcagtcaactgggagaaagggtatcagtaatacttatttttaaagtaacttgttttaagcttaaaactaattacaaactctctagcaaaataatttttcttcaactttcttttacttctttgaagagtagtatattttcaagctgatgtaagagcagaaatagtattaactatactcctgaggctctctgtcaggtaataattttgctgagtgaatattattcagcatagtttttctgctacacatgtaacacctttagagattgttttatggagtcttactagttaacttttgttttatatttatttaattttttaaaataacattaaaacactgagtttcatcatctagttggctttttcttgatccattttttttcaacgaagaaggaaacaccgagtgtagttctcaagaaggttaaaatataaatattttattaattttactattggcatatatccctcatgtatatttcagaaaagatttacagattgttgtagatacatcatgtagaaactttaaattttctaactgattttactcaatcttcactgctataataaactaagtacatgggcccccatgaaaatcatttatgcaatcctattttctttttttcttccacatactcttttttttttttttaattactaagttctgtggtatgtgtgcagaatgtgcagttttgttacataggtatacacatgctatggtggtttgctgcacccatcagtctgtcacctacattaggtatttctcctaatgctatccctcccctagccccccaccccccgacaggctatattctaatccagtgaagactccaaagagctccttactgaccactatgtgtggaggtagcctcatggtctcttttcactggcatcctatgattaccatctgtcttttccctgtcatggtgtctgcttcttatgacccttataacttctgctttgtaatttggattctgaggttcagtcatgatcttttctctgcttctcttcttgccccctttttcctgaacttttatctttggtacaactaggatttgcagcagttcaagtcagtgagtatatctgtaaagggctttgtcctatgtgaggttatttggggaaaagaagagtaagatgccatacccatgttgtagagaagaaagataatattttaaaagttttaacattttacctttggttatttgaagtttcgtttttattttatttttgatattgtcaaatgtcaatgagagaacttagacatagatgcttgtattatttgggagttaggcaataggtaggtatattgtatgctgtattttaaagctcagtttcaaataaaagatattccttccatgtttttcatttagcttatgtaatttcattacttgtgatatgtttgaaaaattcacaccttcagtcagggtttctcaactccagcacagttgacattgtgggctgtatacctctttgttttaagggctatctatcctgtgcattgtagggatgtttaacagcattcctgacctctacccactcgtggccaataatatccccttctccctggcaaagacaaccaaaaatatcttcaaacattgccattgtcctctgagttcaaaattgccctcggttaagagtcactgttttaagtgataatgtagctttttacaaattttcttttttgagtctagagaaataaaatattgtcaagaaattaactggtgctaaaattcattatttttaggacttggtgaaatgtgaaaataagaagaatgctacacccagaactaatttgaaatttcctatttcagatgatagaaattcttctgtcaaaaaggaacaaaaggtgtgtcttttaatttgtccaaaattgtagcaattatccagaaatccagttgtgttcaattataactcatttatcttctctttcctatacatctgattcagttgaaatgtaacctttagcatttggccagtagcatctactttatgtgtttacttctgactttaacactctgcctgtcaaactctttttgccattgtctgacccttttatccctgtccttacatacttaaagtttcctacctgagaattcataacctgtctctggcctctttaattcagctgtggccataactatttccttctaacacttctcatcaacaataacaaaaaatgttttgtttattaggttgccatacgtccatcatctaagaaaacatattctttacggagtcaggcatccataattggtgtaaacctggccactaagaaaaaagaaggaacactacagaaatttggagacttcttacaacattctccctcaattcttcaatcaaaaggtttgcagaaaattaattaaatgacctttttttgttagatgttgggtatattttaatacctaattgatatataaactcaacagctgttcagggaatattatacttcaaataggcattgtcctatactaggtactgtgggaagaaacatgtaaaaggatgatagatctaggtgttcgctatgtagtagaagagaaaggcttgtatttaagtaactgatccagagcaggctacttaatatagtaataggggtataagcaaaggtatgatagtattggagggaaaagagctactctgattagggggctttgggaaggtttttatgggagagatgggatttatcctgtgtattgaaatgtgggcaggagtacactctctagggtgtccaagggtgagaatacagtcatgggttcttagtttctgtttttggttggggcaggaaatccccttcctcatccctgttttctgcttatcactagagacagaaactaaaaaccatggcttcaggccgctaaaagcctaaaacaaaacaaaacaaaacaaaacagaacaaaaacaacaacaaaataaggtgggttggacaagtttgccagtattagtattatggtatatatcctcctagtgtttttttttctgtgcatatgtaaacattatctgtttatgtacaatatgtcaaaaacacattattttcataaatacctattgagtttagctgcagaaacagtatgcttagtgctttttttcttgataatataatgtggacatattgatacctgtgtatatgttaagatatatacacatgtgtgcacatatgcggaaggaatggttttaacacaggtggagtatcagaaaaatgtaggaaatgttcatgcaattacaggcagcaatacacatctggcatgtagaatgtggaaggactatcttaggggtgagatggagtagtgggtttttgtgaggttacctgaatgacagcaataggatgaattagagaccagagtgaggggtatagggaaggaaaggaactagaagcagggggcagttaaattgaatcaaatatgttgtgtgaaaatactttttgtcgaaggcttaccacagacgtttccaaactttgttggttcacagtgcccttaatgtctcagtaattaatttccattttgcctctgcacccaaagaaccactagtagtctcatgcattagaacttaagaccaaacaaccactgaaaattcagcttctgaaaatccagattgcaaagataatgtcataatgaaaagaaatgtaattcagtatcgttttgaaattgaactaccttgggctattgagcatcactattttccctgaagattgaaaatatcctgaggtgcttctgtaagtttgctgcagcatgccttagtacacagtttgggaacttctgacctatcagacccatttgtatatttacatacatttaaaaaaatatgtacatttaaaaaatgtgtttgtataaacagaaaatatctggagggacaaacagcaaactgttaaatatctaaatttggagaggagggacatctttctttagagtcctttaggcttactaccacttttatattaaaaagaaatatattttcaaggagaggtaggtacctataataagtatgtaatcagataagggtaatgattctcttacttcattgacttggttccttaacagcttccctaccaatgcacttgacatacattttttttttccttttttctttttgtttttacttatttctagaaatataagatatccctattttgaactgtaactgtaatacatatttgttgttttgggtcacttggaaatatagagagaaaagaaaaaatggagattaatttttaaaattctgctgctctgataaccactgttaatccatcacttagtatcactggtctcccagcttgcccctcttgtcatctcccatccattcatacatgacagaatgttcttttcaaagtgcagattgaattatgttactcctctgatcctttaatgatttctcattcttctgaatgacctgatttctgactctctccaatctatctcttattattctacggtttgataactagccagcttcaatcctgctaacttctgacagttcctagaatttgccagcttctttcttaccttcatatcattgatttcttttgctttttcctgtgctttcttttatctggaacacaccctggcttttgtcttagctggccccttacccttgagccctcatagctgatggaacgttattagggagacaccttccttcatcaccctgtcactacccctcatccccagcatcacttaatctttattattcaatcctattttttgtcttagcactttttaaactgtaattctttgctttcttattatcttttacactagaatataatctgcacggacaaaatgtctgtctagttcatactgtcagctcttagtatagtggctagcacatagtagtgatgagtttggctctaggccaacatatgtatgatttttaaacatttctattttttttaggctgtaccataggcaattacaaagacttacctgacaagcttcccttcctacaccagacttgatgcatagccaatgcattataatctcttaagggagttatagtcaaggatccagcatcccccaagctagtcatgctcttactcatatttgcatatttagcctgagtgcctccattcagagcctctttattgaggcctttggtggaggccttcttatggaggggaacaggagggggaaccttgaagacgcttttctccactgtaactcggtacttttccacgtatagctccctccaacctccagccctgaggtctataaaactgcgagagccttttgtttggggctgcctgggtggtaaaatgaccaccacttctatgctgatctgtattattctgtggtggactatagaagagggtgggtaggagctggtgctttctcaggtttagtctctcgcatatactgttgaaataagtggttaaaaagctgggttgttactttcattttggcttgttgtcttaactggcttctccgatacctggactctcagctctctcaagcccagctcagcccttaacaagtagtcttctcaatttagtctaatgccttaaatgttttttctatttaaaaaaaaatatttgatatcacatgtgtgtgaatttctatccaggaattttcccacatggaaatatgttttctattaaaaaaaagtactatgtactatgtacatagtaaggaatttaaaaattcctattctacttccctaaaagcaatcagctgttaacagtttggtttctctccatttgtgtgtggacttgaagtaaagggtttacaaagtattttcatgcagcattcattgtgcataactttatgcatgagcattgaactagatcatctaccaccttatttttaatgctgcatgatccactatgtatatatcctgctcttttgcttaacatagcataaacattttccaagtcattaaagatgcctgaggttttttactacattgaacattaatcaaatgatactttatttgctttttttttgctgtcgatcattatttcatgttctcttgacatttactttttttctttgtgatttgtctattcatgccctttcaccatatatatattgcagtgtttttagtttgtgtatgttcattctttattaaggatttcaaaccatctttattaaggatttcaaatcacctttgcaattagaaaattatttcaggaactaattaacaattttattttatagcaaagaagataattgaaacaatgagctcttcaaagctctcaaatgtagaagcaagtaaagaaaatgtgtctcaaccaaaacgagccaaacggaaattatacacaagtgaaatttcatctcctattgatatatcaggccaagtggtaagctagtatttctgttttcatcaatgtagaactgttcgtgttctttttaattttttacagtggtttgaatttcaattctttagatctctgaaaacacatgctataaaggtcatgcttttagtctcacatgtgttaagtttatactaattaaatataaatactgtattaaatgtatataagcgtcatgcatttgcatttgaaaatgcatcagaggaatttatttccaataatagaattgtcactatttagtaacttatttgcctccacaatctttttttctttttctttctcttttttaaatcacgggagttgtacaaatctgggcccaagtgttcctggtaaaaatataaaactgacattcagccatttcctcccacctttcccctaagcctttgaggatctattaggaagagactgtagttatcaccctgagtctatgattcattctcctgattcagaacagtatgtgctgtcacagggaaagctcaaattttctgtcatgcttgcatttgcttagtggatgaaagtgaaggtaaaaaaataattaaaagaaattaaaaaaattaaaaagaagtggccaagaaaaatcaggagaaaccttttttgccacaagagctttcagatatgagattgacacttgaatgcaagatgtaaagagttagggtaaattagggcatggtgttgtaagtaccattctgtcagtcatttttgagcatctgtttgattagtacctgatttcttcccttggctgaaaattgttttcttagttactatataatgtgctttctactttctaagttatacatttgttgccacgaaagatcatttcttaaaaattatttgaggcacttgtctccaaatattttagtaattattttaagttatatctgccttgaattcaatatggagtctaggttattttacttctagaatttgatagtgttgaatcttttacaaagtctgttttttaaataaatttttatagaagatggcatatctgtagtctaagtaaaaaaaattctccaatgtatcatttcagttactaagcacatgaacatgtcttactcattataaacaagcttttatttttattttcacttacaagctttgaaaaactatgaaatttttaatttcagattttaatggaccagaaaatgaaggagagtgatcaccagattatcaaacgacgacttcgaacaaaaacagccaaataaatcacttatggaaatgtttaatataaattttatagtcatagtcattggaacttgcatcctgtattgtaaatataaatgtatatattatgcattaaatcactctgcatatagattgctgttttatacatagtataattttaattcaataaatgagtcaaaatttgtatatttttataaggcttttttataatagcttctttcaaactgtatttccctattatctcagacattggatcagtgaagatcctaggaaagaggctgttattctcatttattttgctatacaggatgtaataggtcaggtatttggtttacttatatttaacaatgtcttatgaattttttttactttatctgttatacaactgattttacatatctgtttggattatagctaggatttggagaataagtgtgtacagatcacaaaacatgtatatacattatttagaaaagatctcaagtctttaattagaatgtctcacttattttgtaaacattttgtgggtacatagtacatgtatatatttacggggtatgtgagatgttttgacacaggcatgcaatgtgaaatacgtgtatcatggagaatgaggtatccatcccctcaagcatttttcctttgaattacagataatccaattacattctttagatcatttaaaaatatacaagtaagttattattgattatagtcactctattgtgctatcagatagtagatcattctttttatcttatttgtttttgtacccattaaccatccccacctccccctgcaaccgtcagtacccttaccagccactggtaaccattcttctactctgtatgcccatgaggtcaattgattttatttttagatcccataaataaatgagaacatgcagtctttgtc

SEQ ID NO: 43 - DNA, 21269 bp, Homo sapiens
accggccccggcaactgcagtccaggctccgcctccctacgcccattggcttattcaattcacgcaggaaccaatgggcggagacggcagccgcgccgtctgacggcttagccgcggtgcagactgcggcggcggtggtctgaggaagttctatcttggcgctaaagcggagacgcatcccccgacccgaggctacgatgagcacaccggccgtgccccaggacctgcagctgcccccgagtcagagggcgcagtccgcattcaaaggtgaaggccgcggtggcggtggcggtggcggtggcggtggcggtggcgggcgcgggcccggcggtcggggctcggggccgcgctggcgcgcttcacctctcccccgctctgtgagatccctgaacgcggcgtcggcctcgccctgcctcattcttggccttgtggaacggatcataaaaacaggaaccgctgcgtggtgttactgtgcggtcgctgctggctgggatgggccctcctaagaaggaatccgttaggcgaggggaaacgcgcgggcctcaggccggggtcggtgtcggagaccctgggtccgcttgggggcggggctgcacaggttcagggaccgactgcgcctgcgctgggtcctccgcctcttaggtccctagcgaatttctgcagggctggggtcgcatcatgtgttatttccaatttcacagcttctccttcgactttatggaaaccgagggttggttgggtcttcaaaactaatattgttattcccttattctacacacgggaaagcagaagaaagtaattctcatctaacccagttctggtaaattagaactttcgagtctagtgcctcacttctaccatttagtttcttaaagcttggctagcaggagctgtatgtagaaaatgatgttctccagatttttcacagggagtagagaatgtgattcttatgcagaggggttttggggacctgttgtggtaacagtctcttctaaggtgatttctcaaaggcaatattgaattggagaattttctgttatatagatgtgacctcaggtggaaccagctttggaagtaaactcttcatttagtcaacaagatttatttgccgttatcgatgttttaactaatattgacttgtagctcttacctttgttatctagagcaaagaagacaaaaactcaaggaacatctgttgagaagaaaaacgctttttgcatacaagcaggaaaatgagatgttatccaggtaaggtcaagtttatttcttttcacttctgtaaaattgtatcagatctgtccaatgaaaatgtaaagtaagccatatctgtaattttaaattttctagtagccacatttagaaaaactgcttacatattattttacgtctttttgtggtacaacgtctttaaaatctggtgtctattttacagttacaggacatttccatttggtctatccacatttcaagcactcagtagccacattggctagtggctactttattggatggtgcagcattagatcatcgttttattaatttttttttttttgagacagagtctcactctgttgccaggttggagtgcagtagcgtgatcttggctcactgcagcctccaccttctgggttcaagtgaatctcctgcctcagcttcccaaatacctgggactgactacaggcaagtgccaccattccctgctaatttttgtattttaaacagagaccgggtttcactatgttggccgggctggtcttggactcctgaccttgagatccgcccacctcagcctctgaaagtgctgtgattacaaggatgagccaccgcgcccggcctagattatcgttttctacgtaaattaattcacagtctaagagaaaaaaacaattataaagcaaagtatgtgcatagactagattatcaacttactgtttacaccacacaaaggtcagtctttctattatttagcaaagctttttactcagtgtatgggggagttcatcagggaagggttgggtggccctcccaaatgcttagagattactagttgtagtctcaaccctccacagaaatatctttattattttgttaaaatatcttagatagtacatagctgtagcaaaaacaaaaacccatgaaagtagatgaagcagaaaggcaaaaggtcccctcactctctagggataaccagtaataacatccttacaggcttaggctgggtgctgtggcttacacctgtaatcccagcactttaggaggctgaggtgggcagatcacgaggtcaggagatcaagaccagcctggctaacacagtgaaaccccgtctctactaaaaatacaaaaaattagccaggcatggtggtgggtgcttgtaatcccagctactggggaggctgaggcaggagaatcgcttgaacctgggagatggaggttgcagtgagccgagatcgtgccattgcactccagcctgggtgacagagcgagactccgtctcaaaaaaaaaaaaaattgtctcaggtaaacaaaattgtatataccacccacacacatattcagagagtggaaatgataacgcaaatgggataaaaattttaacaataggtggatcctgggtaaagagtgtacagatattctttgacctgtttatatttttgcaactttgtgtaagtttggcattctaaaattttaaaaataatttctaactttatattaataagttgctttagtttggaataaacagtttatccttcacaaataaatcttttatttctttgtttaagacaaaaaggtgatcctaggttttttatttgaataagtaaatgaatggtgataaccgtatactgaaataggaagcctgaaggaggagctggggaattaggagttctgttttgactatgtttgaggtaccaaccagacatccaagcagatatgccaaataattgtgtgtctgaagttcaggggaggggttggggctggaagcataaactcaggaattgattagtatacagatgatatttacttaaaaaccttaggatggaatgaaattactagggaataagtagagataatatggattcagacagtgactctcaaccacttatttaaataaagaatccaacaaggtcaggggtttataatactcttaataggaagaaaagaaaattctaaaacgcttcatgtggcttaagtactacatttattcctttcagaaaacagatgttggctgggtgcagtggctcatgcctgtaatcccagcactttgggaggctgaggcgggtgtatcacttgaggtcaagagttctagaccagcctggccaacatggtgaaaccccgtctctactaaaaatataaaaattagccgggtgtggtgtcaggcgcctgtaattccggggagggccgaggcagaagaatcgcttgaacctgggaggcggaggttgcagtgagccaagatcaggccatcgcactccagcctgggtgacaagagcgagactttgtctcaaaaaaaaaaaaaaggaaaacagatgtcaatttaaatgttatcacctcagcagtgaatcattaaataagacaaccaacctgtgttgcagcttttcagaattaaacagttatattttacaatctctaaagtatagatatcctaagactcatttccgataacccttctgagggcagttttataataagacagaataggattaagtctccccactggacaggtgagtaagatgggttcttcttgtcatcctgagttttgttttgttagctggcagttagctactaagataccctgttaagtggcacattttgatcttccttcaccattgttcaaaatgtatagtacaggttgtgtcaaagttctgttccttctccaagctgacagaacaaatagatatgaaaggcaatgtaagcaaaattattaactactaaattatgtcaaatgtaaaatatatatatatatattttgttttgttttgtttttttgagacggagccttgctctgtcgcctaggctatagtgcagtggcgcgatctcagctcactgcaacctctgcctcgtgggttcaagcgattctcctgcctcagcctccagggtagctgggattacaagcatttgccaccatgcctggccaatatttttgattttagtagagacagggtttcgccgtgttggccaggctggtctcaaactcctgacctgaggtgatctgcccaccttctctacccagagtgctaggattacaggtgtgacccactgttcctggcctcattttttttttcagagaatgagagatcacgcattttaatgtgatctctgaacttaggatctgtcttaaaatcaatggcatgtctaattgaccgtattttttcctatcgttatagtacacaaaattgttaaaatcacttgctaagagatgctcacagtctgccttagccagtttatagctgtaaaaataagttaagtcagtttcttgaggagggattttctttgcaataccgcctagaaactaacgttcttttttttgagagatgatctcattctgtgtcactcagcctctagtgcagtgacgggatcttggcccactgcctcaactcccaggctcaagcagtcctccaccccagcctcccaagtagctgggactatggcacccaccaccacacccaactaattttttatttttttgtagagatggggttttgccgtgttgcccaggctgctctcgaactcctgagctcaagtaatccccccacctcggcctcccaaagtgctgctattacaggcatgagccaccacaaccagcagtgcatattcttaatgtatcctaatataaattaagctgtgaatggcatatggtaatttttggatcacttctgggagggctctttaataaaagtattttcaatgtagtacatctgttactaagtacttaaaactaacccaaggaggtattacttactaaaggttatttgaagacttgtttgaatgacttgagaatgatttgaaataagattattaagtatttacaaattctatgggcagagagtgttaggacttttagaaaatatctttaaattcctcagccatttgtttacactatttttttttgagacagagtctctctctgtcacccaggctggagtgcagtggctcgatcttggctcactgcgaactccgcctcccgggttcatgccattctccttcctcagcctccctagtagctgggactacaggactacaagcgcccgccaccatgcccggctaattttttgtatttttagtagagacggggtttcactgtgttagtcaggatggtctcgatctcctgacctcgtgatctgcccacctcggcctcccaaagtgctgggattacaggcatgagccaccgcgcctggccgcttaggacaaatttcaactcaggtcttttttaaatttaaaattagtaagtcagttaattgttaacattgccctcttcttcctccccaaaaggaagcctccttggtacaggattgattgatcattttgtttgtttgtttttaagtagtagagatcagagagttgtgacatctgaggaccaagttcaagaagggactaaagtgctgaaacttaaaacaaaaatggtaagatgtggacatagcactcttaaactgtccccttttccattttgcctttcctaaacacttttcttaaataattctttcaggctgataaagaaaacatgaagagacctgcagagagcaaaaataatacagtggtggggaaacattgtattcctttaaaaccttcaaatgaactaaccaattcaactgtagtaattgacacacataaacctaaggatagtaatcaaactccgcatttgttactaactgaagatgatccccaaagtcaacatatgacattaagccaggcatttcaccttaaaaacaatagtaaaaagaaacaaatgactacagaaaaacaaaagcaagatgctaacatgcccaagaaacctgtgcttggatcttatcgtggccagattgttcagtctaagattaattcatttagaaaacctctacaagtcaaagatgagagttctgcagcaacaaagaaactttcagccactatacctaaagccacaaaacctcagcctgtaaacaccagcagtgtaacagtgaaaagtaatagatcctccaatatgactgccactactaaatttgtgagcactacatctcagaacacacaacttgtgcgacctcctattagaagtcatcacagtaatacccgggacactgtgaaacaaggcatcagtagaacttctgccaatgttacaatccggaaagggcctcatgaaaaagaactattacaatcaaaaacagctttatctagtgtcaaaaccagttcttctcaaggtataataagaaataagactctatcaagatccatagcatctgaagttatagccaggcctgcttcattgtctaatgataaactgatggaaaagtcagagcccgttgaccagcgaagacatactgcaggaaaagcaattgttgatagtagatcagctcagcccaaagaaacctcggaagagagaaagtaagtagatataattttctttattacattagttttcaataaagtactgtttgtagatttggattataatttccttgactgcattagaattttctttcatggtttctcttctgtcatatgcaggcaaatttatattgtggaacaatatgacctaaaagtttttgtgtttgagtatgttttataaggttgctttttaaaatctaaggtaaatgcttaataataattgggaaatactttataatctcaaatcaaaaaatgcattcatggaatcattgagcataattgacgttgatatgtttaatatttcttcaagcttgtgaactatatatgccattaaagtaagattacttaaaaatatgattttttcttttaactttatttgacagagttctgtcagcaatttcaaagtaacgtttatatctgcttctaactatagagctcgtctgagtgagtggaaagctggcaaaggaagagtgctaaaaaggccccctaattcagtagttactcagcatgagcctgcaggacaaaatgaaaaaccagttgggtctttttggactaccatggcagaagaagatgaacaaagattatttactgaaaaagtaaacaacacattttctgaatgcctgaacttgattaatgaggtagagtctttatatttgcttagcattttatagtttgcaaattaccttcataagcattatttcattaaattatattgtcagtctttttgaccaggtgatgttggtgatactatgttgacttaacattaactgtgaggttattttaacaattatttaattgcgagatacactgcttcattcattaattgtgagcttattagcctttaactgactacattttgcattgagttcatataaatatacaggttgagtatcccttatccaaaatgcttgggaccagaagtaattgaagatgttttttgttggattttggaatatttgcatatacataatgagttatcttggggatgagatccacaaagttcatttacgttttgtttgtttgtttgcttttgagacagtcactctcacccaagctggagtgcagtggtgtgatctcagctcactgtaacctctgcctcctgggttgaagcccttctcctgcctcagcctccagagtagctgggattacaagtgtgcaccacacgcctggctaattttttgtatttttagtagagacagggtttcaccatgttggtcaggctggtctcaaactcctgacctcatgtgatccacccacctcggcctcccaaagtgctgggattacaggtgtgagccactgcgctcggcctcattcatgttttatatacagcttatacacgtagcctaaagatagaatactttttatagttttgtgcatgaagcaaagtttgtatacattgaaccattagaaagcaaaggtgtcactttgtcagccacccatgggacagtctggttgtttggcaacaccatcattcctcactctgaatttccatgctaccaataagcaattattctcttacatttattcacacataattaattaacagtttaaaaaaagacacattaatacagtgaaaaatatgttcagagtaattaagcagcacagtagcatcatcagaacgcctgtatcagctgttagacaatagcaacaacaaacagcagcacgttttcaatctccatctatgatgttgtgtttaattaagaggtattttacaccgtgttttatttttttaggtgagaagaaacaccagaagcagttgagggaccaggaagtgggttctctagggataaggaggcattctgctgggtggctttttaagatatttacttcagagtcatctgcctcattagcaatggtttttgtcttagaagtttctctttgattttataaagggacatgatttctttttctgttctggataaatgctgctctagttcttcagtaagcctgttgcatactttcaccttgtcgcctgtaggtacattttctgcagtgttaatgatggtcatctgcattgtgatgttgatactcaaaagttttggatttcagattttggattttcagattagggatactcaacctgtatcaaagggataattgggtttttttactgaattacaaatatttgatttctctgagctaattaatatgtaatacactgaggtgatatttacttactgcttctaatattttgtttcttacatctattcattatatttacacattattttttacgttcattacacattttaccaaagactagcaacacaaatactgtgtgagtcattattatcacagattaagttacctaaaatactcaaaaaaaaaatcccattcatctggtcaggtggggtggctcacgcctgtaatcccagcactttgggaggccaaggcgggcggatcacccaaggtcaggagtttgagaccagcctggccaacatggtaaaactctgtctctactaaaaatacaaaaattagctgggcatggaggcgggtgcctgtaatctcagctactcagaaggctgaggctggagaatcgcttgaacctgggaggcagaggttgcagtgagccgagattgtgccgttgcactccagcctgggcaacaagagcaaaactccgtctcaaaaaaaaaaaaaaaaaaaaacaatcccattcatctaagccaacatcatcatgtttttgaatttattgcagaattttgctatttggaccaaaatcctatggagtataataatcagctccagaacaatattctgtttaataatagataatatctttgtttcctgactgctctttaatcttgttttggtcacccactagtgtgtaagatccacagcaaaactgaattcaaggtatgatttcaaactttactcttcatgagcatcttttaacttcttgtggttctgaacaccagtaaaagttacaatcaggaaaactcttgagtctctaatagaatagaattagagtttatttctgctcagtttaagtttttccttttgatactatgaactttttctgccctattatttaattatatgtaactgtgacataaaccattacagattcattttaatcttaatatcaaaacctgataaagacgaggaaaaaaaactccgcagactattcttactcataaacatttggtagaaggtattaacaaatggaatcccacaatatatatgaggataaaatcaagatcaaataagtgttcattttttactaataaatttctcaactaatgtttcatttttttgctttatgcttagggctatcgttatcattgatcttgactatagtaggctcaattattgttcccactttgtaagctaaaaaatattacacacattttttcttgcttttttagggatgtccaaaagaagatatactggtcacactgaatgacctgattaaaaatattccagatgccaaaaagcttgttaagtattggatatgtcttgcacttattgaaccaatcacaagtcctattgaaaatattattgcaatctatgagaaagccattctggcaggggctcaggtaagataaaaatttactgatctttacaattacagtgtagtagacaattcggaattaatttgaaacacatcacaacataacttgagaaaattttctttgtatatgtagtggtaataaatgtttaaaggctgcaaggattgcattataaaagctgtttgttggctttctaagtcttttattcctgtattgggaataatcagattttagaaaatggatataagctgaaatgtatatttaatgaaactttctgcatgaaatgttttagcatattattgtatgcatttcctggttggaagtttactgggagactgaatgtaatattaaaatttgtttattgaatataaagcaaaagggattaaattcgctttttaaatgttatcaagctctcttggttttgtgtgagaactctttaagagtaaacccgaatgtactcatatatgtatatatatacacacatatatatacacacatatatatacacatatatatgcacacatatatacacacatatatgcacacatatatgcacacatatatatacacacatacacatatatacacatatacacatatatacacacacacatatatatataatatgtatacactgtatatattggtcctttctgcatacagaaaatggcaataaaccggtttctctaacattattacctctatagtgcctcgataccatactccttatctcttctagcgtattgatacacaaagttttgggtatagaataaatcatttcttgagttttttgtttggttgggtttttgtttttatggatacatgttcttcaaatatgtttccttttgaccaggtttctcagaaacacattcttggagattgtttacatagataattttttaaaactcccttttaagaaagatctattcacctttgtctcaacaaaatcaacgaacgctatttgacttttcacttaaataaaaaatcagatattcagcagatagtctgtcagtggctgtcatgtgtaaaactttctagaatggtaattatatttgacagaatgctacctggaggggagtgttaggcccctactacattgtatcagaagggacattacttaaggcagctaaggacattgtagcaaggatgcaaaactggagccaaggctcacatagaaagcaataatgtaaacagcaagatgtaacaccagaggaaaagctgctggaaaacaagaatcaaaattagccaacatggctgggcacagtagtggatacctatagtctcaactacttgggaggccaaggtgggaggattgcctgagcccaggagtttgagtccagcctgggcaacatagaccccatctcttaaaattagtggccaggcatgatggttcacggctgtaatcccaacacgttgggaagccgaggcgggaggatcgtttgagtccaagagttcaagaccagcctgggcaagagggtgagaccccccatctctgcaaaaaataaaatttttaaagttttttttttggtggtagacagttgtggtcacagctatacgggaagctgaagtgggagaattgcttgagctctggggttcaagactagtgagccatgattatgccactgaactccatcctgagtcaacagagcaacaccctgtctcaaaaaaaaaaaaaaaaaaaattagccaagaaaactgaaagcaggatagctgagtaattcaggactcagttctggaactaagactgtgaattacaccttccctaatcttgattgtgttgggtggaacatagcaaatgcttaggtaaataatggtcacttagtaattttttgtaaatttttgaatgaatgaagtatgttgagatgatcaaccttagctcttcagagatacatttcatagcatatgaaacaaaaatataaccatagacttaaatgtaagagaaaaggagcaagacttaagtaaaattatggaggaagttttaaaatatgaaattctaggccaggcgtggtggctcacacctgtaatcccagcactttgggaggccggcaaatcatgaggtcaggagttcaagcaagcctggccagcatggtgaaactctgcctctactaaaaatacaaaaaattagctgggcatggtggtgcccacccgtaatcccagctactcgagaggctgaggcaagagaatcatttgaacctgggaggctgaggttacaatgagccgagatcgcaccactgcattccatcctggcaatagagggagactgtctcaaaaaaagaaaaaagaaaaaaaaggaaaagaaattctatccttcatttttactctataaattggaaaagacagccatttttcgtttttggtttttttgtttttgtttttgttttttttttttgagatggagtctcactctctcgcccaggctagagtgcagtggcatgatctcggctcactgcaagctccgcttcctgggttcacgccattctcctgcctcagcctcccgagtaactgggactacaggcgcctgccaccacgcccggctcatttttttgtgtttttagtagagacggggtttcaccgtgttagccaggatggtcttgatctcctgacctcgtgatctgcccgtctaggcctcccaaagtgctgggattacaggcgtgagccatcgtgcccagccaagacagccatttttcaatcttaattgtaagtggtctgagaagcatggtttaagagccactcttactttaaaatacagtatgaaaatttaatcgcgacttggatacctagttaatgtcagagaaaataaaacttacatggatctgctttcttcattaaaaaaattaagcctattgaagagatgcgacacacgattgtagatattctaacaatgaagagtcaagaaaaagctaatttaggtaagttttagttattttatttccttcatgtgaactgtagtttttttttgttgttgttttttaacttttattttaagatcaggagtacgtgtgcaggatgtgcaggtttgttacaaaggtaaatgtgtgtcatgggggtttgttgtacagattattttatcacccaggtattaagcctagtatccattatttttcctgatcctctccctcctccaacccatgtgccccagtgtgtgttgttctttagctgtccatgtgttctcatcacttaactcccacatgcagtatttagttttctgttcctgtgtttgcgaaggataatggcctccagctccatccatgttcctgcaaaggacatgatctcattcctttttatagctgcatagtattccatggtgtatatgtacattttctttatccagtctatcattgatgggcatctggattgattctatgtctttgctattgtgactagtgctgcaataaacatatgcgtgcatggatctttataatagaatgatttatattcctttgggtatatacccagtaatgggattactggattgaaagtatttctgtctctaggtctttgaggaatcgccacactgtcttccacaatggttgaactaatttatactcccaccaacaatgtaaacgcattcctttttctccacaaccctgccagcatctgctatttctttggccttttaaggatagccattctgactggtgtgagatggtatttcattgtgaattgtagttttattgtttctttgctgaattagtttttcttttatctttttaaatttttaaaatatgtaggtttctttcctcatacttctgttgacctgcctctgagataaagtggctttatgtagtataaagaatttttaattaggagatctggctcaatatttagatttgtcactgaatgtctgtgaaagttgcattgtctctctaggctttgtctgccttaaaatgaggcagtttgactagatatccagacttttcacctgttaaattctgtgatctgttgtgttggctagaaaagctcatttaagaattctctttgctggggatagtagatggagataagagattcattagttgccagtcataaaaacattttaagattcagataaagtttatgccagttgatatgattttaggcaaaaaataccctcttatctgtaaaatacagattttttgggaccattgaatgaaataatatttatttatttatttatttattttttttttgagacggagtctcgctctgtcgcccaggccagactgcggactgcagtggcgcaatctcggctcactgcaagctccgcctcccgggttcacgccattctcctgcctcagcctcccgagtagctgggactacaggcgcccgccaccgcgcccggctaattttttgtatttttagtagagacggggtttcaccttgttagccaggatggtctcgatctcctgacctcatgatccacccgcctcggccttccaaagtgctgggattacaggcgtgagccaccgtgaaataatatttataaagtatcatagtctatgacacatagtaaagtcattaaactgtagtcattaatattaattaactttagaaaaatggttttcaattatttgctgtaactgtatattatacagtcaacaaatatttgagtgcatattatataccatcgcctatatatctagttattttcttttgattaattttaacaagagtcaaacagtttgaactttttcttttttttttttttgaaagagtcttgctctgttgcccaggctggagttcagtggcgcaatctcggctcactgcaacctccgcctcctgggttcaagcgattctcccgcctcagcctcctgagtagctgggattacaggcatgcgccaccttgcccggctaattttgtatttttagtagagatggggttttgccatgttaggcaggctggtcttgaactcctgacctcaggtgatccgcccaccttggccttccaaagtgctgggatgacaggtgtgagccaccgcacccggccaacagtttgaacttttaaagtctcctgatacatgctgccagattgctttccagaacagtattagtacctttttagtatgcaaaattaatttaagatgtagagatctaggttgaagggctaaaccttaaaaaaaaatcaaagagcatactaaagttctaaattaagtatgttatgtaagcttttgattacatgtattaactgaaaaaaaaaacttgttcattggggttaatatgctaatggctgtgttggaggtcatgcttctaatggcagcatgcttagttcatcatggattatttcaatttatggtgactgctaatatgtaccaagggaacatacagaacatctatatgatctgatcttactagtagtatttagtgaaggagcttgagaaggagggagagaagggaaaaccgaggaaagattagtgtaccacaaacaaaaggaggagaaaagtttaagaataacccagtcctggccgggcatggtggctcacgcctgtaatcccagcactttgggaggcctaggcgggtggatcacgaagtcaagagatcgagaccatcctggccaacatggtgaaaccccgtctccactaaaaatacaaaaattagctgggcatggtagcatgtgcctgtaatcccagctactcggggggctgaggcaggagaatctcttgaacccgggaagtggaggttgcagtgagccaagatcgcaccactgcactccagcctggtgacagagtgagactccgtgtcaaaaagaaaaataaaaaaaaagaataacccagtcctgtctcttattcacaaaagacagcgacgtggaaattcaaatttcataaaaagatctctcataattctatttctggagatatgtggaaagataaaagcagtattctgattaagttgctcttcctatcttataggatagtactagttggtgttttctagcaggtatcattagtctttagatgggggaaggaggtatccataaactcttggctttctgaaatgtataattgtaagttctggatataaaaccaatttcacaaatcagttatttgtgaacagcaaaagaacataagtggtcgaagtagttcagaagagggttaaaaaaaaaaaaaggacaaataataagaaacaagcaccacgtgggtgtttcatagctacctgaaacacaaatagccaaacttgaacacataattttcccctaaacctgattattcttttagttctctgtcttaatgaatggccttgtttggttgtccaggtcagaatcttggtgtgattgtttactccttctttctttcccagttcccaaccttttttccccagctaatcaaattcagtttaacttcctaagtatttcttaagatctatctacttcactccattcctactctcctttgtatagtcaagatgacctacacgcttacctagactataacagtggtcttcaaacttaagtttcctgcctctctgctcttcattccaatccattctcaacactgcaaccaaaatgttctgtcactcatctgcataaattcctgagtccagcctcttctctttccctctcccctacatccctgaatttctctttctttttttccatttcctgaaaggtttttactctcttttccctccaggtctctccaagacaatcttctactttttcttaatttctgcttatcctttagacttcaattcaaatgttagttccttggagtagccttccctgatgatttccctgatataccatcccctctcctctcaacctaggtttagtgcacctgttttgtgctccctgtttttttccctatgcaatatttgatgcatttgattgtactatgtagttgtttgtcctgtcttttgcatatgtaaactcagtagataaggacagtgtctgatgttcctgaccattgagtctcctgtgctaatgcaatgcctgacacatatttggcacttaaatatttgttgaattaatctatattcttttctctccttcagcttccacttaaaactcagtcactatcatgcaactaaaacttctcttagtaaaaatttttaataattttcctaataattaaattcagaggtttttttttccagctcaatggattcaccaggatgtctcacaagtatttccagcctaacatgttttattttgaactctttgtctgccctcactgctttcccatgcccagtatccctttcccatacccaacatccctttctcccaaaaaagaaaagaaaaaactcttctctggcatttatgactcttaagaaatgttggataagacgctcctaatacatttgcacactcattcctacacagtcatgtattcatttgttaataagttctgacttgggtgggtgtggtggctcacgcctataatcccaacaccagaagtccaaggtggaagaatcgcttgaggtctagaattcgagaccatccttggcaacatagtgagaccccatctctacaaaaagtaaaaattagctgggtatggtggtacacacctttaggcccagctacttgggaggctttggcaggaggatcacttgaacctgggaagttgaggctgcagtgagctaagattatgccactgcactccatcctaggtgacagaacggcagacaccctgtctctaaaaaaaaaaaaaaaatgttctcagaaatatttctcagattggacccttcctttcctatctgatctcttcctaacttacttaggctattacaacaaccttgtcttcttgccatcacagattgttacttttcattctctgccattctagacagtcctttacattgaccaaatttaattatgtctgtctctggtgaattttttttaccaaacttctttcatataaagctcattacaatctagctctctggtgaattttttttaccaaacttctttcatataaagctcattacaatctagctcttgtttacctatctaagctcaatacctcctgctcccactcctaaccttgttccttaccctatattctaaacacactggctctttaatgttatgttaatttaatagatcattttcttttatgtgccatatgaaggttgtcttccttggtcttgatcaagtactcatttttaagacccagcctaaatctcgcttgtgaagcattccctaaccatctccctataccacaggcaaagttagttgtttctttttgtgggttttaataatcctttgttcttatttcatatatagcatttatttcattttataatagtatttgttatatagttggcagcagtatttgctgaggaaaaggaatggttcagagatggcaatcgtgttcttttattttgaaaatgtggccaactaggaacaactttaatgtcttctgattttgttcttaaaattcagccaaaagcttaatctataaatgtattttctataggagaaaatatggagaagtcttgtgcaagcaaggaagaagtcaaagaagtcagtattgaagatacaggtgttgatgtagatccagaaaaactggaaatggagagtaaacttcatagaaatttgctatttcaagattgtgaaaaagagcaagacaacaaaacaaaagatccaacccatgatgttaaaacccccaatacagaaacgaggacaagttgcttaattaaatataatgtgtctactacgccatacttgcaaaggtaaacttttaaaatgtaccatgatttgttttcatgcttggagataataaataacggcatttaaaaatctttgagatagcttcagattacagctaccatttattaatatagaaatttcagtacgggcatggtggctcacgcctgtaatttcagcactttgggaggccgaagcagacagatcacttgagcccaggagttcaagactatcctgggcaacatggcaaaaccccatctctacaaaaaataaaaaaaattttggctgggcaaggtgctgtgtgcctgtagtcccagctacctgggaggctgaggtgagaggatcacttgagcccaggaggcagaggttgcagtgagccaagatcatgccactgtcctccagcctggatgacagagcgagaccctgtctcaaaacaaaaaagaaaacagaaaagtttttaaacaaatagaatgtcattagaacatttcacctcttaaatactgtatttactttccctaactattgccattttgaaaaagaaaacttttatttgaatttactttaatctgtgtgttattaataacagtaggttttggctttcaggaattagccagttctacagatactcaggtatctactgtatacaagttgtaatgacaaattgagaaaaggataagtttctcacttcggtgagcttatagtacctctctaaaagacaattaaatgcttttacctgcttataacatacaagctatatagtatggtacatatcatgaaagtacagagtaaaaatgttaacatgtttttgaactctggaatattgttttaattttcagtgtgaaaaaaaaggtgcagtttgatggaacaaattccgcatttaaagagctgaagtttttaacaccagtgagacgttctcgacgtcttcaagagaaaacttctaaattgccagatatgttaaaagatcattatccttgtgtgtcttcattggaacagctaacggagttgggaagagaaactgatgcttttgtatgccgccctaatgcagcactgtgccgggtgtactatgaggctgatacaacataagagaaataaagctctgttagggaatggggtttttattatttgtggggtgttttgttttgagtagctttatattgctcttaggtctggagttggccatgtacctatgtatcctaagcattcacggcagtgagctcctttactaacattcatgttatggcaagagttgtcctctacattggaaagctaatcctaccttgtcagtttcaaccaactgagttttttctttaagaaaggtaaattttgtcagctagtttactatgttccttgaatataaacaggttataatactaccctgttcactttactaaatataagtacagtaatgatgcataattagaaaatgaggtattctaggtaaaatgtatgtttgccttgacatgtttttaaaagttatgatgtacctccctgcctttaaacagaatacttttttcttttttttggcctttctcagattagtcaaaaattctatagaatgactcacttcgaatactaagacacaggaggtttagcctgctttcttaccaaattcatgttacccagacttgtgttctcttgcgtcccttggactgcctgttgattgatggaaagtgtctgcactgacacttttcgtcagtagtctgtagtttcgtggcctcttttgattataactggggtcaccaagaaggtttacttaattaaataccgcatttctaagagaagatactttgtgtaagaaaagatgccacatttagtggtttaacttttgtaacttcacttgatagtttttaagcaattagaatggagttagggaaagaacatatcatactgaacaaatgtcattctagtttagatagcatttctaagataactgatactaatacttgttttcttccctataacataaaaaacttcactgttaagtcatgtcccttgaaacatgatagttacatacacagttttctctccacacataaataacaccactaaagttgttttgtaaggttccaaactaatatggcatatatcaactctacagtttcaaataaatgactttttaattgtaaaagattagttgaaaaactgtatgaatgtgaagatcacatgcttagtcatttttatgttcattccactttgtatatcttttctatttattgacttctcatgttctagagagtaggacttttattccgtgtacctgatatatatacaattaaaatatctgtgtaattatgttttaatgaagtttatttcaacagatattttatgaaatgcagtttaaccacagtgaatgaattttagctttgcttttgaaatacattgtaagatttgacttgaggtttttgacacttaagtacatgcttaatgatatattttcaaaagtcatcagtctacttacataaactttacctaatttttttcactttaacaaaaacataactatgcccttgttttttcatactttgacccaaaatatgccattttgaaataaaatttaagctttgatacac

SEQ ID NO: 44 - DNA, 6368 bp, Homo sapiens
cggcggctacgactattctttggccgggtcggtgcgagtggtcggctgggcagagtgcacgctgcttggcgccgcaggctgatcccgccgtccactcccgggagcagtgatgttgggcaactctgcgccggggcctgcgacccgcgaggcgggctcggcgctgctagcattgcagcagacggcgctccaagaggaccaggagaatatcaacccggaaaaggcagcgcccgtccaacaaccgcggacccgggccgcgctggcggtactgaagtccgggaacccgcggggtctagcgcagcagcagaggccgaagacgagacgggtaaagggatgcgggatatctgcaggagggtgggtcgagcagggtttggcattggcttagcaggcagagaagagtggcgagaaggcatgtcctgggcttttggaagggggccagggtctggagtgcagttggtgctggtgtgtggtttgccacagtaggagttctcccatattagcatcaggaccccgccaacactgtgtgtatgctgccggtctgctctctatagggggcatctgcctgtacataatggggtcaaaccaagctctaaaacgtgtagtcttcgctcagctccgcgcctttctctccacttttaaaccccaggcactgctgtaggactctgacccctatcctcctcacgcttaagagatgacctctactttagaaaagcgtgtacaaaatactttgcttttggcaaattccgccattttagccggatttgctctgttgctccaccctcgggcgacagtggtgaaccaacaatttttttgctgtctttcctaaacttgtcacgtattggcctgtcacccgacccttcttgtggccctgataagttttgcataattccacctagtgttatctattgatagcctttgtgggaatgcctgtgacaaatgggaacatcccttctcttttgaatactgaaactcttctttgtcccagaaagtttaattcctgatagagtatttgggagaaaaagcaaaggccaacacccataagagaaagaatgcaagactagtaggctcaaagccagttattaatttttttttaggttgcaccccttaaggatcttcctgtaaatgatgagcatgtcaccgttcctccttggaaagcaaacagtaaacagcctgcgttcaccattcatgtggatgaagcagaaaaagaagctcagaagaagccagctgaatctcaaaaaatagagcgtgaagatgccctggcttttaattcagccattagtttacctggacccagaaaaccattggtccctcttgattatccaatggatggtagttttggtaagttttaaggaaaatctgtgtggaattacggtaattataattattagatgatattaatgatttgcattttaagatgtcttatgtagtcattttgactatagtgagttaggtttaatgtaacaaggcttagaaaggatgtgacttatctcagatctcacagctaacacttgacttggtgacatacaaaaagatccttatccagtgctctttcaggttcactgccagtcacatcaatctaattataattagatcttaaatgcttattttaatctgatcccataaatgtgttcttggttgggagaatagatttcagttttatttaactcacttatatatcacttagtgctatttgaagatgcagtcttaaatattgtgattacataacgtctcttccagttttataattttgtttctataaaaccagtctggattagcatctgataccagaaagtgacacttttcctcctacaagtaaatagttgtaccatggctgtttactcttacccatgtattaaagtagcttctgtaaacagctctttgcagtttgtactatttctttgccctagggatattgagtcactggacagctcactaaatccaatctcattttagttttagttgtattgattgtgaggaaggaggggtgagcaggaaaagtcctttggaaataataatttgtgtgtttttatcaaaattttgcagaaaatgtttaatctcaaggtgatctttgaagtgaaaggaataatggatgatactctttgcttcaaaataatttatactacaaaaaataaattatttatagtgttaatccatttgcccataacaaacctaatttcttaataacacttgttaatagaggccatttaactgatgctagctattgcctacttgtgctttatatatgtcagactctgggatctgcagtttctcttgggacaaatcttagatattatctcaaaacttggattttaaaagtgttctgtcctaacagaaccaccatgccatttgctcctttctgttgtggaagatggatactttaagataatacctgattctcattttcctgttaggggcctaccaatatgtttttttttttttccctcattaactaaaatcattccaaagttctatgtacagagatactgagactagggtaaaatattctacatattttgtcatgagaagctctttttagtttgaagaaataagtgctttgttaatatgagattccttccatggcagtcatttttagctattaaactaaataggcaaacaattaatttaatcatatcttttgaattgtcccagagtcaccacatactatggacatgtcaattatattagaagatgaaaagccagtgagtgttaatgaagtaccagactaccatgaggatattcacacataccttagggaaatggaggtaaaggttctctgaatccagtttgtataatgtatttgttaaatgtggctaaatgaaattgagaggataatgtttaaatttttaaactaatgaattattctaatgctacagttaagtttatagcatgtagcctctcgtaattaatggtaaaataatctaattgcagtttttacactagaataattttaacactataaataattttctcaataggttaaatgtaaacctaaagtgggttacatgaagaaacagccagacatcactaacagtatgagagctatcctcgtggactggttagttgaagtaggagaagaatataaactacagaatgagaccctgcatttggctgtgaactacattgataggttcctgtcttccatgtcagtgctgagaggaaaacttcagcttgtgggcactgctgctatgctgttagcctcgtaagtctaccttggtttgtttaaaagtgatcacgaccttttgtctagggaagaaattgatttttttaatggtgaccttttaacatacaccaggcagagtcagtgactactttagggatggcaatgtgctggggcttagggcagtggaggaggatgaaactgttctaatctagaacactaattttcccccaactggattccttgaacatgatatagtacactaggttacaaattttaaaacattttccttccaatattactttctggcatataagcagtgtctcttttattaagaagtaaaggctgggtgcggtggctcgcgcctgtaatcccagcactttgggaggccgaggtgggcggatcacttgaggtcaggagtttgagaccagcctggccatcatggcgaaaccctgtctctactaaaaatacaaaaattagctgggcatggtgatgcatgcctgtaatctcagctactagggaggctgaggcaagagaatcgcttgaacccaggaggtggaagttgcagcgagctaagattgcaccactgcactctggcctgggcgacagagcaagactcttgtctcaaaaaaaaaaaaaaaaaagaaagaaaaactaaatttaaaaatgaaaacatgaaacatgttttcctaagacttgtatttcctaaattttcagctacttggtgaactctggcattgttcccatctcgagaagtctcatgcctttcatttacttcctttgactgaactggggaaaatatctcaaaagtcctttattgatttgggccttttaattagcaattagctatccagtctctactagaaatgatgatcaagtgtctggaaatgcagttggtgtggattttggattcattccatattctgctaatgggatttcagaactgggataaggaagcttgcttctcttttaggactgattacttaaaacttttttcattgtagaaagtttgaagaaatataccccccagaagtagcagagtttgtgtacattacagatgatacctacaccaagaaacaagttctgagaatggagcatctagttttgaaagtccttacttttgacttagctgctccaacagtaaatcagtttcttacccaatactttctgcatcagcagcctgcaaactgcaaagttgaaagtttagcaatggtgagttaactttcattttgttgaatggtgattctttggtaataattaggggtaagccctaattcctttgtaaaggaacctagttcctttgtacagcagtggtgaagagatttagtattcagagggagattaatgctgcagtatggaagaaagcctactgctggcaaaagataatctatatcaggaaagcactagaagcagaggtctaaggatgacatcttggggatgggtagtcagaagagttgttttttaaaagttaataaaggagggaaaatacaggatgaggatggaacaaaacactaaaatgattgatatgtttaaagatgaggctgtgagatattttttctagagttgctacagagccgttatcaaaggcaggaaaaaattaggttagaaggcagaggtttgacatttgaattctaaacgctcttgtgatcataaagtattttttattccagtttttgggagaattaagtttgatagatgctgacccatacctcaagtatttgccatcagttattgctggagctgcctttcatttagcactctacacagtcacgggacaaagctgggtatgtattacggtcttcacacacctatcttgtgactgaaatgcctgtgccagattaaataataattgtcctacaaaactgagggttgcctagatgttcttacttggaaaaacttcaaatatatatagttgacctttgaaaaacacaggtttgaactgtgtgagtccacttacacatggatttttttccaatcaaatgtggactgaaactacagtattcaggggattcacaacccatatatatggaagggtgactgcaggacttgaatatgtacagatttgggtatatttgggaagggtcctggaaccaatccctcatgtacactgagggatgattatatactgtttaaggcatgttacctgttgaacagtgtttgttaggtagtaagcttagttgtaacttggattgaaaggtgagcttttttaaaagcatctgacctgttgctggcagggaaagtagtagaaaatggatcgagggatggaataatggcctgagaaaactagtagttggaaaagttaaagattagtactggaatttaacataagcttaatgccaactatttactgtgtttggtgtgttactaaaagcaaaactcaggggttctctattcccttctctgtagcctgaatcattaatacgaaagactggatataccctggaaagtcttaagccttgtctcatggaccttcaccagacctacctcaaagcaccacagcatgcacaacagtcaataagagaaaagtacaaaaattcaaagtaagaattaacttggatattgaagcttacttttctagattatggttcagagatctttgacattttaaccttattcatgaatctgccatagcctccttgagaagctgttctctaaattggttatgtgtttgaagaaggttgtagttcatgctttctgccctgggtctgggggagaagagagaaggaagggggcatgcatgtgtgtttcagggaccagacagtgtttctaaaaccatcaagtcggtcagacagaaatagcattttttagttcccaatacatgagtacaaacattattccatgatctcctttacccagtgagtgtttactaaaaatgctttttttttccctacttacaggtatcatggtgtttctctcctcaacccaccagagacactaaatctgtaacaatgaaagactgcctttgttttctaagatgtaaatcactcaaagtatatggtgtacagtttttaacttaggttttaattttacaatcatttctgaatacagaagttgtggccaagtacaaattatggtatctattactttttaaatggttttaatttgtatatcttttgtatatgtatctgtcttagatatttggctaattttaagtggttttgttaaagtattaatgatgccagctgtcaggataataaattgatttggaaaactt

SEQ ID NO: 45 - DNA, 23635 bp, Homo sapiens
gacggcggtagcagctaggcttggcccccggcgtggagcagacgcggacccctccttcctggcggcggcggcgcgggctcagagcccggcaacgggcgggcgggcaggtaggagagcggctacacggcgcggggaggctggggtcctgggggcgcgaggccgtcccgccccgccccgccctcggccctcgccctcccgccccggccgccgctttccccgggaagcgtcccccacggctcctcctggggccgccgccagaacctgtaccgcgccctgtcatgggacccggccctagaccgaccgccgggctgggccccctggatggtggccaggggcggctagagctgggccaagaccgacggcggagcgggcgccccgaggtgctttgctctcctcgaccctctcctgtctctcggtcgcccaccttggctctttgttggctcccagcacgcggaccctcctgttgttctttggtcccttccggcctccgtcctggggccaactccatctaggccgcctgcggcggacacctgggcccctaccgcttccccgcacctgctgcgccgctccaccttccccccgcaccgcatccctcttgtgcaccagagtagcaccaaagcaccagcctggggccggtcccttctctgcccagagcccctcccgggcctccatagtcagtaaaggcccctcctgactaaggctgggtctgctgctctcccgagctcctccaggccgccagaaggcttcctccgagtcactttctccctgagttcgaggcttgcgggtcccccagcgatccagcaccccttcccctgccctgtacccagttattcagggcgaaaacctaagcgtcgtccgtaagtcccatatgtgccagtggccaggcccgggtctggtctggcatctactccttgggctccagaagcctgtggtttccctgcttcccttctgctcttaacctccccacccacacacagcaccacagtgggcttctcaagctgcagcaccgacctgccggggctgccccctctctcttctccaggaccctccccaactttgctcttcttcaaatcaaagcctccccaggtccccctccaccaccaggtgcctgtggggttcctgccctggtcgacactcggttctctctggcagcctttttccctacgtcattccctagactgggaacgctgtagacagaaagggtggcaagtgtgtgggtgaccggcgtgaggacctgggcagccctggaacctgggactgactggaggctctgatgtggaagttccttggcacctgttgctcagctctgggcttcccttgtttgcgcatcgtctcccagctcctcctctgggccttcaccctctcagcctggtcttgtcccgctgcctagcccggtgggagagagcagaccagagccgctgtcctgcttttctgccctctactgcccggtcctgcctcacgtcacacgcagaggcctgtggggagaccagggcttcctctggctcatccgggtttcttattggcccgggcttttccgtctcttgacttctgcttgatatagtaatacagcagtagagattatgcaggcttgggttttctttctcaccatctcagcctgaaggccctttagctcttggtcccaggaagcagcagtgctgcccatggctccccctgccaggctggagagtgagtctctgaagcaagatggggactcagtctgaggctttctctgccaagagacacgtgtgggaggtgtgagttccagagcaatgagcacacctgtgtgggaagtggtcgtgccccttgcagcagctgtcacgtctgtgtctggacaatgtggtagtgttgccctcacactgacacaaacatgttctgcttttccagaatgagtctgcaggtcttaaacgacaaaaatgtcagcaatgaaaaaaatacagaaaattgcgacttcctgttttcgccaccagaagttaccggaagatcgtctgttcttcgtgtgtcacagaaagaaaatgtgccacccaagaacctggccaaagctatgaaggtaagtgtgacctgtacagtgtgtggctggccaggttgccctagggcctgctttcttggtgacctctgagctgcaggacactgctggtgtggctgtaacagcttgaactaatgaataggtgctctcctcctcactccgcaacaggtgacttttcagacacctctgcgggatccacagacgcacaggattctaagtcctagcatggccagcaaacttgaggctcctttcactcaggatgacacccttggactggaaaactcacacccggtctggacacagaaagagaagtaagtgttggtgctgctggacatgctggagcttcaccctctctgtccgatggttcttgcaggaaagtgctgtcttgttctatcaggccttggctggattttttgtttgtttgtttgagatggagtctcgctctgttgcccacgctggagtgcagtggcgcgatgtccgctcactgcaagctccgccccccaggttcatgccattctcctgcctcagccttccaagtagctgggactacaggcgcctgccaccacgcccggctaatttttttgtatttttagtaaagaaggggtttcaccgtgttagccaggatggtcttgatctcctcctgacctcatgatgcgcccgccttggcctcacaaagtgctgggattacaggtgtgagccaccacgcccggccggccttggctggatttctcctgaaatctgcactgagtgtatgcagcatatggccagttcactaacagaaaagtcgatcatcagatacttggataacttcatacttcacttttttttttttttttttttttttttctggagacagagtctggctctgtcacccaggctggagtgcagtggctcgatttcggctcactgcaaactccacctcccaggttcatgccattctcctgcctcagcctcccgagtagctggggctacaggcgcccgccgccaccactcccggctaattttttagccgacctgattcttaactgcaagtggatggcgaggcggtgtctgtctttgcctagaaagggaggatcctggtggcagctctttactctgcggctgaactaatctgtctgggcacccaggaacacctcatctgcatccagggtgggaagggaccccagaggcatgattttctgttggttttttgctgatgtaactgttgttgctgttgttttgagacagagtttcgctctgtcacccaggctggagtgccgtggtgccatcacagctcactgcagcctcaacctcctgggctcaagcagtcctccaccttggcctccttagtagctgggactacaactgtgagccaccatgcccggccaattttttttttttttttttttttacacggagtttcattcttgttgctcaggctggagtgcaatggtgcgatcttaactcaccacaacctccgcctcccaggttcaaacgattctcctgcctcagcctccgagtagctgggattacaggcatgcgccaccacacctggctaattttgtgtatttttagtaaatatggggtttatccgtgttggtcaggctggtcttgaactcccgacctcaggtgatctgccggcctcggcctcccaaagtgctgggattacaggcatgagccaccacgcccggctggcccaaaacttttaagcagattttagatgtgcagagaaaagcataaggaacagaataccactgatgcttctcaccccctgagataaaatgtcaccagtaagtgcaggcagcatttcctacatccttctctgggccctgggtccgtctcccctctacccctccagcctgaatttgcagttcttcccatgtctgcttgctacttttcaactttgttttttgccccttttgaaatttggtcaaacgaagcgagaatgaatcaaacattggtttacaacgaccccaagaaggaagggagacccagcagcagagaagtcgcctcccagctgccatgggtgtgatccgtcccagagccacagatcccctgcctctcccctatgcctccaggatcacccagcagcctccatagggcagagggtgtagaggagctgggaggggcttgagaggttggccctgaggggctccagccagagtgactctgagcttgtggcttggactcgtggctgtcatctcctttctggaactctgctgaggcccaggtggtggtcactgtggtgctcccacgtcagtgggatgagaccaagagcagccgctgcgtgcagctgcccacgtgtcattcagaggacagccgagtggccgcctgggaaggcagtgccgccccaaggtggcagctgggcagcagaggagttgtgagcagtctgacaggtccctcaccctcagtttctcagttttgacatcttcaaacttagagttggaagagaagggcaggtgacatgggccccttatctgaggcactggcacatgaccctgcgtcttctcagggacctgaaggctggggaacaggtgaaacagtgtttgtgccctctgtgttgtagtccagccccaaccatcccaacagccgcctcttctgtcaggggccctgcgccatgcagtcccacattgtgagcagcgagtgccccagagacaggtgggtccctgggaaggtgttctctgcacctgtgccactccactgtagcaggcgccatcccagggaggcgtcgcagaggccactcaggtccttctgtgcctgcaggtggcatcctgcacctcagccctgcccttcagtgaaggctttgactgtccctggccacagcactgccagtccccgacttgaaggggaaagcagattcatgcagaaaacctttgtttaccacgccccctgctggccatcctggggcctgcaagtccccaggactgatctgttgggcatgtcctcgggtgaggtttaagccacaggacaatgttgactgagctttcttgttttgcttgtagctgatgttttcacgcagattaaagtgttatcggaatgctgtcaggtcccttaatgttagaattcagggtcattaagtggtgcacacccttcagtgattaggagaaacacaggcggaaataatgattatatgacttacaggcccacagcaggctggaggccacacagaggactggggccaggccctggagcataggcaggggacagctgagagggtggcagccagccttgtctatcggggagtagggtggggtcactgtatgctggtgggcaggtgctcgaatggattttttacaggaaatggtggatgccgggtgcggtggctcctgcctgtaatcctagcactgggaggccgaggcgggtggatcacctaaggtcaggagtttgagaccaggctgaccaacatgatgaaaacctgtctctactaaaaatacaaaacaaaattagccagacatggtggcgggcacctgtaatcccagctacttgggaggctgaggcaggagaatcgcttgaaccccagaggtggaggttgcagtgagccgagatcatgccattacactccagccttggcaacagagcaaaaatccgtctcaaaaaaaaaaaacataaaaataaaggaagtggtgggaaattgaggagcccagtctaccaggtgggagagatgcctccaggcttctttctctggcatcagcttgaggcatttgggtgtgctgtcccacatctgaccccccaggcagcagcctgtgctgtgtgcatgctgtgggcctgggggcagacctcgtgcatgatgacgagtgctgtttgggtggcagaggctgctggaggagtctgggtccagcacctggcaaagcgcgtgatgagcacaattaaacaggcaagcagcccagaggcacccctgtaacttggaaccccaagaagcatgagggcggggtcagcgaggaagtcacgtggttgtgtccagccgttccaccgggagctggtccctgggaggacaggaaggaactacattgaggaactgaggtggggggtggagaacgggaagccgtgccaagggtgactcagccctgcttctggtgtgagaatgttaaacctatgttgagaatgaatgctgaggcccctaacctcaccaggtactcgctgcttcacgttgattaagtctcttttaaaagccaacagctcatcaaggaagtggatgccaaaactactcatggaattctacagaaaccagtggaggctgacaccgacctcctgggggatgcaagcccagcctttgggagtggcagctccagcgagtctggcccaggtgccctggctgacctggactgctcaagctcttcccagagcccaggaagttctgagaaccaaatggtgtctccaggaaaagtgtctggcagccctgagcaagccgtggaggaaaaccttagttcctattccttagacagaagagtgacacccgcctctgagaccctagaagacccttgcaggacagagtcccagcacaaagcggagactccgcacggagccgaggaagaatgcaaagcggagactccgcacggagccgaggaggaatgccggcacggtggggtctgtgctcccgcagcagtggccacttcgcctcctggtgcaatccctaaggaagcctgcggaggagcacccctgcagggtctgcctggcgaagccctgggctgccctgcgggtgtgggcacccccgtgccagcagatggcactcagacccttacctgtgcacacacctctgctcctgagagcacagccccaaccaaccacctggtggctggcagggccatgaccctgagtcctcaggaagaagtggctgcaggccaaatggccagctcctcgaggagcggacctgtaaaactagaatttgatgtatctgatggcgccaccagcaaaagggcacccccaccaaggagactgggagagaggtccggcctcaagcctcccttgaggaaagcagcagtgaggcagcaaaaggccccgcaggaggtggaggaggacgacggtaggagcggagcaggagaggacccccccatgccagcttctcggggctcttaccacctcgactgggacaaaatggatgacccaaacttcatcccgttcggaggtgacaccaagtctggttgcagtgaggcccagcccccagaaagccctgagaccaggctgggccagccagcggctgaacagttgcatgctgggcctgccacggaggagccaggtccctgtctgagccagtaagtgtgaggatgggatggggagcgtggcgtggggcagctgccctgcagtgtatgtggtccaggacccgaggccagaagtgtcatcagatactcctttgaggccgggtaggttctgcctgaggaggggcctctggataaaaacagggctcaggtggctcccagctgagggtgcttggccttgccttggctgccatgcatctctttagtgctcctggcctaaggagggatccaataagggcgggctcaggccagaagccaaatgcaaccaaccctgggcaggaccctgtcccccagtcatgttcctcctcaggtgaacttgacttgggtgtgtaactccaaaagccaggcaaagcctgttactgcctgggtggcgtccgctgcttgctggggtcttggccgtgggtctgctgcctcctggctgaatggtcttaggctacatctcctagagttgctcagtgggagattgtcctgcctgtagggtccagccctactgggtctgtgggttttttctcctcgtgtgcatagacaagagattgtacaaataaagacacaagaaaaagacagaagaaaagacagctgggcccgggggaccactaccaccaaggcacggagatcggtaatggccccgaatgtctggctgcgctgttacttattggatacaaggcaaggggacaggttaaggagtgtgagccatctccaatgataggtcaggtcacgcaagtcacgtgtccactgggcccttccctgtttggcagccaaggcggagagagaggacagctgacgccattattttttctatgtatttcaaagactttagcactttgactaattctgctactgctatctagaagacagagccaggtgtacagagcggatcatgaaagtggaccaggagcgtgactgctgaagcacagcatcacagggacacaggcctctggatggctgcgggcgggcctgactgattccacaagagatggtggagcagagtcttctctaactcccccagggaaagggagactccctttcccagtctaattaacgggtgccttcccaggcactggtgctaccgctagaccaagctaggtaacgggtgccttcccaagtgctggtgttaccgctagaccagggagccctccagtggccctgtccgggcgtgacagagggctcacacacctcttccggtcactttctcaccgtgtgccttcacctcctatctctatatggcctggtttttcctagggttatttgtttgtttgtttgttttttgagacagagtctcgctctgtcacccaggctggagcgcagtggcgtgatctcgcctcactgcgagttctgcctcccgggttcacaccattctcctgcctcagcctcccgagtagctgggactgcaggcacccgccaccatgcccggctaatttttttgtattttttagtagagacggggtttcaccgtgttagccaggatggtctagatatgacctcgtgatccgaccgcctcggcctcccaaagtgctgggattacatgcgtgagccaccgcacccggcgtttcctaggttattattgtagaacaaagattattataatattagaataaagagtaaagctacaaactaatgattaacgatattcatatataatcatatctataatctatttctagtataactattcttattctgtatatttatgatactggaacagcttgtgcccttggtgtcttgccttggcccctgggtggcttgctgcccacacctgccccagcctccacatttgaagccttttgtcagtttcacagtaaaagggatgtactcatccttgtgattccctttggctgcatcgtgctgactttagagctcccagcctgcttctcccagagctggcaggcaaggcgcgtgttttcctgctgggtgaggttggtgaggcagttttgtggccaggtcgcttgggacagccccatgcctggcacgctctagctgaatgttcacgtggccggcacagcagtgcagggaaaggcgatggcagctcagtgctggagcaggggacgccggggttatggggtggggggcatgggcctctgctgactctgtctccccaggcagctgcattcagcctcagcggaggacacgcctgtggtgcagttggcagccgagaccccaacagcagagagcaaggtaaggggtgcttgtgtgggtacctgtgctcctggcctggtcgtgtagaagagtagcaggcagtggaagcccccagcagccttgggtgacggggtgggatgtcccgctccctctcccccaagtctacttcaacaaggttgtggggaggcaaagccacaccccaagtaccttgactgcactgcacagggtgactctgccctttcctccaggagagagccttgaactctgccagcacctcgcttcccacaagctgtccaggcagtgagccagtgcccacccatcagcaggggcagcctgccttggagctgaaagaggagagcttcagagaccccgctgagggtacgttgcctggcacagacgtcacacacagtctgcccggaggggatcccgtgagcacttgggcagctcgagacacctgcatcatcggcaggtggtcatttcgcaggcagttgggtcccttgactttgaatgactcatgcacaaacttgtggtttgtcaaaacttagtcagtgttaggagagcagggctcatacctttaacataaaagacttctagaaatggaaactgtagactcaggaaaatgagcaggagaggtgaacaatgcagtgcgctaatgagatacaagtgtagagtcaacaactggatactcgatcatcagaaatactgcttgaaacgaccttcttttttttttctgagatagtctcgctctgtcacccagcctggaatgcagtggcacaatctgggttcaatgcaacctccacttcccaggttcaagagattctcctgctcagcctcccaagtagctgggattacaagcatgtaccaccacatccagctaatttttgtacttttagtggcaacggggtttcaccatgttggccaggctggtctcaaactctgacctcaagtgatccacctgcctcggcctcccaaagtgctgggattgcacgcgtgagcccccgcgcccggcccagaaccccttgataatgaaatgtgaagcctgaaccttagacaccagactgcagttaaatacggtttgtccgtaagactggaggctgcagttgaatacggtttgtccataagattggaggctgcacttgaatacggtttgtctgtaagattggaggctgcagttaaacatggtttgtccataagattggaggctgcacttgaatacggtttgtctgtaagattggaggctgcagttaaataaatacggcttgtccgtaagattggaggctgcagttaaataaatacggtttgtccgtaagattggaggctgcagttaaataaatacggtttgtccgtaagattggaggctgcagttaaataaatacggtttgtccgtaagattggaggctgcagttgaatacggtttgtccgtaagattggaggctgcagttgaatacggtttgtccgtaagattggaggctgcagttaaataaatacagtttgtccgtaagattggaggctgcagttaaataaatacggtttgtccgtaagattggaaggtggaacggtccttaaattaaagtgcatttggtaggaattgatggctgagttgttttaaaggacacacagccaggtgggtataagatctcaatttagagaactgaaaacccaggcacacagcagacacgaatggcatgtagggtttgtcgctgacaggatagttgtgggccgccaccatgtggggatatcagctcagctgggatgggcctgtcaccctcacgcaggatccctggaatcacacagcacggccttctgtgtccggcgtctccctcggggaggtgtgtttccgagtcctggccatgctggagcaggtgtgggtgctcctgtccttgccgtggcagcttggcttcacatcatcttatccattcattcatggatttgctggtttctgctttttagctgtcaggagtagtgctgcctcgaatgttcaggtgtaagttctatgtggatgtattcttccatttctcctggatacatagctaggagtggagtcgctggtcacagtaactctgctcaccttttagctaccaggtggccttccagagtggctgcagtgtttcacattcccactggcagttataagagagctccagtttctccacatcctcgccagcgctgcttgtctgtcttgttgatcctagacttccagcgggtgggaagcggatctggttgcggttttgatttgcagttcccaggtggctcatgaacgagcgtctttttatgtgctcgttggatatcttctttgggaaagtgtctgtcgagatcccttgtccattgagccacttatgtttttattactgagttttaagaggtaaatcccttttattcaagaagtgagggaaaggaaaaaatacaaagttaagtcccttatcagatgatgtttcaaagtattggcttttggccaggcataggggcccacacttgtaatctcagcattttgcggggccgaggcaggattgtttgagccctgtagtttgagactaacctgggcaacatggcaagacctcatctctaccaaaaaaaacctttttttttattacctggcatggtggcgtacacctatagtcccagctgctcgggaagctgagatgggaggctcgcttgagccaggaggtcaaggctgcagtgagccatgattgcactactgcactccagtctgggcgacagcgagaccctatctgaaggaaagaaaaaaaaggcagaaatgaaaactgacaacaaggctaggtgcggtggctcacgcccgtaatcctagcactttgggaggctgaggagggcgaatcacctgagatcaagagtttgagatcagcctggccaacatggtgaaacctcatctctactaaaaatacaaaaattagctgggtgtgttggcacatgcctgtaatcctagctacttgggaggctgaggcgggagaatcgcttgaacccaggaggcggaggttgcagtgagccgagatggcgccaccgcactccacctgagcaacagagcaagactctgtctcaaaaaaaaaaaaaagaaaagaaaactgacaaggccatagcagagaaggacctacaagtttttgctagactaaataattggcaaccgttttttagcttaattgagaaaaggagagaatgagcaaatactgctaggcatgaagaaagggacaaaactagagatgcctcagcctggatctcagccagatcaagaccctgtcttaaagtaccagtttggtttgtttttttcccgagacggagtcttgctctgtcgcccaggctggagtgcagtagcatgatctcagcttgttgcaacctccgcctcctgggttcaagcgattctcctgcctcagcctcccaagtagctgggattacaggctcatgccaccgtgcccaactaatttttgcatttttcgtagagacagggtttccccatgttggccaggctggcctcaaactcctgacctcaggtgatccacctgccttggcctcccaaagtgctgggattacagatgtgagctactgcgcccagccacagtttaagagttttatagttttagaggccgagaccggaggatcacttgaagtcaggagttcaagaccagccctggcaacgtagcaagactcctcctctaccaaaacaaaaagtaggatagttttaactctcacagttagggtgttgatccattctgagttaatctttgtatgtggtatgaggcaccttttctttttttttgcaacagttttccctccgctgcccaggttggagtgcagtggcataatctcagctcagtgcagcctccacctcccaggctcaaggagttctcctgcctcagcctccctgtaataggagtgcagcaccgcgcctagctaatttttgtattttttgtacagacaaggttttgccctgttgaactcctgggctcaagtgatccactcgcctcagcctccacccttagttttaatcaaaagttatattatcaaaaattaaaagacttgtctagggtaattttaaagactaatagttctcaaccagagcagttttgcccccgcctttccccagatgtttgtggttgtcacacctggaggtgctgctggcagggagtgggtagaggctggggatgccgctcagcaccctgcggtgcccaggaggcgcctgccgcagacagcagtcaggccccgaacatccacacctccaagggaggaaatactgctggctggaatgatcctgcctcactgagtgctgagggagacaccagcccgccgcccttagggccctggtgaggggcgatggcggcggcatgattcactcctctcagttctaggcacgggcgcggaggtggattacctggagcagtttggaacttcctcggtaggtaccaggcaattccgcgaagcctcacccacagggtgtccgagagcagccacggcaggtcttgcccccggagcgtcccttggtgcccacgtccccccagctgcacacaggcccaggcattgtggcgggctgtgaatccagggccccttctgcagcacctcctctaagtggtgtcctgtggcagggctctagggctctctacctggtgcctagcccaggatgaaactctgacacgctgtgctgctgggaatggtggtgtctcgggcagggttgtgggtgaccgggggtgggagtgtgcgggtgaccgggggtgggagtgtgcaggtgacctccctggcccttagcccccgtgtgtgttaggggatggcagtcagacctgatcacttgccctcttgtccccagtttaaggagtcggccttgaggaagcagtccttatacctcaagttcgaccccctcctgagggacagtcctggtagaccagtgcccgtggccaccgagaccagcaggtatgtgcgccggccctccctcatgcatgaagccttgagtgtgggaagactggaggctgttcctaggtgtgctgtctgcacagaggcttctagaccggggggagatgatcagaactggaaaggagctgtgctaggggtgggctgggcagcaaggccagagcagcccttgtgtgtctggcaggagcaacggcagcctaccctccagccacagggctgctgccttgctggttacagccaccgttctaggtatattaaagatctaaacttaaatcttttaagagtacttcctctaaaacagaggtcggcaggccaggcgcggtggcttacgcctgtaatcccagcactttgggaggccgaggtggatggatagcctcagctcaggagtttgccaccagcctgggcaacatgttgaaaccccgtctctactaaaatacaaaaattagccgggtgtgacggcatgcacctgtagtctcagctacttgggaagccgaggcaggagaattgcttgaacccaggaggcggaggttgcagtgagctgagattgcgccactgcactccagcctgggcaacagagtgagactccatctcaaaaaaaaaaaaaaaaaaaaaaaccaaaaaatagaggtcagcaaactatcacctgtgggccagacttggccactgcctgtttgtgtaaagttttatcgtcacagagccatgcccgttcctttgcaaattgtggcaactttcacactacaaggccagaactgagtagtgtgacagaggctgtgtggccttcaaatcctaacacatggccgggcgcagtggctcacacctggaatcccagccctttgggaggctgaggcgggtggatcgcctgaggtcaggagtttgagaccagcctggccaacatagtgaacccccatctctactaaaaataacaaaaattagccgggtgaggcggcaggcgcctgtaatcccagctacttgggttgctgaagcaggagaatcgggtgagcctgggaggcaggggttgcagggagccgagatcatgccactgcactccaatctgggtgacagagtgagaccctgtctcggaaaaagaaaaaaaaaaaggctctgagctgtgaacagccccctgatgaggcagcactggctccgctcagcctgcagtgggtaatgaagcgtcaccgtgctctcccggaaggacaagcagccacgtgggatgggcaggtgagggaggggggcacggagcagcagagaggccgggcatgctggatgcgggtctgcgttttctaccactaccctgacttgagtggttttaaactaaaaagcaaagagcccggttagcttgtccacatggtcctctgtgtcctactcaacactgggagggcctagtgactgaggctgcctctgcttggtggcagcatgcacggtgcaaatgagactccctcaggacgtccgcgggaagccaagcttgtggagttcgatttcttgggagcactggacattcctgtaagtccttgagtccctcttgaactgtcttgtgtgtggtctgagggaacgagttgttttaagggcctatattttctattcctgggggtctgagcctttggttttgttgggggcatggggccgctgtgctgttccctcgccgcactgtctcgggtccctcatgcactgtctgaggctcttggcctgtgtgggcctttcctccctcacactaggtcagaggtaagaggcaagggcgaaatgggttcctgtttcatccccatctcccgcaggtgccaggcccacccccaggtgttcccgcgcctgggggcccacccctgtccaccggacctatagtggacctgctccagtacagccagaaggacctggatgcagtggtaaggacgcaggtagtagctattccacagaacctgcaggccgctctggggcttggccaacagtgggcaggggtccaacagcctgacccgccatccctgccatccctgcccctgctggttggggtggaattgcagagagctgccggcccctggcctgtcactactgcccaggtcgctgagggtccaggcttccacccagtgtccccgcagtcagctgcccaccagcagcctccccgggactctccggcctgggcatggcgttggcctctggtggccttgcagcagtgagtgtggttcttgctgccgtgagcccgagtgtcgcccctttcctcccgccctcccacgagtccagacgcatctcctggcagcttaggaagctccatcttcacccaccccacatctgagggtcccgtgccttgtctccctccatcctcactgtacatgccaggcttcagcctgttctaactccgggcctaaattgtccctaagagagctgtaggcacacaaaggggctgggtgtctgcaggcaccactgtgagctaccgtcgccagatggtccccagggaggtgcagacagggtggttccggaggccggctggcagggctgggttcaagccccaacatccacaccagtgttgttcacagtggccccaggtgtcatctccgcagaggcctgtgatgtggccctgaccccgtaccccaacaacctccttccctgtgtcagagcccgtgtgagtaacccaatagcaggcctggggaccacagtgtggctggccccctcctctgcaggcctgggctccgggggcaggtggcccctgcatgtaacttatgttagaaatgcacaatgcttgttctctggtgccacaaagaaatagtgctcgaacattaattttctcagcaaggcagtttttactttctgcagaaagggtgcccctcgcagatggagcaatggcaagagcacacctgaacaagggaggggaaggggttcttattcctgacacaggtagccctactgctgtgttgttcccctgttggctaaggttggaccacacagtctaagccaattccaattggctattttaaagagggcagggtaagagtcagagtggtggggtgagtagtttgacgggaaggacggttaggaacaggtaactcaaggtgacttaggtcagagcaggtgaccgggatgagtcaggatggagcaggtgaccagggaacagatgtgaactactgattaggactggcgggaaaattgtttactgaaactagaagcaaggggcgaagagaaccaggaattttaaatggagaatcaaagaagagatctggccgggtgcagtgggtcacgcctgtaatcccagtactttgggaggccgaggtgggcggatcacgaggtcaagagatggagaccatcctggctaacacggtgaaaccctgtctctactaaaaaatacaaaaattagccgggcgtggtggtgggcacctgtagtcccacctactcgggaggccgaagcaagacaatggcttgaacccgggaggcggagcttgcagcaagcagagatcacgtgactgcactccagcctgggcgacagagtgagactcttgtctcaaaaaaaaaaaaagagatctgaacatactgacttactgattctttgaagacaaacttggagttcactatatttaacacttaggacccctagtatctgccactgggctgcgggggcagctgcagggacacacacctgttgggtgcctgctggttccacccaggagcacagccagcagcctcatgcctcctgccccctggcagtcgggtgcacgtggagcaggtggccttggcctcgacagggttcccagggtcccactggaagccccacatggaactgtgcctctgggacattgctccagggacctcgggtgcgggctggccccatcctgtggggaggtcctgggagggtcagtctggcccgcctgcctgctgacttgggtgtggcctgagcaggtaaaggcgacacaggaggagaaccgggagctgaggagcaggtgtgaggagctccacgggaagaacctggaactggggtaaggaggccccgtctcctgtcctccccgtccccatccccctcgccatccttgtccccatccccctcgccatccttgtccccatccccctcgccatccctgtccccgtccccatccccacctggcctgggaccgctgggcacccgaggcaatggctgtgtgtctgttctcctcccacaggaagatcatggacaggttcgaagaggttgtgtaccaggccatgggtgagtgcccgggccaccgaggccacgtgcctccacgaggggctgcctatgccccaccctggccctgccctgcaccctgcctaggaccccaccctcctgaggccccttttcctaacacacgagtcccttcaacatgggcccggccgtggaagcactgaggcgagttgcggggaagctggtggtagtgaggctggtggctcccacggagccagggcttggcaggccccacagttgtgcagatgctgagctagcagtggggctgtggtgggagcagagtctgtcccgccgtggcctaccccactccaccctgccctcgccgtgcggctatgtctagcagcagcctctgtaggtgtctggcaggacgggaacaccaggcctcatctggcctcccaaaagcttgggctcctggaggtgctactgtggggatctgtcttaggctgagtgtcagccggcggcaggtgaccgcctggcccttgcagtccctccaggaccaccacgaagcacgacgcacatcctggagctcgccataccggctcccaggcctcaccctaggctctagggtgttgggcgccgcctcttcagggacctctggcccaggctccagttccctgcggatctgatgtggaggaaacagctgtttcctgggctttgcatccggcctagaagatcctgggtggagggacccatcaccctccgaggctcacacccactgcccacctctcctcctggcgctcgagtcccttgcctcattccttgggctgtctctggcacccatcgtttcggttgcctcctcatcctgaacgtttgcttttcttttctcaagaggaagttcagaagcagaaggaactttccaaagctgaaatccagaaagttctaaaagaaaaagaccaacttaccacagatctgaactccatggagaagtccttctccgacctcttcaagcgttttgagaaacagaaagaggtgatcgagggctaccgcaaggtatgtctccgccaccctggtgtcctcacctcggaggctgatggactcatggtccaagccagcggggctacaagctgctgtctttgcaccttggtccttggccaagcctccccttgccacgggggcatgggatgacctgtgaacgagacagggtgcaggagtcacagcatagctggtttgcgaggcagctgagggcggcaggaggcagagtgagcagggaggccatctgagccgtccgctgttgtgtgacagacgactcggctatgatcaggcatctgtgagatttgagacagcgctggtgcaccggggcctggggcacctcggaaaggtgtctgggctgtccgagcgcttgggtcccaagggttggggacccagggcatgcagtatccaaggcgggaggcccactgaaaggtggtcacggctgtgcaaggccaccctggtgtcctcctggccacgggactctgagcgccccccaccttctgtgctgggcaaggcccacatgcttgctggaaggagggatgtctgggccatccatctgcccagagcaggcctggaaggtgcctgcgaggccgccagagggttctgcccacagcagcaatgttggagcggaggtgctcaacgcctcctgtggaggagctggacctgcaggtgcagctggaagaggggctgtcactgttggtgcaagggggttggggacaccagatgggtcccctgggagtcagactaaactggaaaagcggcccttgcagggcctgctgagccacacctcatctgagtcctgaagtcaggtgggtgtcagtggctggggcccagctgcctaacagaagcaagcctgaatactctagggaagaaggtatcttatgctttaaattgctgctgcagttttaaattagtgtctggcacagaataaccaagtgtgaaaggaacaggaaacatgagtgaaaatcagacccgttattagagtgaggcatggtgatgtacacctgtggtcccagctactagggaggctgaggtgggaggatcatttgagcccgggaggtcgaagctgcagtgagccatgattgtatcactgcacccccagcctgggcaatagaccaagacccccatctctaaaattaaaaaacaaaaacaaaaactgttgatagacccacaggagccccagacgctggagttggcaccggcaggtggtgcctcaggtctgcagggagcagatgggaagggccctgtggcagcagagtgcccaccggcagcagagtacagcagtctggcccagcacagacgcttggagaggcaggactcttcacacggtgctgctggcttgaggacacagcggctttgctgaccttccctcaggttgggctgtggtgtgagcagctgccttggcctcgcctctccccggggcaggcctgtgcctcagctcccactggccacctccctacttcctcatggaggctcctttgcacatctaatcccatcttggacgacccagtgcagactttaaagtaattgtcttctgtattcagaagagtattgcttcaatagagaccttgaaactagaaaagaatccccttcgggagaccgagacgggtggatcacttgaggtcaggagttcgagaccagcctgggttacatgatgaaactccgtctcctaaaaatacaaaaattagctgggcagggtggcatttgcctgtagtcccagctactcaggaggctgaggtaggagaatcacttgaacccaggaagtagaggttgcagtgagccaagatcgtgccactgcactccagcctgggcgacagagtgagactccatctcaaaaaaaaaaaatacaaaaattagttaggcatggtggtgtgcacctatagtcccagctactcaggaaactgagacagaaaatcatttgaacctgggagacagaggttgcagtgagccgatatggcaccattgcactccagcctgggcgacagagcgagactctctcagaaaacaaaaaatacagaaaaactaggccggcttatgcctgtaatcccagcactttgggaggccaaggcgggaggatcatgaggtcaggagttcaagaccattctggccaacatggtgaaaccctttctgtactaaaaatacaaaaattagctgggcatggtggcaggcacctgtagtcccagctacttgggaggctgaggcaggagaatcaatcaggaggtggaggttgcaatgagccaagatcgcgccatcacactatggcctggcgatagagcgagactccgtctcaaaaaaaaaaaaaaaaaagcctgggcacagtggctcacgcctgtaatcccagcactttgggaggccgaggcgggtggatcacgagatcaggagtttgagaccagcctgaccaacatggtgaaaccctgtctcttctaaagatacaaaaattagccgggcatggtggcacgcacctgtagtcccagctacttgtgaggctgaggcaggagaatcgcttgaatccgggaggcggaggttgcagtgagccgagatcatgccacttcactccagcctgagtgacagagtgagtctccgtctaaaaaaaaaaaacagaaactagaaaagaaccaaatggaaatttctaacaggtacacagttaacaacattaacaattcaaagggtacaggtcagatgagggaagcagaggctgagttgggaaccagtgtgtggacggcagcccccagagccagagggagagacgccgctgtggcgggaggcttgacctgtgcacacgtgagagcttccggatgccgcctcccggacagacgctgttgggaattttccacagcagagaaacacagtgctgtgggtttaagggaggcgtgacctccgcaggacatcaggggctgcatgctgggtaggggctcagggagaggctgcagtgctgagggtgcttctgggatacagggctgcgacagaggagtgaggatggctgggctgtgaggccgctgggggcactgcaggaagaaggcaggtaggctgagccttcccaagcagaggccactcggggacccaggaacccctcagttagggcttctcagtcactgagcggaaggtgcccccagagggggcagcagcctgtgaggagcaggcgtgtctgggtaaccatgtggctcctgctggcctcccctgcctgtccccaaagcacagggctcagctccagagggagacgggctgggctgtcagtggtcccaggtgcatcccactttccagcagcacttggtgccagcagaggctgcaggtgtggcaggagggggcccagccgtgagggcaccaggttcaggcccggcatctcagggtggagagccagggctgtcctgaacctccagagggggtgagctgggaacttgtgtgaaggggctttttccaaaaggaaaacgggagctactggctcacggctgatgccccagacagcctcgaggatctgcaggtccccagacaccaagcctgggtgctctccagcagacggcgtggtacccacagctaatgcctgccccttcctagaacgaagagtcactgaagaagtgcgtggaggattacctggcaaggatcacccaggagggccagaggtaccaagccctgaaggcccacgcggaggagaagctgcagctgtgagtgctgggcgaggccccaccctggagggagaatctgagcacctgggccccagctcagcctctgccccgcccctacccctccagggcaaacgaggagatcgcccaggtccggagcaaggcccaggcggaagcgttggccctccaggccagcctgaggaaggagcagatgcgcatccagtcgctggagaagacagtggagcagaaggtgggtgcgggaagcccagctcaaggggccgtctggcagcaccttctagaaggcccttgggcctgctgctccctccaagcagggagaagccccgcaactcatcttcctcctccagactaaagagaacgaggagctgaccaggatctgcgacgacctcatctccaagatggagaagatctgacctccacggagccgctgtccccgcccccctgctcccgtctgtctgtcctgtctgattctcttaggtgtcatgttcttttttctgtcttgtcttcaacttttttaaaaactagattgctttgaaaacatgactcaataaaagtttcctttcaatttaaa

SEQ ID NO: 46 - DNA, 8576 bp, Homo sapiens
ccgtgaagtgggcggagcgagcgatttgaacgcgagcggcgcggacttctgccaagcaccggctcatgtgaggctcgcggcacagcgttctctgggctccccagaagccagcctttcgctcccggacccggcagcccgagcaggagccgtgggaccgggcgccagcaccctctgcggcgtgtcatgggcccgcgccgccggagccgaaagcccgaggccccgaggaggcgcagcccgagcccgaccccgacccccggcccctcccggcggggcccctccttaggtaaccggccgcggccccatctcgaagaggagaaaaccgaggctcgcaggcggagcccggatctcccgagtcccgatcccgtggcacttccctgttgggggacaacgcggttccgccgtccggcatccgctccgggcacgggcggtgccagccctgcgaggggctggagcaggcggttccgaaagcgggaagggaccggcttagccacttggctcctaacgccgtcttcttgttaggactagtggttacccagcgcccaccgcccaccgccaaccaggcattgcctcccactgttcgtgcgttatctcagcttcatattgtgcccattttacagctaatgagaaagccgaggcacaggccagagagcttgagcagagtcacacaacttggtgttctggcggacacgggatttccaatcctctgtgtttgtgcatttttaaattgcaaaagtattgactgctttcggtgacgatttcaaacaggagtcctcttaggaggtgtctttcaggggttttttttcccttccgggagaggctgttaggccttgaaccgaggccctctgcgctgctcactctgttgccttccagagcttgtgtccgggaaaaggggccgaagtctgtgtcttaattgtctatggtgggctggtggatgggagacccaacggcaggaggaggcagatgcctgtatggtacatggtggcaacagctgctttacttatctcttaactcttgctacgtagctatgaggaagatgggaagtgtattgtagtttatttgtttcattgctttttgtagagactgggtctccctgtgttacccaggctggtctcaaactcctggcctcaagtgatcctcctgcctgggcctcccaaagtgctgggattgcaggcatgagccactgtgcctacaggcttttttgggttttttgttttgttttggagacggagtcaggctttgtcgcccaggctggagtgcagtggcgcgatctccgctcacggcaagctccgcctcctgggttcacgcccttctcctgcctcagcctcccgagtagctgggactacaggcgcctaccaccacgcccggctaattttttgtatttttggtagagacagggtttcaccgtgttagccaggatggtcttgatctcctgacctcgtgatccgcccacctcggtctcccaaagtgctgggattacaggcgtgagccaccgcgcccggccggctttttggttttttgttgttttttttttgagacccatcgcccaggttggagtgcagtgatgccacgagggttcactgcagcctcaacttcccaggctcaggtgcttctcccagctcagcctcccgagtagctgggactacaggcatatgccaccatgccggctaattttttgtatttttagtagaggtgggattttgccatgttgcctaggctggagtaggttgtttctagatgttgctgttgcgaatgggattttttttctttcccaaaacacgaggatttaacctttgcttccagccaacttgctgaattctcgttcaccctagtcgtttttagttgctccagttggaatttttaagtagactattatgtcatctgcaaataacttttgaatcttccgttttcatttctacacattttatttattattgtatggtactagtaaggccctgagactcactaagagtggtgttttggtcatctttgtcttgtttgtaattttaacaggaatattaagtatgatgtttgctgttgctttccaaggtagaagcatccttctactcctggttaaatggaaggtttatctcaaatgggcagtcaacacttcttggcagtcctaccacctttgtctggtattctttcttcaattttcgagacagagtctcactcttgtcatccaggctgtagtgcagtggtgctatcttggttcattgcagccttgacctcctgggctcatgcagtcctcctgcttcaccctcctgaatagctaggatgacagacctgcaccaccatgcttgactatttttaaaccttttttgtagagacaaattgttttgtctctacagaacaaaaaaaaaacagccatcgtgcctggcctttgtctggaattcttgcttttccattctccccatgactatttcatacctttttctccctcctcgacttcctacagctccattccccccactcactcttagccaataatggccttgactaggtgtcccccttcctatcaaagcccttccttctacatggggtcttggtcatatccttctttcacctacagaggagctttctacctgtgcttagataaatccagacacttcacactggcatcggcacatatgctctagtatttatgatgttttgttttgttttgtttttgtttttgtttttgagacggagtttccctcttgttgcccaggctggagagcaacggcgtgatctcggcttaccgcaacctctacctcccgggttcaagcgattctcctgcctcagcctcccgagtagctaggattacaggcatgcaccaccgcatccggctaattttgtgtttttagtagagacggggtttcaccatgttggtcaggctggtctccaactgccaacctcaagtgatccgcccaccttggcctcccagagtgctgggattacaggcctgagccgctgcgcctggccgtatttacgatcttaagagaaagggcaggagtgtttccttgaccccacattctcacttccctatacctcccatttccctctacttcccttcatagctgtccttttaaaatagccagacttgttaggtccacatacattgcatctgattcctcccttcctagtgaccctacaacccactccaatctgactccccacaaccactacccccacttctaatctgcttgaactactcctgtcagggtcactagcaccttttgtagtgccaaatccagtaggtgggtctgtgttcttactgtgtctcagaagcatttgacgcagtgggcctctttctccttgaagcgttctgttcccttggcttccatgccactgtgcactctggcagttctgcttggtgttctctactgcctgtgctgcctccctcggctccttgatgttggacttccttgacatccttttcctttctaccccctccctaggtggtctcatctcctccgtggctctaaatcccactcatacattgacagctctcaaatatctgtatacctggatctctcctctgaccccagatacctatatctaactgcctttctacctgaaggctcttggttatgttaaacttaacacacccaaaactgaacttctggttactcccctccagccccttcatcctcagcttccccatttcagtaaatggcacaactacccacccagttgttcaaaccacaagcctgggagacccccgtctccaatacaaatgcaggtccagataattctacttccaaactgcatccttaatcactccattttcaccatctctgctcccactagcctagtccaagctaccagcagctctcgagcaactgtgagagcctcctaatcagctgccactccacttccactctgtccctttctacttctttccttacacagcagctggaatgaccttccacatctctatcctgcataaaactcttccctggcttcttattacagtaggattaaattccatctcctcatgttggcatttcaagacccagctactaaatttttgatcccagttcttttccatgatctctctaattggttacttttcataaccacttgttcttgggtcatggatttcatatctctgttacctctctgagttcattaaccatttttctctcaaagtttctatttcttttctctattaactcaatttcctctggtattggctattttgtttgttgagtttggttcctttctttcatggtattggccttcttaaattgttgggtgatctttagttgtgttcatcttcaaattttctgtgaatgctatgtcttgtttatttttttattttattttatttatttatatatttttgtttgagacacagtctcattcttgttgcccaggctagagtacagtggtgcgagcttggctcactgcaacctccatctcctgggttcaagcaattctcctgcctcagcctcccaagtagctgggattacaggtgcctgccaccatgcccggctaatttttgtatttttagtagagatgggtttctccatgttcatcaggctggtctcgaactcctgacctcaggtgattgacccaccttggcctcccaaagtgctgggattacaggcgtgagccaccgcacccagccctatgtctgtttattaaagactgcctccagtgactggattgccaactggtggtggggagggagggaggtgtcagtagtttttctcctgggcatgggtcttcccagttttaaatgttatcagtcttctggacactgccctgtttcattggcctgtgttctctagcctcacccagggatggtctcctctgctggctgcctggcacaggccatctctggattgtctcacctaccctacttgctcttgcagctcttctaacacttcgtgattagtttattgtattaaatgccttctatcgaacttggtgtagagtctctttgcttggctggatcctgaataacatttctgaaacaattttatccgtcaacatgttatttttgtattttgtttgttcaacttatcagatgttcactcatcttgatccttggttgtaattatggagcaactgtgctgttttttctttaactttattttcactaacttattttctaatatttcttttgttctatcttgttttggtttactttaataactctgtaatacttaatttgactgcttggctcagataccttttagtgttcttgttttctaataggaacactttaaggctatgcattttcctctagtactattttggctgtatctcataagttttgggatatgggctttttattgttattcatttccaaatagtctaatttcaattaagtttcctcttcaacacaggttagttagaagaaactggtttttgattcatgagtttttaatttccaattagagaatttggcttttttgattcctacttttgggaatgtttttaaaattattttcttttttgttcttgttggaaccaggatttgagccaaaggctctgtctccacagcccaggtgcctgacactgacactgagttaggccacaccttacacaggtctcagcttggccactaatgagggctggccaaccatcttcacctcgctgggcctcaggatgatcaagacaagggaattgtactagtctctcagattctttccagctgtaaaaaacaaaccaacaaaaaatctaaaaccaaaataactgagcttccaatctaggtgggaaagatctaagacttgtacaaagtcctgcaaagcccagaggagggcggtcacccatctgtttggaaggatcaggattcgggaaagacttcatggaagagttagcatttaaaatcaactgcagaggatcattcactcattcatttaacaaatgtttatttagcacctatctgctattttctaattgctgaagatagcagcaaaattactatatatcaggttggtgcaaaagtattgtggtttttgccataactgcaatgacttttgcagcaacctaataaaacagacaaaaatccctgctctgtggagggtaggcacatagatatagtctagcaatttgacagcttacctgactcagccaagctgcgaggcaccacctattttccactgaacttacctttcttttgctcaggcgcttcctcccatcaacacagtcggcggagacaaggttggctaaaggagatccgaaagcttcagaagagcacacacctcttgataaggaagctgcccttcagccgcctggtaagctccgggagcttcccaccaacccctatgccaccctcctttttttaaattttcccaggtattagggaccctactgtctcttaactaactggccaagggacctcttttgtaacctggtaggggattcttttctgaaaacatgagccctccaagagcaccttgtaattctttatggaattgatttctaacctctactacctttttaaaactgtagtttttgactgtataaataggaactctctcgtttgtccaccttagatcccttttcctatcctgggagattgcctctcatcacccaattactggtgatttccccatcaccagtaagagatccgccagttcctaagctcccaggagtcaacacctgctcctaattgggtcctaagattaagagccaggaaaaaataatggaaaggaagattcactggaactcatggagagcatcattgtcccttgaatctctcttctgttactccctactcctactcctccccttccccactccttcacaggcaagagaaatatgtgttaaattcactcgtggtgtggacttcaattggcaagcccaggccctattggccctacaagaggtaagaaggcaccaaggcacaattgggtgagggctgagtgggagaaagaggcagcctagaattctccagtgctgactggagtgtcacatgctgaatctgacctctggaaaagaacaatgaggtaacctctgagggtttggaggctggattctgcgtggtgatagcagaattccctggcaaagttcagtctcattctgtgaatagtttcctacaatcctttgagccctcagagattaagtttagcaggtttccaaaaaaaagcagcccgtggcccttcatctgtgtccgtctttttctctttctgtctccaggcagcagaagcatttctagttcatctctttgaggacgcctatctcctcaccttacatgcaggccgagttactctcttcccaaaggatgtgcaactggcccggaggatccggggccttgaggagggactcggctgagctcctgcacccagtgtttctgtcagtctttcctgctcagccagggggtaagctcatcctctttcacaggactggggctggaatttctcaagtaatttcctttctccatccatagtcccttgtcacctcgccttccctttgttctctagtaaaggttgatctagttttgactgcctgggacaatgtggtttgtgcccttttgtgcaatgttagataaaagatatctttctattaaataataaccagatgaccctaatttcttttggttgttattgttgttgttttatttttataagacagggtctctgtcatcagtgttgccatcgtggctcactgcaactcctgccttggcctcccaaagtgttgagattacaagaatcagatgacctcattttgattaagagaaaactttctaataaactttctaataaaagagaacactttctaataaaaactttctcttttttgattaagagaaagttttcttacttttgaaaatggcttgttagtaagtgtgcttccttaatttcagggatgataccggggactctccagagccatgactagatccaatggattctgcgatgctgtctggactttgctgtctctgaacagtatgtgtgtgttgctttaaatatttttcttttttttgagaaggagaagactgcatgactttcctctgtaacagaggtaatatatgagacaatcaacaccgttccaaaggcctgaaaataattttcagataaagagactccaaggttgactttagtttgtgagttactcatgtgactatttgaggattttgaaaacatcagatttgctgtggtatgggagaaaaggctatgtacttattattttagctctttctgtaatatttacattttttaccatatgtacatttgtacttttattttacacataagggaaaaaataagaccactttgagcagttgcctggaaggctgggcatttccatcatatagacctctgcccttcagagtagcctcaccattagtggcagcatcatgtaactgagtggactgtgcttgtcaacggatgtgtagcttttcagaaacttaattggggatgaatagaaaacctgtaagctttgatgttctggttacttctagtaaattcctgtcaaaatcaattcagaaattctaacttggagaatttaacattttactcttgtaaatcatagaagatgtatcataacagttcagaattttaaagtacattttcgatgcttttatgggtatttttgtagtttctttgtagagagataataaaaatcaaaatatttaatgaaaa

SEQ ID NO: 47 - DNA, 9581 bp, Homo sapiens
gcggcgcggggcgggcgcagcgggggtcggggcgctgggagcccgttgggccgcgaacgcagccgccacgctggggccgccgagatcgggtgcccgggatgagcctcatccggaaaaagggcttctacaagcaggacgtcaacaagacagcctgggagctgcccaagacctacgtgtccccgacgcacgtcggcagcggggcctatggctccgtgtggtgagacccctgggccgctggggggcggggggcgggcgccaggctctcccctttccgcccagcccgccctgggctggcccctcgccagcgccaccttgaccgcggacctcaaggcccagcgccctccccggggccacccagcggccatctcccttttctcaccgagtggctgagtgaggtctctgggggttgagttgggactgggcctggttctccaggactgtacacttgcaagaccccagagttcatcgggcagatcctcactgttacagacgagtacaccgaggccccaagagggggaggtggctcgccaagttgcagacagagtgagactcccgccctgccgtggatcccgtcgcaatgagacgttgctgcccctggcgctgtgcccctctctcagctcctgcctggcttcctactccctgccctgcgtcccgcggctcccccatattctaggtggtgggcctagtcccctctcagcccagctgcccagtgggaggggtcagggcggtctgggagatacggcccaggaggagagcctcgcctgctgaccggcctgtgcccgacagctcggccatcgacaagcggtcaggggagaaggtggccatcaagaagctgagccgaccctttcagtccgagatcttcgccaagcgcgcctaccgggagctgctgctgctgaagcacatgcagcatgagaacgtaggtggtggctgccccggggagggggtgggggctgccctggggagtcaggggcaggcgcaggcggggcctcccggtatggagagctcgggacagtctcctccctgctcccctgacggtgcctctcgcctcactattgaaaggagggggtgccgagaccttccctgcccactttccaggaagaggtcaaagggtatttttggcagaatgcactttgtgaggtacagactgtgttatcctacagaggaaattggcacaggggaactttgtaattggttccatgtctgagagcttgtggccagctgggactagaatcctagttagcgttgtgtccacgtgaccctgataacaatagcaatatacacatattgagcacttcctatgttctaagagctctgcatacactaacttgtctagtcctcatgatatatgagtactactgcccccatgtcacagacaggaaactaaagcacagcaaggctcacagattagatggttagtcagtagcagagctggggtttcaatctcggcagcgaggctcccggtctgagcacatgaccatcagattgtcttgtctgatagaagcagctgggaaaaccaggggcccagctcagggcctggcagccaggctttgctgcaggatacctagattggagggcagacatttcaaagaatgatttcaaaatgttatgtacattttaagcccatccttctccagcaaacccctcccctatggcctccagccagggtgatcttgcccttggctctgaaccagccctgtggcaggcaaggatggatgtggctggagacccaaggtcaggggcagggagtttgctggctgaaaagctccttctctgttccctcctttttcccttccaccctccccttatgctttcctgctgcctaggtgagttgagagtgggtttgtgttgcttgccctgacaccagacttgacagcaatgagcacacatcattctccccaccttcccttctccccagcctgactctctgtcatgatttattgcaaactccctccaaatccaggggattcctctaggcctctgccctttttactgcttccaagaaggttggagacatgcctcctgctggaggtggtgtattaggaaagggtggatggccctgtgcatggccagggcccaggaggaggtgggaggagaaggtagcgtctgtctagccctcacaggtgacttcttccccaggtcattgggctcctggatgtcttcaccccagcctcctccctgcgcaacttctatgacttgtgagttgggctgcactgggttctggggcatttgcaggccttacatgccgctggggagcaaggtgggggagggtctagggtttctattccgggtgtggcggggagagcctccttccctggcagtcctgtgcctttgcctgtcaagtgtgattctctctggaaagatgcttttagccaaaggcaggcaggaagaggcaggaaggactttgtggggtgcttgcctggcagggggcagtctgcacagctgctttgctttttacccagctttaacaccatgaagacacatctgccagtcctcacagggttagcaccaactcacctttcctggggacacagatgtgagtctggaccttggagctctttctagcatgaagcaaggattaagaagccttggctgcctctggctgatgggggtgtttgacagaatggcagaaaaccagaatatttagctgcaaaatgtatagctttgcctgtgcagtgtctgaatgagactggactatttggacaagatggagaagtcagtgtggcacgtggaggccagcagctggcttggtcaagctgaatctggactgaccctacaggcagcctcaagacctggggactttgagccgggaggtgatatgttcagatgggatttgggggatgcacactggcagcagcaagaaaggagtaggaagcagctcggaggcagagggggagagcctggaggtcagtgttagtgatctaaagtagggatctaaagcagaggtgatgggatgccaagagcagacttgaggccccatttgggaggcagggccgacacaatgttccatctgttggggtgcagtagctgagtgaggtggcagaggtggaggaatgggcaggttcctgcttgaaatacacggtagaggaagaacagatcttgggggaaagataacgaactccattttggacactttacttttaaagaaactgtgaacattccaatgtttaatcacagttgcaaataaatatgaacctcaggagacgaaggtctgggctagggatgtggatttgtgctggaataatcaccgatgggttatagctgacacccgggaacagataattgtagaatgtggtaagatagtattgattcagatatcaacatgaaagagaagatccaagaggatgagcagatggaagaagctgagagggcctgataggaggcagaggagagtcagcaaagaattgagagggagtttcagacttggtgaaaggttagatcagaagaaaagggagtcatggtgtgtttgtcgggtgttcactggtgaccttgagctgagcagtctggcagtaggagggaagcagaaaccaggttaactcaggactgggaggtaaggcagtgggatccaggagtgtggaccgccctttctagaagtttggtggtgagagagggagaaggggtggtcagttgaagaagcaaagtcaagggaatgtggttctagcacagagaggcttcaggaagcatgttgccaagatgaaagaaccagtgcccgagtggaggggaaagacacaggaggggactgggcatggagaggcccccaagggaggtgtgtggtccggcaggagagggctgccaaaatccagagtctcctggagatgcctccagcatgtcctttcaaaaacaacaacaacaacaacaacaaaaaacacaacctattacataattgtttaaggtaacattcattttaaaaaagttttaaatttattatattctagagatagggctgggttgcccagactggagtgcagtggcacaaacacagttcactgcagcctccaactcctaggctcaagccatcctcccgcctcagccccccaagtaggtgggactacagatgcatgccaccatgtccagctttttgttttgttttaatttttatagatatggggtctcactatgttactcatcctgatctcgaattcccggcctcaagtgatcctcccacctcagcctcttgagtagctaagactaaaggtgcatgccaccacacctggctaatttttttttttttttctgaaaggtggggtccaggccgggcatggtggctcacgcctgtaatcccagcactttgggaagccgaggcaggcagatcacctgaggtcaggagttcgagaccagcctggccaacatggcaaaaccccgtctctactaagaatacaaaaattagctgggcgttctggcgtgcacctgtagttgtagctactcagggaagctgaggcaggaaaatcgcttgaacctgggaggtggaggttgcagtgagccaagatcacgccactgcactctagcctgggcgacagagcaagactccatctcaaagaaaaaaagaaaggaagaaagaaagatgggtccctatgttgctcaggctggtcttaaactcttcgcctcaagcgatcgtccagcctccatctcccaaagcactgggattggaggtatgcccctggcctattttataatttttattattttttgtctttgtcctggtctttgcttttactgtaacagttacattttgctggccttatcctgttgtgcaatcccctaagaggctgcaggagcctccccatctccctcttccaccctcctggaaactgttgtattgtttccttcttggaaaggtagacatattgtttgtttgtggagccatctcagctgggcatgaccctctgagggatcaaatatttggacagaagccgaaggaaatactggcagatgtttctaactcctagctgtggctttccctggggtgtggaggagggcaaggagagagtacctttgaagagcgggaacacagttccatgtggctttcctgagcgcgctccaactgcagcgcttactccgagctctgccagctgggcggcccgccacagggagactgggagccaggagcccagaggcccgtgtggtgatctggctggctgaggtggagttgagtttttgcacactggagggtgtctctatgacccctgttctgccctgaggtccctcctctgagctctgacctggggctgggtgggacccggcactgttccaagaacccctcatgccttccagctacctggtgatgcccttcatgcagacggatctgcagaagatcatggggatggagttcagtgaggagaagatccagtacctggtgtatcagatgctcaaaggccttaaggtgggtggggacttggaggctggcagaggggacgccttgctgtctagacctgaggtttggggaggctggagggagcgcactgttacaggtcggccagcctgaagtgcctggtgtggaagctgggccatggactcacccttctctctctcccacatagtacatccactctgctggggtcgtgcacagggtgagtgctttctctgccatggtcctcagaggcccctgtcccatccctgggtatggggttctctggcaatcaaggagtgggaaagttggagggaggggacactgcccaggagcacagaatgtggagttttcacacccagccacggcccaggaaggcctgctcaaaagagtcactgtgtcccaggggacttcatggggaattgctgcagacaaagtgagccctgagctgagtgtttcaggcttcaagaatcaggaacattttagagctgggtgggccctgagagaacacctagtccaaccctcattttacacatgaagaaactgaggcccagaaggggaaggggcctggctgaggtcacacccctgggtggtggtggagctaggacaagctccatctctgcctcagcctagcatgcattctctgtcctccccccaggacctgaagccaggcaacctggctgtgaatgaggactgtgaactgaaggtgagtgggctgcaggctcagcccagaggcgggataggccctcccccagggaagcccctggaagccgctcccagagcctcctcccctcagcaagttccttttctatttatcccctgtgccatagattctggattttgggctggcgcgacatgcagacgccgagatgactggctacgtggtgacccgctggtaccgagcccccgaggtgatcctcagctggatgcactacaaccagacaggtcagtggtcaatgcctgagagggcggtcctggggccatctggtcactcggtgctgactgactgctgggccccagacagtccaggtgacactctccctccctctgcagtggacatctggtctgtgggctgtatcatggcagagatgctgacagggaaaactctgttcaaggggaaagattgtatcctttgctggaaaagccaaactccatctagggattccttccttcaacagacactttatttaaataactgtcttttttttcttaatgtgagagtgatacatactccctgtagaataatttgtaaatgcagataaggctggacgcagtggttcatgcctgtaatcccagcactttgggaggctgaggtggaaggatcctttgagcccaggagtttgagaccagatgtggcaacatagggagaccccatctctaaaaaagttttttaaattagccagacatgggcctggcgcagtggctcatgtctgtaatcccagcactctgggaggctgaggcgggcagatcatgaggtcaggagatcgagaccatcctggctaacaaggggaaaccccgtatctactaaaaatacaaaaaattagccaggcgtggtggcaggcgcctgtagtcccagctactcaggaggctgaggcaggagaatggcgtgaacccaggaggtggagcttgcagtgagctgagatcgcgccactgcactccagcctgggtgacagagcaagactctgtctcaaaaaaaagaaaaagaaaaatcccagctacttgagaggctgaggtgggagggttgagcctgggaggttgaggctgcagtgagctatgattgtgccactgtactccagcctgggtgacagagggagaccctaactcaaaaaaaaaaaaaaaaaaaacaaaatgttgggtgggcatggtggctcacacctataatcccagcactttgggaggccatggcaggcggatcacctgagattaggagttcgagaccagcctggccaacgtggtcaaaccccatctctaccaaaaaatacaaaaattagccgggtgtggttcacgcctgtaatcccagctactcgggaggctgaggcaggaaaatcgcttgaacccaggaggtggaggttgcagtgagccaagactgtgccactgcactccagcctgagtgacagagtgagaccctgtctcaaaaaaaaaaaaaaaaaaaaaatgtagataagcaaaatgatgaaaaattctaccactacgtggaaaatacattttggcacggcacacattaactgagtacctgtgtgtgcagggcaggcctttggtgagaagacgaggaaacagaaaagagtcactgggatgaaggctgagaagtccacatccatttgttgggtagggacccccctcagcctggcacgttggaaagctctccagagccctgagccctgaagaataagcctcctcctgagagcaggaggtggttaggcagggctggagcctggatgatcagttgccatggtgcccgggtgaagtgatggtggggtcgcaggaagggcagtctcagacccaccaggagagcaaggctaagccttaacctgccaccaagacctggaccagctgacccagatcctgaaagtgaccggggtgcctggcacggagtttgtgcagaagctgaacgacaaagcggtgggtggtaaatgggacctaggctggcctgggctgtgtgcttgcctgacgtgggcccagtgggctgcaggcctttgtggaagaaggctcaccagcaccttcccacagcatcctcctaccctggcaggcactcttgtcttaatctcaccgtggaccctgacctgaactttcagccctgctctgaggcttttctgaaatccctgctctacacgctgaggccagagccctaaggggtttgatgcttttctgtcttccaggccaaatcctacatccagtccctgccacagacccccaggaaggatttcactcagctgttcccacgggccagcccccagggtgagtctcagagcccgctccccaggggcctctcagcgtatcccagagggcgggctctcccagcccctggtgtgaggctcttggctctgcccctgcagctgcggacctgctggagaagatgctggagctagacgtggacaagcgcctgacggccgcgcaggccctcacccatcccttctttgaacccttccgggaccctgaggaagagacggaggcccagcagccgtttgatgattccttagaacacgagaaactcacagtggatgaatggaagcgtaagagctggggcctcgggcttcctcgcctccgcctgcagcctctcttccttgcttcctccatctttgtgcctggcctctgccagccctacctgccacctccttcttggtgggcattgtctcctgggtgcttctttctccttgagctgacttcgctctccatgctgtctctgaaggggggtggactttctcgccacagcacctctttacgcaccttaaaccatgctgcctttctcagagcacatctacaaggagattgtgaacttcagccccattgcccggaaggactcacggcgccggagtggcatgaagctgtagggactcatcttgcatggcaccgccggccagacactgcccaaggaccagtatttgtcactaccaaactcagcccttcttggaatacagcctttcaagcagaggacagaagggtccttctccttatgtgggaaatgggcctagtagatgcagaattcaaagatgtcggttgggagaaactagctctgatcctaacaggccacgttaaactgcccatctggagaatcgcctgcaggtggggccctttccttcccgccagagtggggctgagtgggcgctgagccaggccgggggcctatggcagtgatgctgtgttggtttcctagggatgctctaacgaattaccacaaacctggtggattgaaacagcagaacttgattcccttacagttctggaggctggaaatctgggatggaggtgttggcagggctgtggtccctttgaaggctctggggaagaatccttccttggctctttttagcttgtggcggcagtgggcagtccgtggcattccccagcttattgctgcatcactccagtctctgtctcttctgttctctcctcttttaacaacagtcattggatttagggcccaccctaatcctgtgtgatcttatcttgatccttattaattaaacctgcaaatactctagttccaaataaagtcacattctcaggttccaggtggacatga

SEQ ID NO: 48 - DNA, 40602 bp, Homo sapiens
aaatcctcctcctccgccatcatccgccgcggtgcggagagcaggtggtgctggaagcgcgtgaggccgggagctcgagagagctaacagactagccggctggacatctggaccgctggatccggaggtggcgaccccggcctgacccggaccctaaatccgtccccgccccagagggcggaggcgcgcgctcgattccccccacgcggcggcgccgcctgtttacggtagagtcagggtccctttcctttccccgtcacctgcctggaacaggggtgcggggcgaggagggcgtggcgcccgtgtgcgccttctgcctgccccctcggccttcttcacttagccttcgacggccgagcgccccaggggtggcggtgggagtggggttgttgagcggcgctggctcctttcacaaatggggaaactgaggcttaaagggcgtctgactcgccagagcagctcagcctgcagctgctagcagtggcgtctcatattagcattgttgtcaaccggaggcggtgcgagtccgccggggattccagatggggctcctgcgccgcccgcctatcatttgcggcctgtattcgcgcgtcgctcccgcagagccacctcccagcaggcccacgcccgcgggggccccgggctggcgccgctgtccctggaatcgatgtgagtcactgctgacgctttgcaggagcatgcatctcacctcagaaagtctctgacgttgctgcggagcggggagaggatgtttctctattagccctttgcttttgctctggcgctgatcctttgctgaccttggacaaatcaatttacgtttctgtgctccagtttcttggtttataaagtgagtgtggaggggtgcatctctgtctcgctctctcttggactgaggaatgggcccccgttcagctgagaagttctgtccctattctatctggaggcttcaccaccaccttttaccctcaaattgtcccatctcagaactgcaagagatgctggggtttcaggttaatttttttgttggtttttctttaaatttttttatctttttagagacggtctccttctgtcacccaggctggagtgtagtggaacgatcaccgctgaactgcagcgtcggcttcctgggctcaagcgatcctcccacctcaacctcccaagtcatggggactacagatgccatcacacctggctaatttttaaatttttctgtggagacagggtctcattctgttgcccaggcttgtctcgaaccctggtctaaagtgatcttcccgcctagcctcccaaaatgttggaattacaggtgtgagttattgcactgggctggtttctggttaatttattttttgaaacagggtctccagaagtacagcagcaagatctcagctcactgtagcctccacctacggggctcaagtgatcctcccaccttacatcccaggtagctgggactgcaggcacctgccaccacacccagctagtttttgtatttttagtggagacagggtttcggcatactgcccaggctggtttctaactcctgtgctcaatcgatccgcccacctcagcctccggaaatgctgggattgcaggagtgaaccattacacccgactctggttaattttttttttttttgagacggagtttcactcttgttgcccacgttggagtgcaatgccacgatctcagctcaccccaacatctgcctcccagattcaagcgattctcctgcctcagcctcctgagtagctgggattacaggcatgtgccaccacgcccggttaattttgtatttttggtagagacagggtttctccatgttggccagggtggtctcgaactcccgacctcaggtaatccacccacctcagcctcccaaagtgctgagattataggcgtgagctaccgcacccggcctggttaatttttattttattttattttattttatttttttgaggtgagtctcgctctgttgcccaggctggagtgcagtggcgcaatctcagctcactgcaagctccacctaccgggttcatgccattctcttgcctcagcctcccgagtagctgggactacaggcccccgccaccaggcccggctaattttttgtatttttagtggagacgggtttcaccgtgttagccaggatggtctcgatctcctgacctcgtgatccgcccacctcagcctcccaaagtactaggattataggtgtgagcctttgcgcccggccctggcctggttaatttttatgcaatttcaactggtcgtttcttgagcaccttctaaatgccaggctctatgtggcaagtagagtgatcctgtcaaaatgtacgtcagatgacatctgctttctgctaaaaacttcagtggttttccttgtcacttatagcgaaagccactgttcttcaaatgggctttatgacttgggccccttgttaactgtctcttctcttaccttgtttttttcctctctctctgtgcttcagccccactggccctgttgcagtttctccaaccctctgcccctacaagagccattgcatttgctattccctttgcaggaatcatgttcccccagatgtgtgcatggcccaatccctgatatctttatttaactatttcctaataatgcctttttgttgttgttgttaatgcctttttgttgttgttgttgttatttgtttgttttgagttggagtcttgctctgtcgccaggctggaatgcaatggcgcgatcttggctcactgcaacctccgcctcccgggttcaagcaattctcctgcctcaacctcccgagtagctgggactaaaggcgtgtgccaccacgcccagctaatttttgtatttttagtagagacggggtttcaccatgttggcctggctggtcttgaactcctgacctcgtgatccacctgcctcggtctcccaaagtgctgagattacagccgtgaaccaccactcccggccccccaaccccccccttttttttttaaatcacatactaaatgtgtcatttagaacatatgcttcaagaggtcagggtttatgcttcctttactgctatactgctgacctggaacaacatccagcacacagtagtaatcaatgtgtttttgaatgaatgagtggacaccttacccaggataataattcatgcttattgataaaggcagacaaaccagggttataagttagaacccagaggaagcctaggggtgggaggattcagggtatcacaactgtatctgagaatgaggaggttgtaggaggaggcctttcggatagcaccccctagttctgcccctcatatctgcttccttggtctctcctgattacttgctgtttcttttctttttttggagcatctcacagatacgtttattcataccacaaagtaaacactattcaggtatgtagtgatgttccacgttcctgtctaatatagctggcttcaatttataggcagtacacattgagacatttaatctcacatgtactccaagtaaagctggagtaccatgagcaggcgcaggagttctcaaagctttacttgttttaaaaattttcatttattggccaagcgtggtggctcatgcgtgtaatcccagcactttgggaggctgaggcgagtggatcacgaggtcaggagatcgagaccatcctggctaacacacggtgaaaccctgtctctactaaaaatacaaaaaaattagctggacatggtggtgggtgcctgtaatcccagctactcaggaggctgaggcaggagaatgacatgaaccttggaggcggagcttgcagtgagcccagatggcgccactgtgctccagcctgggcgactgagcgagactccgtctcaaaaaaaaaaaattctttcatttatttagttacttttagagatagagcctcccgctgttgcccaggctggagtgcagtggcagtcatagcttactgcagctttgaactcctgggctcaaatgatcctcctgcctcagcctctccagtagctgggactgactacaggcacgtgccaccacacccagctaatttttatttttatttttatttttttgagacagggttttactctgtcacccaggctagagtgcagtggtgagatcatggctcactgtagcctctgtctccggggctcaatcaatcctcccacctcagcctccccagtggctgggattactggtgcacaccaccataccctgctaattgtatttatttttagtagagatgggattttgccatgttgcccagactggtcttgagctgctgggctcaagcgatcttcccatcacagcttcccaatgtgctgggattacaggtgtgagccactgtacctggccagctttacttcttttaccagcactcctgattttataaatagtgaggcttatcaaccccatttctacccaaatcttctggtagacttgagtatagtagggcttcataggtagcagccctgtccctgtcctattatgatggtagctgttgtgatgtggcgatctctgatctagaaacccctgaggggccattgtggcctgcccagtctcccggccacggttgaaaccagacgtgcagtggggctgacccctgtgccccaccccagagtcatgccagcgtgggtggtggggcattctctgggatgaatgatctggatcccatagccatctgtgtcctgtttgaggaatgggaccctcaaacagagaacagccaagatgctcaagcaggtgtgtgcttgggccagactctgcagcctttggtttgggacttgactgccattcactgaaggggcccaggaaatgggcagctcacatggtgttgctgggtgtccagctgcggcagtttagcagaggaggacttgtaatgagatggtagcttcttataggctaagacatgatttttctgttcttttactacctcctgcaccttctagaactgttccttctctgatgctgttttcctttcttccagtgatttatctctagggtctccatagcaggggaggtagggtcagactcctgagatggctgatgtcctaccctgcccccaaccaggggccccaggagactcctttttcttactgcaactttggcctcctcagtctgcagatctccaggggagcccaccagcctagtcaacatggcctcggaagacattgccaagctggcagagacacttgccaagactcaggtggccgggggacagctgagtttcaaaggcaagagcctcaaactcaacactgcagaagatggtgagtttctggaagttgtgcactggtgtgtccaggggaggagagggagtgtactgaactcttactggttgtcaggctctttctgctacattgtctccattatttgtcccagcagctctgtgaggtatcattgggcctattctaacaatgaggctcagagatcatttgcccaggagcaagctcccctgcactttccatgtttgtattgggcatccctttgtgccctgccctttctttctcaggaggggatgataggtaatgaggggccacagttagtgccagtcccaagatacagcctctgactctgacttaatatccggtgttgtccccacccttgcccttaacccccatgatcccaggcaggcctgggaatagctgcagctttccccagagctgaggctctggtggagctgcattaaaacaacctgggccctcttgggagatgctggttcatgcaaccagatgtacctgggagagggatggctgtctgtgtgtatacaggtattgcaaccacagaaaactaggaaccagagagcagaccctgtcttttcatcccttgtcaaggcttggctgccactgaccaaccctgaatcacctggcacctgcaagtgaaggcacctgcatcaagtgaggcctcctgggattctggcccaaccaggggaactggtctggacatgcctggttgtcatgttgtgtaggcagccttgttctcctctccaggtcggaggctgcttgagtccttgggtagctgggagcgtgctgatgcatgttcctaacatctccataaggtctaacgtttatagacttcctccctgtgcatttatcactttttttttttgagatggagtctctgtcacccaggctagagtgcagtggcacgatctcagctcactgcaaacctctgcctcacgggttcgagcagttctcctgcctcagcctcctgagtagctgggattacaggcgcccaccaccacacccggctaatttttgtatttttagtagagatagggttttgccatattggtcaggatgctctcgaactcctcatctcaggtgatctgcccaccttggcctcccaaagtgttcggattacaggcgtgagccactgtgcccggcttttttttttttttttgagatgagtctcactctgccacccaggctggagtgtagtggtgcgatgttggctcattgcaacttctgtctcccaggttcaagcgattctcctgcctcagcctcccaaatagctgggactgcaggctcacaccatcacgcctggctaatttttttttttgagacatagtcttgctctgttgcccaggctggagtgtggtggtgcaatctcagctcactttaacctctgcctgggttcaggcaattctcatgcctcagcctcctgggtagctgggactacaggtgtgtacaaccatgcccagctaattttcttttctttttgttttttttttgagatggagtcgtgctctgtcacccaggctggagtgcagtggtgcaatctcggctcactgtaagctctgcctccctggttcacgccattctcctgcctcagcctcctgagtagctaggactataagcacccaccaccatgctccgctaattttttgtattttagtagggatggggttttaccatgttggacaggctggtctagaactcctgacctcaggtgattcgcccgcctcagcccccaaagtactgggataacaggcgtgagccactgtgtctggccttcagcctatttttgtgtttgtatttttattattattattttttttgagacggagtctcgctctgttacccaggctggagtgcactggcatgatgttggctcactgcaggctccgcctcctgggttcatgtcattctcccacctcatcctcctgagtagctgggactacaggcgcccgccaccacgcccggctaatttttttgtatttttagtagagacggggtttcaccgtgttagttagccaagatggtctcgatctcctgacctcatgatcctctcacctcggcctcccaaagtgttgggattacaggcgtgagccaccgtgcccggccccttatttttgtatttttagtagagacggggttttgccatgttggccaggctggttttgaattcttgacctcaggtgatccgcccactttgacctcgtttatcacttttgatgcttgcgtcacccttgtgggagatagattggaatgttgctgttttataaatgagaaaaaggaatttaggagactttaagtaacttgaccaaggtcacacatttgataaatagcagagctaggattttcacagaggttcagtgaaatccctattcctgtgcttctaattagacattgagctccgtttaggaaacagagatttgatggcaaatgccatttattgaacaccgtgtcagataagggtattaagtgccagataaatagtatctcagtttatcttcacaaaatcctttgagatagattgcatttccattttgcagattggaaaactgaggtttagggaggtggtatgacatgcctaagggcacagctttaatgagtagagctgggattagaactcaagtttgggccaggtgcggtggctcacgcctgtaatcccagcactttgggaggccgaggtgggcagatcacctgaggtcaggaattccagaccagcctggccaacatggagaaaccctgtctttactacaaatacaaaaattagccgggcgtggtggtggacacctgtaatcccagctactctccggaggctgaggcaggagaatcgcttgaacccgggaggcggaggttgcagtgagccgagatggcaccactgtactccagcctcggtgacagaacgagactatctcaaaaaaaaaaaaaaaaaactcaagtttggctggctctgaaatccatccagttaacttctttactctcccagcacaggctgaatgtggtgtctcccattttgtaagtccccaggggtgcccagcttacccagctcctaagaagcagcaaatctggaataggaatgatatacccaggtaactaagtgaaggcaaaatgtgaatatactctatgaaaacaagtgaaaaggctctgggaagtaaggcagggagaggtctcacttttactttaagagcacccaggaagtcttttcatcccttgccaaggcttggctggcactgaccaaccctgaatcccctggcatctggaagtgaaggtacccgcatcagtgagccatccttgggttctggcccaaccagggaaacttggacccaccttggacaacttcttagggagcccctgctaggttataagtcctttctcaagacccttcttgaccagaaggtcaagttcaaactttatctcccatacccatctctatctcttccctcccacatgtcaccctactccatcctgtaccagccagactcaactttttgtttcatgtaagttttggttttgttcagattatacaattaatgcaggtttattatagaatacagaaacattcaaagaacagggaaaaaatatatcctcactttcggccgggcgcggtggctcacgcctgtaatcccagcagtttgggaggccgaggcgggcggatcacgaggtcaggagatcgagaccatcctggctaaaacggtgaaaccccgtctctactaaaaactacaaaaaattagccgggcgtagtggcgggcgcctgtagtcccagctacttgggaggctgaggcaggagaatggcgtgaacccgggaggcggagcttgcagtgagccgagatcccgccactgcactccagcctgggcaacagagcgagactccgtctcaaaaaaaaaaaaaaaaaaaaaaaatcctcactttcatataaccccagggatataactactattactttcagggcattttatttctaacacagtctttttttttttttttctgagaaacagtctcgctctgtagcccaggctggagtgcagtggcaagatctcgctcactgctacctccgcctcctgggtcccagttcaagcaattatgcctcagccttccgagcagctgggattacaggcatgcgctaccatgcccaactaatttttgtatttttagtagagacggggtttaccatgttggccaggctgttcttgaactcctgaactcctgacctcacgatccgcccgccttggcctcccaaagtgctgggattacaggcgtgagccaccgcgcccagcctagtctttttttttttcctgaacatagctgagttcattttgttttgtttgttttttgaaacggagtttcgctcttgttgcccagggattagtgcaatgccacgatctcggctcactgcaacctctgcctcccaggttcaagcaattctcctgtctcagcctccctaatagctgggattacaggcatccaccaccacacccggctaatttttgtatttttagttagagacagggtttcatcatattggacaggctggtctcaaactcttgacctcaggtgatcctcaggcctcagcctcccaaagtgctgggattacaggtgtgagccactactcccagcccattttgtttttaattgggattatattatagatcttttaaaagctgctatataacctgatatattgagaacattttacttcaaatagttaaaaacacacaatcacccattatcctaccagctagagagaactgctatagcatttggtttctatgtttctagaccttgttttatgcacatgtgtgcatgtgtgtttgtgtgtgaatacatatgtttttaaagagtgatcagcccaaatgcttgagtaacctaatttttcacttattgctataacagatttttccaagtcagaaacacctgtgtcatctttcatagcagtgctggtataactatttgtgtaacgtgccacagtgaacctctgtcctcctctctgtcttcctgtctctctttttttgtttgttttgttttgagaaggcagggtcttgctctgtccccctggctggagtgctatggcatgatcatggctcattgcagcctcaacttctcaggctcagctgatcctcccagctcagcctcccaagtagctgagactacaggtgcacgccaccacaccagcctaatttttttttttttttcttgagacagagtctcactgtgtcgcccaggctagagtgtagtggtgtgatctcggctcactacaacttccgcctcccaggttcaggtgattctcctgcctcagcttcctgagtagctgggattacaggcatgtgccatcacgcccagctaatttttgtatttttagtgaagatggggtttcactatattggtcaggctggtcttgaactcctgaccttgtgatccgcctgccttggcctcccaaaatgctgggattacaggcgtatgccaccatgcctgacttttttttaagatggagtcttgctgtgtctcccaggctggagtgcagtgacatgatctcggctcactgcaccctcctcctcccaggttcaagacattctcctgcctcagcctcccgagtagctgggattacaaacacccaccaccacgcccagctaatttttgtatttttagtaagacagagtttcaccatgttgcccaggctggtcttaaactcctgggctcaagcaatccacctgccttagcctcccaaagtactgggattacaggcgtgagccactgcactgggtcttctgtcttctcttgatggacatttaggtggtttggaatgtttcatcaaaataaaatagtacagtagtggacaaacaccccacacatgaatcacttaacaatgaaagcctttgtgccatcgtgcctgctggccctctggcttgggtgccgtttctctgcttggcctggtacactgcccatctttggaggctccacacacaccacctacttggcaaagtcttctttgctgtgagcatccagttgctcttttccctcggctcccaagcctctctacatgcctggttttaacactcattacagagaaatcatctgcatagctctgtactctggaccatgagcctgtctgattctctgtaagccaaggctcattgcatggtaggtgcaccatagactgttgagtggcaaggtggttgccaacctctctcctatcttagctgtttgtgattccaaaagcctaaggttctgctctttggtccctggcagctaaagatgtgattaaagagattgaagactttgacagcttggaggctctgcgtctggaaggcaacacagtgggcgtggaagcagccagggtcatcgccaaggccttagagaagaagtcggagttgaaggtgagcagagtggggcgagtaggcccaggctggtttgaacaagcttctgttcacacttccacaacccctgcctgtgtccagtctcttccaggcccctgcctgtgtggctgtaccccaagcagctcctcttcctctggcctccccagggcacacagcattggctagggaccctctccctgtagtcagcagaccttgagagggtgttggggtgcaggaggattattggcatgacacctgtgaaagacaaagtagggagagccttctcataatgcagagctgtcacatgtgaggtgggaaggttgcagaaataaccagcaggagcctctgactgtgaggctgctctgacagacccaccctctgggagtttcagagcaaagattgcccatttaaaggaatctcatgttgggcagaagtggccaggcctcagctcaaatgccgcagcaataggaaggtgctgtagctggagactgccagctccctacactcctcgcagcagaggcaagttctctttttttgttttttgagacggagtctcactctgtcgtccaggctggagttcagtggcgcaatctcagctcactgcaatctccgcctcctgggttcaagcgattctcctgcctcagcctcctgagtagctgggattacaggctcccaccaccactcccggctaatttttttttgtatttttagtagagatggggtttcactgtgttagccaggatggtctcgaattcctgaccttgtgatctgcccgcctcggcctcccaaagtgctgggattacaggcatgagccactgctcccggcctttttttttttttttttttttttttttgagatggagtctcacactgtcacccgggctggtgtgcagtggtgcgatcttggcttgctgcaacctccacctcccaggttcaagtgattcttctgcctcagcctgccaagtagctaggattatgtgcactcaccaccttgcccagctaattttttgtatttttagtagagacggggtttcactatgttggccaggctggtgtcgaactcctgaccttgtgatttgtctgccttggcctcccaatgtgctgggattacaggcgtgagccactgcgtgcggctggcaagttctcctgaaggttagatccaagtggtgccctttttggccaacgcaaagggcaagtcaggttattctagccccgtgttccccaaacaggttctcctaaacaccagtcttctgatacgctctgtgagaaaagcaagagtgtcatgttcaaagcgttgggagatgtcactgggtattcccctctctttgaaattccaaagtcatgagggagagagaccagagttccagaatggcattgtctcttcatatgtgcatggctggggttgggctgggctcttctgcatgtcattgcctgctcacagcaaccagggaagagactgggttgagtctccatttataagtcaagggaactgaggctcagaggggctcattaaatagccacgatcagtcgggcacgatggctcacagctataatcccagcactttggaaggccaaggcccagaagttcgagaccagcttggacaacatggtgaaaccccgtctctacaaaaagtacaaaaattagcccggcatggtggtgtgcacctatggtcccagctccttgggaggctaagatgagaggatcgcttgagcctgggaggcagtggtttcagtgagccaagattgcaccactacactccagcctgagcgacagagcaagaccctgtctcaaaaaaagaaaaaaaaaagccgggcctggtgggtcacgcctgtaatcctagcactttgggaggccaaggcgggcagatcacaaggtcaagagatcaagaccatcctggccaacatggtgaaatcccatctcaaaatacaaaaatttgctgggtgtggtggcgtgtgcctgtagtcccagctactcaggaggctgaggcaggagaatcacttgaaaccaggaggcagaggttgcagtgagccaagatcacgccactgccctccagcctagcaacagagcgagactccatctcaaaaaaaagaaaaaaaaatagcagagatgtggccaagccacacatcacactcctgagatcagtgttctctctgtggtgccagtttctgcaggaggaggaatatgggactgggggccatgagaggattcacgccggaagggcctgcaaactagtttacaaagtggcactacatatttgtttccttaggaaggtcatggtcaagttaaccaccaagacagtgattgtttctgctctcctgcctggggcctgtactttccctgagcataagctgggatgttttccaaccaaagaactcagaactcagccctccccgagacctgtgaagaacaggaatgaaggagccatgggcctgaaggctacaggactcagcaggagctgagcttgctttcggcacatgggatcaagccctaacagcaccaccttgtttgccgtacgtggccttgccctgcgtgcagctctgaggctgggctcttatatgaaataggagatagagcccttccttcttcctcagaggttgtcctgggagagcctggccggtaggagtgctgcatgcaccttcccgcctgctacagatgcagtggctcgagtgaatcactgcacaccacctcctaggccctcctctgtgcaggaagcagcccagggcaggggcagggtgggatctgcccttgatggcccagtgttccgggcgtagtgctgatgccagaggggttctctctgctgctgcagcagtgtgcaagtgaggagtgaggtcttgacgggcgagagaagtgtagcccagagtcacacaactaggagtaggctgaggtggagtccaggtgtcagcccaagctcttttttttttttttttgagacggagtctcgctctgtccccaggctggagtgcagtggcgtgatctcagctcactgcaagctccgcctcccgggttcatgccattctcctgcctcagcctcccaagtggctgggactacgggtgcctgccaccatgccggctaattttttgtatttttagtagagacgggtttcaccatgttagccaggatggtctcaatctcctgaccttgtgatccgcccgcctcggcctcccaaagtgctgggattacaggcgtgagcctctgcacccggcgtttttgttttttttttttgtttttttttagagacagtttcacgccattgcccaggctgtagtgcagtggcatgatcatagcttgctgcagccttgcactcccaggctcaagtgatccttccatctcagccccccaggtagctgggaccatgtgtgtgccacaatgcccagctaattttttttttttttttaatgatggggtcttgctttgttgcccagtctgatcttgatctcctaggctcaagcagtcttcccactttggccttccaaagtgctggaattatcggcgtgagccaatgtgcccaacccaagcaagctcttaactgctttgctgttctcgtgggagatcattaggacctaaaacctcatttcagagataggataccagaggctggagagggggagtgatggctggagtcagctaaatcaggattggaagccaggcggtgtgccctagagtcctatgctgactgttcagctcattagagttaggtttggggagctttgttccgaatgacctgccggtatctgttgtgagggactgtggcgctccggctccggctgcctgttcctggccctgtggacccacgtgcaggtggaactactaagcagatctggtgtagagcagacagctgaggccccaggtgtgttcatggtctgctttattggtggatatgcggatttttctgcaaaaaccagcttccttagtatgtacggtgggagcagatcacgtgatcccaggagtttgagacaagcctggacaacatagggagattcccaactctacaaaagatacaaaaattagctgggtgtgttggtacacacatgtagtcccagctacttgggaggttgaggtgggaggatggcttgagcctgggaggtcgaggctgcagtgagccgtgtttgcatggctacgccccggcctgggcgacagagtgagaccctgtctcaaaataaaaaataagggagggctgggcatggtggctctcatgcctataatcccagcactttgggaggctgaggcaggtggatcacctgaggtcaggagttcaagaccagcctggccaacatggtgaaaccccatctctacttaaaaaatatataaaaattagctgggcgcggtggcgggtgcctgtaatcccatctactctggagactgagacaggagaatcacttgaacttgggaggtggaggttgcagggagcccacatcaggccattgcactctagcctgggcgatgagtgaaactccgtcttaaaaaataaataaatagataaaataggccgggcacggtggctcacgcctgtaatcccagcacttttggaggctgaggtgggtggatcacctgaggtcgagagttcaagaccagcttggccaatatggcgaaaccccatctccactaaaaatacaaaaaattagctgggcgtggtagcgggcacctgtaatcccagctacttgggagactgaggcaggagactcacttgaacctgggaggcggagattgcagtgagccgagattgctccactgcactccagcctgggtgcgacagggtgagactctgtctcaaaaataaataaattaaataagggtaattgaggtatccatcaccttaaatatttatctttatgctaggaacattcaaatttttctcttccagctttttttttttttttttgagagagtctttctgtgtcgcccaggctgctgtgtagtggcgcaatttcagctcagcacaacctctgcctcccggttttcagcgattctcttgctgaaatgagtggcctctagagtggctgggactacaggcgtgcaccaccatgcccggctaatttttatacttttagtagagatggggttttgacatgttggccaggctactctcaaactcctgacctcaggtgatctgcctgtctccgcctcccaaggtgctgggattacaggtgtgagccaccatgcccggcatcttctaggtattttgaaatatataatagattaatgtaaacaatagttaccctgttgacctattgaacactaggtcttatttcttccaactttatacttgtctccattaattaacctttcttcagcctcccctccctctaaccttccaggcctctggtaactaccaatctactatctttatgaattgcctaatactttctttgaatcataccaggagtggtgtcacatgcctgtaatagcaggtactgtggaggctaaggtgggaggatcacttgaggccaggaggtcaaggttacagtgagctatgattctgccactgcactccagcctaggcgacagagtgagaacctatctcttaaaaaaaacgaagaaaacagcaaactttcatgtaatttcaaagcacttctatgaatggaaagctgacattccttacaataaaggaaataaaatagtgttactgaattattatttgatgctgttgctgtttaatggctctgagcctgaggcttgctctccctttgttaaaaagtccccgtcactatgctaatttttgtattttttgtagagaaggggttttaccatgttggccagactggtctggaactcctgacctcaagtgatctgcccgcctcggcctcccaaagtgctgggattacaggcgtgagccactggccctcaacgtagaattctgtgttgtttatgttcatgtttctctgtcatccataaccacgtcacacgtccacctagagggttgtacaagtcagggattttcctgacacttgtgagcccccaataactcttggaggcctcttgatttgaggactggcctccaggtcccaccaactacagccagaatgggtccagctttttacaaacaaagctcaagttaagtcttgggggccaggtgcggtggctcatgcctgtaatcccagcactttgggagaccaaggtgggcagatcacctgaggtcgggagttcaagtccagcctgaccaaaatggagaaaccctgtctctactaaaaatacaaaatttgccaggcatagtggtggacgtctgtaatcccagctactccggaggcttaggcaggagaattgcttgaacccgggaggtggagattgtgatcagctgagatcgcgccactgcactccagcctgggcaacaagagcgaaactccgtctcaaaaaaaagaaaaaagtcttgtgatgctctggtagttcaaatccaccaggatgaggcttcactatgggcctccaggggtctctctcccgctaactcttctcttctttccgttgcagcgctgccactggagtgacatgttcacgggaaggctgcggaccgagatcccaccagccctggtaagcgaactagccgctcttcccctccacgcgcaaggccctctttggcaattcccagggcttttctcatgctttattctttctggagcctaagattagccctgtgggtgactgagctgctggaatggaagcccggcaagtccagcacgtgccctgtgtcctgacaggaggggagggtgggagcacagagactgacaggggaggaaccctaagggtggggacttcagggaggtgggagagctgagaccatgcactcctgggtcctcctgagctgcttggcttggttgactgtggatttcaccccaatatgattgccccgcctttcctggcaaccccttcctgcacctcgcagtcctgctccttcatgacttctctgcacacagcccatgtagccgtccccatctttctctggctcctccctttctccgtaccactgtctgctttggtttgtgcccgtcatgggtggcttcccatttcttcattcccagggctcagactggcttgggtcgagttcccagtctctgagtgcatatgtgtggaaggaaatagaaagaggcaacacagaacacagaaaggcatgcctggccaagggaagagggcagggctggtggtcggcagcctctcagtgtgtcctcctggcacggggctgcacacggcaggccctgagggtgcaggtttctggtcagtgatgagtgtgcacattgatgttactgagcccctcaccctggttgcgcccaacctccttttatttttttttaaagacagggtcttgctctgttgcccaggctggtcttgaactcctgggctcaaacagtcctcccgcatcagcctcccaagtagctgggattacaggtgcgtgccactgcacctggcttgtgaggctaggatttggaatgtaggttaagaaaattcatttctggccaggcgtggtggctcacgcctataatcccagcactttgggaggccgaggcgggcagatcgcttgaggtcaggagttcaagtccagcctggccaacatggcaaaaccccgtcttactaaaaatacaaaaattagctggcatggtggcacctgcctgtagtcccagctacttgggaggctgaggcaggagaattgcgtgaacccaggaggtggaggttgcagtgagccaagatcatgccactgcactccaacctgggtgacaaagcaagactccgtctcaaaaaaaaaaggaaattcatttcagtgattgcatgttaaagaatttcaagttaggccaggcgcagtggctcacgcctgtaatcccagcattttgggaggccaaggtggggggcggtgcacgtggatcacctgaggtcaggagttggagaccagcctggccaacatgctgaaaccctgtgtctacaaaagtacaaaaattagctgggcgtgatggcaggggccttgtaatcccagctactcaggatgctgaggcggaagaatcacttgaacctgggaggtgaaggttgcagtgagctgagattgtgccattgcattgcaaccttgggtgagagaaagcgagactccatctcaaaaaaaaagaatttcaagtcagaaaagatggtgaagagaactctcttttgcatactcactgtggaattctcactgtgcaagttttgcctaaattttagcatttcatttccctgagctttcagaaggtattcttttggtttttgttttcttttacttgactctgtaggaatggggaagagaaagtattcttatctctatgttcccaatcgtgagaataaatcttaagagggggataagagaatttggggttagaagatggcatgtggtggagtaggcacagggtgtttgagcagctagaggtcagttgaggccagatcgccaggggctaggctttttttttttttttgaggcggagtctcactctgtttcccaggctggagtgcagtggcacgatctcggctcactgcaagctccgcctcccgggttcatgccattctcctgcctcagcctcccaagtagctgggactacaggcgcccgccaccatgcccggctaattttttgtatttttagtagagatggggtttcactgtgttagccaggatggtctcgatctcccgacctcgtgatccgcccaccttggcctcccaaagtgctgggattacaggcgtgagccaccgcacccagccaccaggggctaggctttctgtgggtagggcaacgagaggacacattgccttttgcttactgagtggtgggaggatggtagaaactgcctcatctgccatatctgtggccagggtgagggcagaaagtctcccttccacattcctgcccccatggaccacctgctcagccccatttctgacccagtctctggcagagcctcctctctgaccatttctcctggtggggtgagggaatgtagctctccccagcccaggaggtttccaggagagcttcaaatcaccctgtcaaagctgatcctggccgtggcttagagatggccacctccatctgccagtcaccaccagaaaccctggaggcatttgtggttcctccctccctcctcctgcacgaacagggaaccaacagcttctgcatgtcccctgctccatgaacaggcagctcctctcccacacttgtcacaccggctggcaggtcccctctgttgccagtgtcgctgcctcacactcctgggtgggcactccagcccccctttctgtgcatctgctcacctcaggtctggggatattaattccatatccctcagccacctcaaagcccactgctctcaggctgaggctcacagtccttggcctggcattcaaggctcttgcctgatctgacccctcacttcccttccacccaaagcccatgccacggcttcttctggagcctacccacagctttcctccaggctcacagcctgctgcttcatgcttatgtctctctgctcctgttttttcagctgcctggagtcttttcatgttgactagctgattctcatccagactaagtccaaatgccacctcttacaaggagccttcccgggccactccaggcatacgcatcccccactctccagctgttaggagccctttgcagggtttccagtcttaagaatactgaaatggtttgtgtctgtgttggttctgcaccagccggggtgtccttggaaggcagagctgggcctggcacagaagcagcacccagcacagaagctgggtgtctatgaaactgacacgagcttcctctgtgcccagatctcactaggggaaggactcatcacagctggggctcagctggtggagctggacttaagcgacaacgcattcgggcccgacggtgtgcaaggcttcgaggccctgctcaagagctcagcctgcttcaccctgcaggaactcaagctcaacaactgtggcatgggcattggcggcggcaaggtgggtgtggcagccccctccccgcagagtcccctggtccatccacatccgtctgacatatgtgccctggcccttggccaccaccatctgggatggtcagccgttgttttcaaaagagaaaggcctcaaaggcaacagcctgtggccggagggtagaggcgtccatgagggtggggttgccaagcaaccatccccagttcttgggttggcttggcaacgcagagggagtgccactgcatacctgctccagcctgctggctctgcaaaactcagggcttggggcatccctatactcactgtacccgcagagcagctggtagagcctggcacataggcagagggagtctgaaaagaggagcatatgctcagggggggcaccgtcacagctcacctttattcctagacagggccttgcccagggaggtgtcctcaggcaaggtcagtgtagagcttcacgttgggctggtcagtgtagagtggagcttctttgcttcccagaacctgcatcaagggcggcctgccgtattattctcttccaactccatcccagtgcctttagacccagggttggaggacactgagtgccaggctgcaacccctacacacactttctaaccaaagggagaaaagggctggggacacagaagtaacagcagttggggatatcttatttgaatatgcaataccttaacttttcccacccacactgaaaggtggctgatgccatcccagtttttccacatgactcagcataggcttagagagatggggtggagtggatcacatagctagtgctgtgaggcccatggagccccaggctgaggagctggagtggcctcccctgcagagggtgcctgtgtccctcggcctgacgtgagggtgagcaggggcaggctctgtgcctgccttagccagccctcccccaagtccacttgggcaataagctatccctgtgttaagatgtaaaaatgggccgggcacggtggtgcagtggctcatgcctgtaatcccagcactttgggaggccgagtcgggcagatcacctgaggtcaggcgttcgagaccagcctggccaacatggtgaaaccccatctctactaaaaatacaaaaattagctgggtgtggtggcaggtgcctgtagtcccagctattcgggaggctgaggcaggagaattgctcgaacccgggaggtggaggttgcagtgagccgagatggcgccactgcactccagcctgggcaacaagagcaaaactccgtctcaaaaaaacaaacaaacaaacaaacaaacagaaacatataaaaacgtttgcgtcagcacagaaagcaggcgtggcccaacctagagtgagtggcatacgctgggagagccagagactctattctagcaaaatgcttcggttttccttccattacttcccttctcctgcccagcagtgcctggaaactgaggctcagggagctttcctactggccaggagttgtctggcctgtcctatacttgtaatggggtgagttggggaatgagttttggacccaggaccagagggcctcctgggcagacaggcctaccctggagtttgattgatggttctctgtgcctccctgaccactgatttgattaggtctctgggtctcggccttgctgacctatgcctcttgggagctcagacgccatggtctgggtgtctaaccaaggcctgcaggtcctttggaatctttttcttctgggcagtgtgtttagtgtggtttctgtgccatgcaccatgagaatagaagggcccagaggagttggtggggcaagaggcatggccctgtgcttgagaactctccatacccaagttggactcctgcaggagctaaggccatcaccacgtggcctccagggaatctgggagaatgggggtgacctagcagtcggctgctgctgctgagtagcttcctcagaggctggtctttggcagaagtttgatgtctctaccctgagtgtgtgcgtgatcgtgtgtgcgtgatccaccatcaccaccgtggagtcaggcaggtgctggctcttctgttcctcaaggatggctgtgtgcagtctcatgccaggagttaggccaacccacccgccatgtgcggctttgctaaatacttaccgggtgaccttggccaattcactcatctctcagagcctcagcttcctcatctgtaaagtacggccaatcctgcctgcctcccaggctggtgttgaggttgaaacaagaaaatatgccaaggatgcccaggccctagcaggtgctctgcaaacatcaggtgttctgcaaatatcacttctctcggtgcactcgctcgtgattcttttatgtcgcatttaccatgggctctgattcccatcggtcagtctccgtttttcagtgcttttcctaatggtgtaaccagggtagaagctacttcctggcaccacaccagggacagggcaagctgggtgttaggtttttaccaccagcaggcaagctcctgctgtgcctggccagcttttaggcacaggcaggtgtcagacaggttcgtctggaccgtggacttggcagctggctcccttggacattgtggaacgtggaagagaagctggaagatttgggctttggtccagagtccaccacttgtttattgaccataagaaagtttccgttcctcttaccctgagtttcttcagctggaaaatgggagccatgattttcccacctagcagagggccttagacagtgaagtgagctgactaggaagtccttcccctggacctggctaaaagttcatccactccatgtggtctctccctttcctgagtagggcttggtctccccgtctcgaaagtgaagctaaacctctcaggctggtgtgacacagcattagagataaaaaccttgtgtaactgaagtgctggacatatttaaggtgtgactgttgagctgttagcagtcctgcgtcccctgacctgcaccgatgggtggcgtgggatgttgaagagcagttcagcagcagtggccaccccgctgggagaaggggctcctgcccatgaccagggccccttgcctttccccacagatcctggctgcagctctgaccgaatgtcaccggaaatccagtgcccaaggcaagcctctggccctgaaggtctttgtggctggcagaaaccgtctggagaatgatggcgccactgccttggcagaagcttttagggtgagtggtttctgtccatcctgcccctgcagccttgaggtgcactcggcatagtaggctgacagttctggatgctaatcccagggctggcactcaaccaagagacctggggcgtcacgtgccctctccaagcctgttaacccatccgaaaatgagccagaattcctgtcgtgcatttctggaaaggtgtgtgactttccggaaaggtgtgtgactggctcccactggtgagccagcccctatggggcttcaggccaggcaggccactctgaccaaggagtgtcatctgccaggctcagaagtggtgaagtgagatggtgcgagtgctgacagtagcctggcccagccactggtgtggggcacagagaaggaacataccagacctccaagacagggagataggcaggggcagccgcagggctcaggtgccaaatgacgtgctctcaggtgaccttatccccactcctcttccactctcctctccccatccccgcaggacattgctgagtccccgatcgtgagtgccagcagaaggctacacttgcccctaacaggactgaaaactttggggtctgtctccctcctctctttcctgttttttttgaggcagagtctcattctgtcacccatgctggagtgcagtgcgtgatcttggctcactgcagtctccgcctcccaggttcaagcagttctgcctcagcctcccgagtagctggaattacgggcacccgccaccacacccggctaatttttgtatttttattagagacggggttttaccatgttggccaggtggtctcgaactcctgacctcaagtgatctgcccgcctgggcctcccaaagtgctgggattacaggcgtgagccaccacgtccggcccctcttctcttaatttaaatgttttcttcagcaaacagtatcctaggagcattgctcatacgggccggaatgtcctggctgcccatcgaggctgtctgtagataccctttgcctgcttcagtgccaagtgaacatcgcagagatctgccttgtgtctccctgcacccctggctgcaggggagctcctgctgcctcctctggagctggtgggggcctcactgccatccttggatccctccctgccgtcagcctgctgtcctcagtgcactgggaggagggggtgcgctgtggttgtgttgagccttcataggtgtcctctggtgggcttagaatgggggttcttaatcccccccagtatgtggatagaattcaggggtctgtgaacatggatgaggaaaaaataacattattatttattactaatgtagctaaaatatgtagtgtgacctttgattataaatgtagacaataaacctcacagcattagaaaggcctgtgactacccacataacaaacaagcacatgtagtccctgaacccaaaaaaaaaaaaaattttattgaggcagggtctcgctctgttgcccaggctggagtacaacggtgcaatctcagcccactgcagttgaagcttcccaggctcaagtgatcctcccacctcagcctcccgattagctgggactacaggtgtgcaccaccatgcccacccagttaatttttgtattttagtagagatggggtttcaccatgttagccaggctggtctcaaactcctgacctcaggtaatccactcgccttggcctcctaaagtgctgggattataggcataagccactgcgcccagcttaaaatttttaaaaaaataaaaagaaaatcttgtgactttatccccagtggaaatcacaggtatttcatatgaagttatagttactgctgatatatagaaatatttctcactacatcaaaattacagtaatagtggacccacccctagatcttgttatttggtgcattaacaagaagtttgtatatcactacagcatgcgtttggagttttttcctaaatgttttgataactgttccaactgagttgatttcctttgtaattctgtgtaatttatcttaaaattttaaaaaaacattttttgaggaggggacccaggggcttcaccagactgcctgaagggttcatggcacagaaaatactaagaaggcctgacctggagtgtgcccaggttggccttcctgtatttatttgtggaccacccgctccccccattgccctgtgctgcactgagcacctgaagacagcagaagattccttggcacagttaagccaggccaaccctcagtcctgggtcacagtggagactgggacatggccctctcctccaaagctcaggggccgatgggatgcagacggaatataggctttgaatgtaggcaggatgaggaccaccgtgatagaggagggaccaggtgctccgggagcacagaggaacgcacactggatcgtggctgggggaatccaggaagccttcctgggagaggaggtgaccaaaacaagagccctagaactcatatgagttagcctgtcaagaaaatgctgaatggctgggtgtggtatctcacgtctgtaatcccagcactttgagaggccgaggaagctggatcgcctgaggtcaggagttcaagaccagcctggccaacatggtgaaacctccatctctactaaaaatacaaaattagtcgggtgtggtggcgcacgcctgtaatctcagctactcaggaggctgaggcaggagaatcacttgaacctgggaggcagaggttgcgatgagccaagatcatgccatcacactccagcctgggcgacggaacgagactccgtctcaaaaaaggaaaaaaaaagaaaaaagaaaaagaaaataaggaggcagagagaatgggtatcaaaaggccaggctgtgatagggctgcatgggccagggaacaccctcctcatccctagagaaggacgccatgtcgaaggggttatgttgtgtaggtgggtgggctaggagggcccctaagaaagaaaggtcacatggagctatgtcatccagagaaggggcatgagtgcctgcccaccacagccagggtccccactgtgctgaggacaccagactgagaacaagaaatcgacctgctggatctagagctctgtgaccctgggcaagtcacttcgcctctttgatccctagtcttttctctggtggggatcctatcccaggcagtaggcctccctcaggaggttgtggaaagagttagatgcagccatgccccaaaatcccacagacaggcccctgccctgtgctggcggcagcccattcctgtgcctgctgtgtggaattgctctcctgcctgctggatgtcacctggcactcggggccccctccactctctgcctcctcttcacaggtcatcgggaccctggaggaggtccacatgccacagaatgggatcaaccaccctggcatcactgccctggcccaggctttcgctgtcaaccccctgctgcgggtcatcaacctgaatgacaacaccttcactgagaagggcgccgtggccatggccgaggtgaggcgagtgtggcagagccagttgggccccgccagatagaggctggctgctgtctttccagggaagctggggctccgtttagcagggactcctctaccccctgcctgccccctgggtgtgtgccccatggctccagctctttgaacatgtcctgaacagggttgcaggtcccaaggtaacccacgccctcctcgggcagctctgattcttcatgccaccttctcctgagccgcctctgcagcccccagcggctgccgctggtttgttctcaggctgcacaggagcagactgctccccacatctgttttcctggttgatttgttcagcagctgttgtttgttttgttatttattatcactttttgagacggaatcttactgttgcccaagctggtcttgaacttctgggatcaagtgatcctcccacctcagccttctgagtagctgggattacaggtgcaggccactgtgcctggcccagcagctgttttttgagtccccatttagtgcttggctttgtaccaagtgcaggccacatggggttgagccaaagaccccgccttcagggagaccctagctcaaggagggaaggaagctgccagtggtaacagtgctgggctctgaacgcagtggcttcttggctgccagggtcccgtggccccacagaaggctagtccggctgcctgtgtgttagcagagatgtgtgcaggtgttggggaacacgccagaaggaagttcaaatcagacttagggcaggcttcctggaagagatcacattttggctaagttgtatagggcaagtggtctttctctggacagagggtgggggatgggtgtttcaggcagagggatcagcttacgtgtggaagacccggatgctcagcaggaaccttgcttggttggtctcaggaagagttctggccgtaacatggggaggggtggaggaggtttggccaggggcccagaggccaacaagtagaagacggcaaagctggtgacttgcagaggaggacagtgtgtggtggctggcttgggatgtgaccgtgtggggcccccggggcttgctgagggctggggtgtggtctgcaccctcactctggacccttgcttccccctcacagaccttgaagaccttgcggcaggtggaggtgattaattttggggactgcctggtgcgctccaagggtgcagttgccattgcagatgccatccgcggcggcctgcccaagctaaaggtgccagcctggacgcctgacgtcctccctctggggtctgtgggtggtggggcggctgggggcacaggggtctggtctgaaggcaggtgggcctgtgtccatatcccagctcctccacttcgggccctgtgatgctgtgtgagcctccacacccctctgagccatggtttcttcatttctaaagcgggaggcagggagtggtgtacatcactgtcttgtgatttaagtaaacacagtacgtgactcatcgttggctgcagggcattatttttgttgttggtgttattcttcctgcccactttgccccacctggaggacagagcctgccatatcctcacttggggaaactgaggcttagagtagaacctggtgtcctggcccgggtttctgcctgcctccaacccttcctcttattttcaggagctgaacttgtcattctgtgaaatcaagagggatgctgccctggctgttgctgaggccatggcagacaaagctgagctggagaagctggacctgaatggtagtcggatgggggaggcctctgcacaggtctgctaggctggccctggcaccccggctgactgctcttccctccccttgagcaggcaacaccctgggagaagaaggctgtgaacagcttcaggaggtgctggagggcttcaacatggccaaggtgctggcgtccctcaggtagggaactcggggtggccccagaggtcggggtcaggccattcctttctttctttcttttgttcttgagatggagtcttgctctgttccccaggctaaagtacagtggcgtgatctcggctcactgcagcttccacctcctgggttcaagtgattcccctgcctcagcctcccaagtagctgggattacaggcacccaccaccacacctggcccctttatttgtttctacttgtatttattcagaaacgttgggtgcactcctgttacgtactaggtcatacactaggcatcagggctataaggatgggacagtcagggcttctgtctcgtggggtggagacagaatgagttgtccgttcaacagaggagctcgtacgggctgagcggggccaccctgtagagtggtggagttggggaggcctctgaaggggtgaggccagatctcatcctgatgtggtggggcctggggagtgatgggggtgggaggtgggggcagccagaaggggctgcactcgggattgttcttaagacgctgactctagaaaggaagagaccatggggcctggggagtctacctggaggtgaaggtgggtggccggggagtggccatctcctggatccaagtccggttgggccatcagcatcgggctccctgtgcccctcgcatctccaagtcggcctcattcgtgtgtcagatactcagtcgtgtctcctcggtgctaggccctgagctgaggctaggaactggggactccgaggtgggctgaacctcacaggtcccactgtccctgggaaatggtccagccttcctatggggcaaggacacccctactcttcttcctcccccacacctgtagcttcctgaggtcatgtggatgtgggcgcccctgccctggcatctcaacctgggcagtgttcctgccaagccctgggctctaggtgtgacaaagctgtcttcgttttctgtctctccatgaaacctggggctccttgaggacagggacaagatctgatttttttttgttttttttttttgtttttttgtgggggatggagtctcgctctgttgcccaggctagagtgcagtggcacaatttcggctcactgccagctccgcctccagggttcacgccattctcctgcctcagcctcctgagtagctgggaccacaggcgcccgccaccacacccggctaattttttgtatttttagtagagacggggtttcaccacgttagccaggatggtctcgatctcctgacctcatgatccacccacctcggcctcccaaagtgctgggattacaggcatgagccaccgcgccgggccgatcttatttttttgtgtccacagcatggatttccctggtgatccacctgcccctgccctgggagcaggtgctcccaccccaccaggctctctccctcctggctgaggtgaggtctctgggctcatggagccaggccttagagccaacctgggctgctgggtagagaggatctgcttcagccagctctttctgcagtgatgacgaggacgaggaggaggaggaggaaggagaagaggaagaagaggaagcagaagaagaggaggaggaagatgaggaagaggaggaagaagaggaggaggaggaggaagaagagcctcagcagcgagggcagggagagaagtcagccacgccctcacggaagattctggaccctaacactggggtgagtttctatcatctgccacaatcagagccctggtcctgagaacgtgaaatcccgaggcactttcacaatggggtagggggtgtctccttaagcacagtagccacaaacatttttttttgattgcatgatattgagtaaaaaaaggaaaatggtcccagtgtaatgatagttacctatatttcttttttttttttttgagatggagtctcactcttgtcacccaggctggagtgcagtggtgtgatctcggctcactgcaacctctgcctcccgggttcaagtgattcttatgcctcagcctcccaaacagctgggattacagatgcttgccaccacgcctggctaatttttgtatctttagtagagccggggtttcgccatattggccaggctggtcttgaacttctgacctcaggtgatccaccctcctcgacctcccaaagtgctgggattacaggcattgagccaccgggcccagccatagttacctatatttctatttaccccaatataaatgtctatttacaggtagcagtgctgctgcattatgtatattataagatatgcataagggtttctgaaagaataaacaaataagcataaatagaaattctgattttttttttccccacccaccagaggattgtcttggtgacccttaggaaccactcccccattcctgggatggtggctgggccatgacctggcttgggcacttggtgtcccttgtctggcccggggctgcatcagggctgccacacctccagttcattcatttgcattccctgtcaggttcctaagtaaagctcctggagaacttggctctggacaaggactccccatgcttacgctgaattgggctgcttctctggtttatggaatcaattaaacaaatggctaggttcgcctcaattcagtttttcctctgggcacctctggtgctagcagggcttacccaggctggactgtagttctacggggacccactttagcccccatgtgcctccgtagtcatttctggggcactgcatgtcatgacgaggatccacttggccgtagcaggttttttgagtcccagggaggtagcttccccctcaccccaaaggctcctggaccaagagccatccagggccagcatctctgggtgatattgatagatgggaaatgcagctgagtgggaggaagaattctagactttgagcctagatgggctggagtgaagggtggatgtgctgggtgtggggatgggcacagctgtgtcggggagtctggggtccggaattctccagagcctctgtgcccctacttcccaggagccagctcccgtgctgtcctccccacctcctgcagacgtctccaccttcctggcttttccctctccagagaagctgctgcgcctagggcccaagagctccgtgctgatagcccagcaggtaataaccacccctcgacccccacgctgtacgtgctgtggcttctggagctgttagagaaaagggacgaacagctcagagacctgggggtgcgacgctgtcagctgggggcagggaggcttggcctgccactgttacaacacgcgcaaatgtccagggtatttataagcctccaggggttgcaaatgttccctccccactcagcctacagaaagtacagcccgccagttcccatgctgactggggttagggaatttccttaagagccttgcatgtgcccaccccctccttggcttctctctgcgtgttccgtcagcccagctgcttcgagaacaactctgttgcccagggctcctttggaagtgacgtgcctattgcaggatgggtgccctcactccagcctcacttgttggttggctcattcattcattcatagatgatcttcggggcatccattttctgccaggcactgcatttgggcatgattttatttaaccctcttggcaacatgaaatgtagactctgctgcccttactttattttattatttatttatttatttatttttttgagatggagtctcactctgtcgcccaggctggagtgcagtggcacgatctcggctcactgcagactctgcctcctgggttcaagcaattctcctgcctcagcctcccgcgcccagctaatttttgtattttttagtagagacgaggtttcaccacgttggccaggctggtctcaaactcctgacctcatgatccacccacctcggcctcccaaagtgctagggttacaggcatgagccaccgtgcccggccagcccttattttgtagataagaaagcggaggctcggaggttacagagaaataaaatgggcccactctcagagttggcttaacatttcggccaattgctttgttaggttttgcctgtattctttgtttcttttaacatgataaatcagatgttgtaagcctttctgtggcctatcactttggtgtagcaccattcatcactttcttgtgcccataaaactcttctcaggatttttattgcaatgtgtggatgtagcacttaaaagccaggcactgtttctgacgttttttccacttttccctgttgtgaggttgaggtaaacgtttctgcatgtgagtattgtctacatgctagattatttcttcaagttcaattacaagatggggaccactggatccctgaaatgatttttttttttttttttctgagacaatgttttgctttgtgactccggctggagtgcagtggtgcaatcatggctcagtgcaacctcgacctcctgggctcaagcagtcctcctgcctcagcctcccaagtagctgagactataggcacacaccaccaaccttggctaatttttttcctttttgttgacatggggtcttgctatgttgcctaggctggtctcagacttttcgcctcaagccatcctcccacctcagcctcccaaagtgctggggttacaggcatgagccgccacacccggctgggatgatttttcatccttgttcattcactcattcattccctctctatgctgcatatgtgcttgctgcaggccaaatccaagccagactctgaagggacagcatggggtaaggcaggacctgttcttgcccgccaggggcctttgtactgcccaggcctctcctagctagcgtcagagcccaggtacctctccaccacgtgccacaggccaaccattgtctcttttgtcctcagactgacacgtctgaccccgagaaggtggtctctgccttcctaaaggtgtcatctgtgttcaaggacgaagctactgtgaggatggcagtgcaggatgcagtaggtaatgtgggctgggtgagacctgggtgccctctgtcccttgatgctcgtgggccccaggtatccttcgtggttgccgtaactcgtcagccccagcgctctcatgggaactgctctttggccacctgagtttttcctccgtcagggtcctgccgtggagccagctggctgctcttctccctgtttttcaccactgagaaactgaggcctttcccaaatccacacagccatgtacagttagaacccatagcccgctctaggaagtccagatagtcacatctgcaagcccaatggacgcaggtctatcgggaggagggatggtgagagccaagcccttgtccacaccttggagcttctgtgctcacgtccactctacctggaggttccttgcacagaggacacctttccccataacattatgggggcttccttggagcaccagcccatatccctccagccctatcacaaccctctccccaccctgtctgtttcctccattccagcacctgtcaccttccaccctgtttccatgtgcttgactgagcctccacatctaacgaaacctgagccagttccggttaggcagaggggaggaagggccctgaggcgagggggacggttcctggaaaagatagaaaggggtggaaggacatgtggtgcctcttcccggcgtggcgtcgaagcggggagggcggctcagtgggaaatgaggctcggaaggaggtgggggccagacacaagcctgctccctgagggcccgcctgtgggcatttttgggaacaagttgccctagttctgtttcccaggaagcctagcacagtccctgcacatcccctcaccctgccaaaataacctgaatcctccccagtggtagcctgcctcaggaaatctccattcccacggtgtgaggtgggcacagtgggtgtcatccccatgcccattttatacctgaggccaggatgggcaagggccagagtgtcacagctggcagatggactgagcccatcccctgatgccaactgccactccctctggttcctgtgtctctgccgtccctctcgtgttcgcctcttcgtcagggcgaggaggcaggcgagcctgtgtctgcgcggtgttgggggaaccctgggtgccttggcccagccctctgccatagccagcagcctgcccctgctgcttctgccctacagatgccctgatgcagaaggctttcaactcctcgtccttcaactccaacaccttcctcaccaggctgctcgtgcacatgggtctgctcaaggtgaggccggaaggaacagcaggcccgggagggaggtgggtggggtctgcacagaagctgccccagccatgcccgccaacctccctcacctcgagtcctgagccggctcgcccacggggccccgaggcctgggtctgccccagcagccttggtcttcacgatgagattccggctagactcagttgtgggcactatcagcagagtctggatggtggagtccaggggcccccccaggtgactttgaagctcaccccgcttttcgctgtgttcctctcagagtgaagacaaggtcaaggccattgccaacctgtacggccccctgatggcgctgaaccacatggtgcagcaggactatttccccaaggcccttgcacccctgctgctggcgttcgtgaccaagtgagtgtggccttgtccttctgccggtgcctgccctctcgggcttctctggccaggtctgaaggcgcccggttccgggaggcccagccccagcccagccagcctgctggccccactcaggtgcatgagaggccctcatgcctcctgggctctcagcatctgcattggagtctcaccacccttgggaggcccactcccctctgcccagctgaggacagtggggctcagggacagtgagagaggagacatgcggcgcccccattgtgcagatgaggagcactgggttggttaaggagtttcccttggtcacacgctagcaagaggctgggccagtgtccagacccatgtctgctgagcgaggtgctgcggttggtgacatctccggagtggctttttgtccacattcacagcagcgcaggccaaaggggcctggtcacaccaggctctgcagccccgggccctctcctggggacacacattgccacgggagctgccaaatgcccagcaatgtgtgaaccttggccttgttctggagggtcctggggtgtcccggggcattgatggggtgatgggcacagtcaagtaagagaggcaaggccccaccagggaggggtcgggaggcttgccctctgaaggccctgtgtggcccctggccaacctgtggccttcatcaggcctcagtctccccatttgtccaaccggggggttaggtgagattgtctccaagcgccctgaccagccacacttccagtcagtcggcgccatccggggacatggggcaggcagaggagcaaggaagtccctttgctgggggagcccagagcccaccagctgaggcaggatacttggtgcatgtggggaggcggggctggcggagcgtgagcggcccccgctggcctccagcacccagctggtgccgcggcagccctgtccactccagtgtctgcatggcgccgcctccttagccaggccttaccttctggccgcatttcccccacaccagaccaccccttgggctgcagctggactggccttggtgaatggcagatctcactgttcccctcctctgccaggtgctaggtagagcctcactgtgaatctcatggctggccacagcctcaccccgaccccaccccaccccaccccagcacagtgtgctctccctgagcccctttccatagcagtgctgttgctgcagtgccgagctttgcccatgctgtccagagcttgtttggccagtggccccagcccccgtctgcgcctgagccctttgtgtccttcctgccccctggtcagagtagttccctctgtatccctggcagcccctgtgctatcctaagcctgggcatgtgcctcttgcccttgttggtcagagcaaaatgccttttcccagcttgttgcccaacctccagcacaggcctcagtctgccccctgggtcttgtccaaggtgactgattaactatgtagtgacatgcacggaccctcttccctcagctcccagccaaatggtctgggatgcccggcctggcgcagatcctggcctgttcactggcttcaggccagaggtgttgtcaggcctggtcctggctgcgtcccgcacttgcccagtcccccagagtcttgcctcagtttcttcctttgcagtgaaactaatgatattgagggcaacaacagccagctcaggcgcagtggctcccatctgtaatcccagcactttgggaagctgaggcaactggatcacttgagcccgggagttcaaggccagcctgggcaacattcgtgaaaccccatctctacaaaaaatacaaagttagccgggtgtggtggtgtgtacctgtggtcccagctacttgggaggatgaggtaggaggaccacctgagcctgggaagtcgaggatgcagggagccatgattccaggactgtactccagcctgggcaacaaagagaggccctgtctcaagaaaaaaacaaccagcctggcgcggtggctcacgcctataatcccagcactttgggaggccgaggtgggaggatcacgaggtcaggagatcaagaccatcctggctaacatggtgaaaccctgtctctactaaaaatacaaaaaattagctgggcatggtggtgggcgtctgtagtcccagctactcgggaggctgaggcaggagaatggcgtgaactcgggaggcggagcttgcagtgagccgagatcgcaccactgcactccagcctgggtgacagagcgagactccgtctcaaaaaaaaaagaaaaagaaaaagaaaaaaagcaaccaaaaaaacaatggctagccatttacttatgatccagattggactctagtgggccagtcctatgtggccactggcagccagtaaggattccctggcctatgtctgctggaagggcccttggagagcctggctgagggggccttcattctggccagctctgggctgtgtggcgttgggtgcctggctctctgagcctctcgcacctcccatccccacccacggtgtgcagaaggcagagggctaatgtctctcttgctgagtcgttgtgcaaattaacaaaaatgagtctggcaccaaaatggcccccacacttggaaaacaggccaagaggcatccaccgacctgctgacccctctttccccgcaggcccaacagcgccctggaatcctgctccttcgcccgccacagtctgctgcagacgctgtacaaggtctagactcaaagcctctcccatcccttggcctggaccagtgagctggggagggactcggatgaactgaggcgcagcctacgccattgccttggacaggactctggccacaggcagggcgggtctgtgtcccatgtgtcctgtcagtcccctgagtatgtgtgtgggtgtggcgcatgtgcaggtctgtgcctcctgtcgggatttgggttttaacgtcttctgctggcccagccctgctctgttgtggggagttggcccccaggggaaagggctgtgagctgctccgccattaaactcacctccacctgagggcgctctgctgatctccgcctgggccctgatggccgtccccacccacctgccttccggcccggctccctggcggagccagaacccagggagttgcccgcgtgctgtccttcccctctgtgttgtgattgggttgtttcctgccctgcctggggctgcttctcgtcaccaagccctggtcctgcggcagctgtcacccctaccatccataccactgtgctgaccgctcagcctgaagagcagagaatgccatgggtgggactgtgggggtcggatcgtggggttgttggcagagggcaaccctgggccccacaccgtgtggacaggcagacaccagattgtccaggagcaggagctgctgggactgcgctggccccggacctagtgggccttctcctggctgctgagatgtcgtctgtgactggcctggctggagggggagtgttgacaacccaaagctgttctccagtctggggagggagaggcagggtccccaatgtccgagctgcatctggacgctgctcttaaaggacctcctggggcaggggagcggtagggtctggactgggcagatgctgtatgacctccctgagcacccgtgactgccccatgctttcccctttgtgctctgtgtgtgtctgggctgtgcccgggggcttcacaaataaagtcgtgtggcagcttca

SEQ ID NO: 49 - DNA, 19925 bp, Homo sapiens
aatcctggaacaaggctacagcgtcgaagatccccagcgctgcgggctcggagagcagtcctaacggcgcctcgtacgctagtgtcctcccttttcagtccgcgtccctccctgggccgggctggcactcttgccttccccgtccctcatggcgctgctccgacgcccgacggtgagtgtgcccggggaccgctctcagaggcgagtccgtcggccccacagctcccctgtcgcttctctcatctgctccgagcttctccgtcccaaccggggctgcttttctcttctccggagctcactgcttcgcccgcgtccctggccctgcggccggtcctctccggcccgcctttccccgtctggattccgccctcccctaacccctccctgccccggggtgggagaagtgtaggaaagcgcttccgagatggcgcctgtcaagtgagcccccagagcactaggcctagtactcagcgagcgatccccgagtgctcttcattgctagagagttatctacttccacgttcctgggatttccctccccctttcttacaactccttgccaactaagggacctgtgatggcggctgggaggaggactggaagggttctgtaggcagtaaagtgtacggcgtgtttcatcaggcaactgccaggctgtttttcagattgttcacatttctttttgtatgagtttcccatttatttcggcacgctaagtcttccatgctacgttcactaataaatgggtttgtccccttaaaaaattaatttctttactcaaatgtaacagaggtttttgaatataatttggaccaatgtggcagactgagagaaaagggtccaaattcatttatttcatccttgcagagatcaaagtgttatggtgttttgggtatttttcctgtgggcttgaattgtaccgggacctacttttttcctttgccgaaagctagagggccctgacacacctgagttccatcatcttggctataaggttagataaaagctgccaattttcctatccagatgaatttaaattgagtcacattaccaggcttctacccataagcattacattttcaaacactttttcagattggcagttgctgctggaagaaattgaagtgtgacttttgagaatcctaatagattgaatacatttagcatttaattaatatccttttgtggatctaagtccaactgacaagtaattttttataataatgtattctataacgttatttaatagtcaaaacctttctgttcagggaaggcttgagtttccctggcccctctctctgcctggtagatccactcaaaccccttgttgggagttttattagagtcgggaccctgaactctcagggataggacatgctggttttttgcttttttcttttttaatgaaatgtttatcacttctataataaactttttttggtatgagttgcttttcctagcaagttttatttccaagcacattatgtctaaagcaggttaaggtcaactgacaatttttatttcatacaattccaaccttccctgagtttgggagctaaaactatattactcaagaaaactacttccattctaaatgtccttaatataagagaaaatccattctatggcaacctcattttaaaaagctgtagttctaaaagatcatgcatacaggagcatttcttatttgtgaaatggcataagaatcaaagctagtttaggttttaaacatctggtttttaaacaaccagacctattattaactattaatattatagctttattatttttcatcttaatttactttttaccaagctctgtaaaggaaggtttttaaatatatgcctttaacttgcagggatctctaacaagtgatatgggtactatatgagaaataatcattaaatactaataagctttgaagttctcttacaggcccacttgaatactcagaatagctttgcaaggttagtgggaggatctttattacggataaagtagatgggtgatttgcctaatttagagtgatgttattaatcacaaatagcatttttagacttcctgaaatgtaccttttccatcttgcaaatagatcttgacgtattgtcctttcccaaagcaattctaaatttgagtatctaacattagcaaagtatttcaaattctttcaaggtttcattacttttttttttttttttcaggtgtccagtgatttggagaatattgacacaggagttaattctaaagttaagagtcatgtgactattaggcgaactgttttagaagaaattggaaatagagttacaaccagagcagcacaagtagctaaggtaacaatgatgaagactgaatgtgaatacagaggccgattctgtatagtgctgagtcccacaacgctggctgtcttgcgctattcatgtttctttttccttatagaaagctcagaacaccaaagttccagttcaacccaccaaaacaacaaatgtcaacaaacaactgaaacctactgcttctgtcaaaccagtacagatggaaaagttggctccaaaggtaggaagttctgaatttacaaacgtatttaatgaggtagcctgtttttagccagactacaagggtgcctttatcattgctgtaccttctaacgaacattcatagctggagctctgctttgaagcaatagtgtaggaaatgagtatatacaccttttaacttaataacattatgaccttgaagctgggcatggtggcttatgcctgtaatctcagcactttgagaggctgaggcaggaggatcgcctgaggccaggaattcaaggctgcaatgtgctataatggtgccactgcactctagcctggacagcggagcaagaccttgtctctgaaaaaaaaaaataaatattacgaccctgaataataaagttgattaccttaatacccaaataaaggacagaatggttcagaaaattcatggaatgagtgagatttttaggggtagagagaagatgatagctgacaggaaagggcacgtttgtggagaacaaagtagcaacaaagatcaaggtaccaaagcggatatggacctataatcatgtcctttcgttaaggagtctgaaagacttaactgagtcaggcggcttgagtgaggaaccagaagataaggctgggaagaaggttgcagttggatttgaaggacttggaatttggatttttatcccattaggcttgaggaaacaaagttttgaggagtaccgaaatgatgaaaacaatgtagggaggtaagttaggaggtattgcacttatccaagcaagagctgatgagggtctggagctagcccagatcttccctaagcgcctacccatacaccagtatcaatagtgggtatgaagaaacaacatcaaatgtgttaggatgtctcagaatgtctttcatcttgtatttaggaaagaatactttggacacatggcttgcactgcaggagtggtatccttacccacttggatattaaataaaccatttatgcaataaatgaacaaaaagtaggaaagtcaggagagggcggtagctttggtaaaggtatcctgtttggcttccgatttgttgaggtaaccgagggacatctgcctggaaatgcagttggaaatgtggcagcaacatctgaaggcaaggaacagatttgtcagctttcttcacagagatgatggttgaaagctctttgctctttatgagaactaaagcttagaaaaagtagttgagatgggacttcatttaaaaagccttccctagaaggtttctataacagtgacctcctgaaagccaaacccaaaggctggttttcagaccttgatctcttagcagttgtgcagtgttttacatgtgtaatggtttgaatgtggttcctcccacatcgcaggagggcgatttggcagtatatgtatatatttttggggggggacggagtcttgctctgtcgcccaggctgcagttcagtggctcgatctctgctaactgcaacctccgcctcccgggttcaagcgattctcctgtctcagcctcccgagtagctgggattacaggtgcatgctaccatgcccagctgattttcactatgttggcctggctggtctccaactcttgacctcaggtgatccacctgcccccgcccctcaaagtgctgggattacaggtgtgagccactgcgcctggcggtagtatatttcaaatggttattctccatacccagtagctttgttttttatccaaagaaaatgatcagagggataatcaagtacttttagatagtgctatgatgagtgtctcttatagagtagagaaataccctagttaaatccatttaaggaaatactatgcagccataaatatcatgttttagtagaatatttaaaggcatcaaaatgcttgtaacattaagtggaaaaatcagattataacaatatataaacagtgcaaccccagatttgcttttaaaatgtacatttgtatgcagaatattgatggtagttatttttgaatattatgttggacttaagattgactttcattttcttccttaaaacgtcaaactttggccgggtgcagtggctcacgcctgtaatcccagcactttgggaggccgaggcgggcggatcgcgaggtcaggagatcgagaccatcctggctaacacagtaaaaccccgtctctactaaaaatacaaaaaattagccgggcgaggtggtgggcgcctgtagtcccagctacttgggaggctgaggcaggagaatggcgtgaaccctgggggccggagcctgcagtgagccgagattgtgccactgcactccagcctgggcgacagcgagactctgtctcaaaaaacaacaacaacaaaacaagaacaaaaacaaaaaacttcaaacttttaccatgggtacatattactgttcaagttagagaagaagaaaagaaggcttttttttttctttttttaaaagcaaagaccataaatatgttactaaagaaacaaagggaaaaatagtttcctcctgtgacctccataacttcatcctttttgtgtttcctttactccttggctgactcctttttctcttgcttcctggcaaaattgaggccactgtttgagataaagcattatggacccgtagctcagttcatataaaaatcaattccagggttgaaacatatagctacatgttctagatttagaagttatgaggaattaatgaacaggaattatttccaattcaaatacatttccctctgagaaagtagtgaaggaatctctaagtccacgatttaggtagagtcccaccttctagcaggtgagtctctctgcctgcctgtctctggtcagccttctggcttttactttgtcatctgctttatctgcagggttatcactgttctttagagccaatccctggaggtgtggaaatgccacttgagtgcacaggtttctatcaattttcctggaaaggtgataacataagccatgtgtccatgataggagatgttcccagtcttctaaccaaatttatactatcctttttgcaaaactggagggcaggtttctttctctgtagcagttgacacaactgaatcacaaagtgccctggctgagacctcggaagagttccagccctttacaggtagtcatagaagcttattatcctgcaggttttggagaaaatggtgttttttgctgattaatgaggctttggtaaacacagtagttagaaaggacatggaaggctttctactagtcccatgtttgctggacactggggaaacaagttgaataaaccatcgattctgtctagaggagctcccagtcaagttggaggacataggagtagaagtatggctttatctgtcacaaagagagatgcatgcttatgagaggtactgaggagtcatagctagaacagattacctgaccagatgagtaggatcttagaaagggtcttacaataattaaattatgttggagttcaaaatgaatgctttcaaggaattctaaattaagggccagggcaagaatctttgtcttatcctagtggcttttgttgttgactgcttgattgatggagaagatctcactatgttgcccaggttggactcaaactcctgggcacaagcaatcctcccaccttgggcttccaaagtgcccggatcacagatgtgagccaccacgccaagcccttggtggcttttggatatggctaaactcagttgcacttctgaataggagccagaaaaatattctaaagtggtatgatagcacatgataacctctatctccttaaaccagactttttgttattgactgcccttccaggggtgggtgataatgcttatccttgaaaaagttaaccttcagctgaagctgcatatgcttattacaatgcaaatctgattctagtcacttgataaactccttcagtttttcaccttaacgtttggataaaatctaagcttctagaagctcggctgttgttcagcttttcagctcatcttctcatacctcacaggctatcctgctgacatctcaaatcaatttgcagttcccagaattgccttgattttctttggtttgcttttgcctgttcatcttccttaaggtcttaccgtctctggtaccctgggtacctctactcatttgttctagctccttgaggtttccaggttcccaaattctattctattcttttctttctttctttctttttttttttttttttgacagagtctcactctgtctctaggctggagtacagtggcataatcatgggtcactgcagttttgatctcctgggctcaggtgattctcccatttcagcctccaagtagttgggacaacaagtgtgcgccaccatgcctggctaatttttgtattttttgtagaggcgaggttttgccatgtttcccaagctggcctcaaactcctgagctgaagcaatccacctgcctcagccttccaaaatgctgggattacaggtgtgagccaccgcacttggcctgggttctcaaattcttgtataaatggcatgcatgcctgcatagttcttgctcacctggttcttcctcagtttaagacctttgatttaagaggggaggacatgttttaaactgtttttttgttttgttattgttgttattgatgcatcctcgaagactggaaattataatcattgagctttactgtaaattaaaattgtctttttttttttgagacagagtctcgctctgtcacccaggctggagtgcagtggtgtgatctccgctcactgcaacctctgcctcccaggttcaaacgattctcctgcctcagcctcctgagtagctgggattacaggtgtgtgacaccacaggcccagctaatttttgtatttttagtagagatggggtttcaccatgttggttaggctgatttcaaacttctgacctcgtgatccacccaccttggcctcccaaagtgctgggattataggcgtgagccaccaggcctggccgcctcctctttttaaaaaatattttattaccttaatatatatttgtatagcttagcatcttgttaggttttacttggagaagtactttttttttgaaagcattgatttggctgggtgcagtggctcaagcctgtaatcccaacactttgggaggccgaggtgggcggatcacaaggtcaggagatcgagaccatcctggctaacacggtgaaaccccgtctctactaaaaatacaaaaaattaggcgagtgtggtggaaggcgcctgtagtcccagctactccagaagctgaggcaggagaatggcgtgaacccgggaggcggagcttgcagtgagccaaggtcgtgccactgcactccagcctgggcgacagagcgagactccatctcaaaaaaaaaaacatttaaaaaagcaaagatttttttatctttcattaataaatacttgttttaactgctttataaatttttaatttgcataatttttataaataattacccagtcagcataggaaagtgaaatactgagttgtgaacttgctcagtcttcgctcccttctcctattttatttatagactgcaatatgcttttctcctttttagttgccagtttttcaatttagaataaattagttaaagagaagaaaacattatactgcagaagaggctgctactaaagtagaatgatcagctccagtaatctttgaacccaggtggtcaagtttcttccatttattgagcacctactacgtatcagggattatatagatgtttgaggtgccttagtgggcaaaaccaattaaataaacgtaagcttttagagcttacattctggcagaggtagacagaaaataatacacatactatataaactatagaattttagaagtataggtattatgagaaaaaacagaataatacacatataaactatagaatttagaagtataggctttatgagaaaaaacagaataatacacatattaactatagaattttagaagtataggttttatgagatgagacatatgggtagggtaggaggacagggattggaggcaggtgataattttgttttttgtttatttggttggttttgaggcggagtcttgttccgtccagcccaggctggagtgcagtggcgtgatcttggctcattgcaacctctgcctcagcctcctgagtagctgggactacaggggcgcaccatcacgcccagctagtttttgtatttttaaagtagagatggggttttgccatattggccaggctggtcttgaactccggggctcaagccatccacctgccttggcctcccaaagtgctagaattacaggcgtgagccaccgtgcatggcctgataattttaaataggagttaggatagaccccattgagaatgtaacatttaagtaaaacttgaagtaagggaattacccatatggacataggggcaagagcattctgggtaagaagaacctggcttgagtgaagcagtcaagggagagaagcaggagatgggtcagcgagggaactggggagggccagattatataaggtctgtaggccattgggaggacttaagttttcagtttgagtgaaattagagagttttaaacagagaagtgtctcttgaagaacttcacatactatatcttgaattattcacctcttggtatgaaatttgttgtgtctttaacatatttcagatgtgcgtatgatattgatatttaagccagttggctctgcatgtatttatggttaaggctgctcctacatgtgcctaaatttgttggtgtagggtccttctcccacacctgaggatgtctccatgaaggaagagaatctctgccaagctttttctgatgccttgctctgcaaaatcgaggacattgataacgaagattgggagaaccctcagctctgcagtgactacgttaaggatatctatcagtatctcaggcagctggaggtaggtgggcctttgtgttttggttgtataagcaatgtggaatttaccacacagctgggaagcaaacaaggtcagctttttaaacttttgattctacccacaggttttgcagtccataaacccacatttcttagatggaagagatataaatggacgcatgcgtgccatcctagtggattggctggtacaagtccactccaagtttaggcttctgcaggagactctgtacatgtgcgttggcattatggatcgatttttacaggtaggtgtggcttcagggacttcacgccagtggctcattgaacattgcatttatgcttgggggatagaaaactaaagtgggtacttctgaaaaaaagaccaaaaatcaaattgtgagaagccaaagaactttggggactaaaaagggaagtaatccaagtgtgtcaagcctttgatgatgcggaccaataatgggcatttctgtaaggccagccagctaaaaagtacttgggggaaatattgcattgccacaatccttcatcagaggaaatataccatcagttgggctgaaagtccatctgaagcctgtagtgcctttggatgctggttttctgggcctgcttgcacaatttccatagtttggtgctctggtgttaagtttcctcatctgaaaaacgatgagtttggctggagaacctccacatttccagccaactatgtcattgaatcactgtagaagaagaaggtggcagtatttgttttttttaaaggagcaggggttgtgtgtggagtggactgagaatgtagtgtaataaagagtaatataagaaaataagaggcaaacataatcttcagcatatttatgagtgggtaatgcacagcccctgacctgttagaagagacagcagatataaattgccagtgtgttatctaccaaacaatagccctgcagataaggttttatttatttaaagtcaacattcaggataggggtttaggtcaggcacaaattctgtccaaacaatgtaataaaaattactttacaataatgaccctgagatactacaaaatcccaggtagcatgcattcctctttgggcaggaaagcacaacagtattttaggtaggtttctttattttttatttttttgagacagggttttattctgttgttgcccacgctggagtgcagtgacacaatctgggctcactgtagcctcaatttcctgggttcaatcaatccttctacctcagcttcccaagtagctgggactataggcatatgctaccacgcccagctaagtttttgatttttttatagagatggggttttgccatgttgctcaggctggtctcgaactccttagctcaagtgatctgcccacctcggcctcccaaagtgttgggattataggcatgagccactgtgcccatccgtggtagatttttaataatgagagttgaagcaagaaaagtacagagtttgggaggaaaaaaaaaaagcaattaagggaaacgctttaccctagcctgagagtctgcctgactccaaagcattagcgaaagattttctaagctgaataatgggtatgcttttggtaaggattaaggaaatgagccatccattaaattctcacttttttctttggcctcatttctattcagaccatgtttagtgtgtcaggccagggctgccacagatactcaagtcagcatgaggttgtgggaagggtgactaggagcttggtattcaggcttggattcttcccttcttggcaattgaatgatcttggcatggtgtctgaatctgttctcaggacatctatttgtaattgaggaataaaatatgcctttcctagaatttttatgaggattgggtgagataatatgttagaatcttagcactgtgcctagcacacagtgctcaattacagatagctgtcatgatcagtggtagaacagtcaggtctcctgtgcccttatgagcaaagacaatgtgcacttttccaggacttggtttcctttccccttctcccacctaaagcttcactcttcttgttaggtgtgacttttgttacattaattttccattaggttcagccagtttcccggaagaagcttcaattagttgggattactgctctgctcttggcttccaagtatgaggagatgttttctccaaatattgaagactttgtttacatcacagacaatgcttataccagttcccaaatccgagaaatggaaactctaattttgaaagaattgaaatttgagttgggtcgacccttgccactacacttcttaaggcgagcatcaaaagccggggaggtaagtgcctccagctctgtaagagactatttttgcttggtgtctcatcccagaaaccttgacctaatttaaggaaagcttatttataggacgcttcctttaggtaagtcttaatgctttcctcatcagttcttaagagaaaaggcctcatgatctatgtttacaacatagtgtggaatagagtaattcttgagaaggataagtgagtcaagtgaattggagttcctaggccttcacgcagaattttgcaagacagtaattacacttgtgattcttactatcccttgctgttctttcttaggttgatgttgaacagcacactttagccaagtatttgatggagctgactctcatcgactatgatatggtgcattatcatccttctaaggtagcagcagctgcttcctgcttgtctcagaaggttctaggacaaggaaaatgggtgagtggtggatttaagaagaaactaattaggctatattttagtccttcgtaatacaaaaggccttagcatttttacaacactatccttgaagcagttggttttgttttgtgtttttgagacagggtctcattctgtcacgtaggctggagtgtggtggtgccatcacagcccactgcagccttgacttcccaggctcaagtaatcctcctacctcagcctcccgagtagcagggactacaggcatgcatgaccatgcctcgctaatttttgtaaatttttttgtagagacagggttttgccatgttgtctaggctagccttgaactcggctcaagcagtctgcccaccttggcctcccaaagtgctaggatttcaggtgtgagccacagtgcctggcctgaagcaattgtttaaagtccaaagtcctaaaggaaaactacttggagaggggcatgggggcttgtgcttgtagttctagctacttgggaggctgagggaggaggatcatttgagcccaggcccaggagttcaagtctatcctggggaacacagagagacccttgtctcttgggaaagaaagcaagcaagctgcttggaacagttcacatagaagtgagttgactatacatactaaggtgcatgtgtgcagtatagagttgtacagaatgaggaaggccactaagaactgacatgtatgatttcttagatattacgttaagtgaaacaagcaagttgtcaagcacacaagacaaaggaaggccaaggcctgactgatttagccagtaagaatagaatgagccacttgtagatttagaagagtagccaaggatggcagctcctcgggtctttgtttcacatggcaaaaaggataatgtggaaacaaatggagctggatggctgcaatgcaagtcacaggtacactgttgtggagaagccagttctagaccaccgctaaacagtcttctagtctgcagttataccctgagagcagtacaatagaaaacctcatcagaacctaggggatacgaagctgtcttggccgggtgccatgccagtaatcccagcactttgggaagccaaggtggacagatcacctgaggtcaggagtttgagaccagcctggccaacatggcaaaacccccgtctctactaaaaatacaaaaattagccaggcatggtggcagctgcctgtaatccaggctactctggaggcctaggcataagaatcacttgaacccggaagacaaaagttgctttgagccaagatcgtgctactgcactccagcctggcggacagggcgagactctgtctccaaaaaaaatataaaaaagaagaagttgtctcgtgacagcctcccaggggagatagggaggtgagtgggagatggctgggcggcagctctgcccacacctgccatctcctcctttttcaggaggatcacaaagcattttgccaggacagatcagctgtggttcaggccttggcctgtgtggcctatatggatataggcaaggtcaccagggcagcatggtggagctgttcacctaaacaatgtatattgtagtttacattttatgcaagaaagtgtgtgtatgtatatatatttatatatttgttaattttttggtacgggaggaataaaccagaaagaatgaaagtggaaactatggggttctttgggaatagggtggaggttgaggatgagaggacttctgattgtaaccttttattgactttataatacagtgtaacttttttgacttttgaacaatgtaaatattttatgcaaactttaaattgtaattaagtggaaataaacaatgtaactacatgtgaaattggtaacagaacacagaggaaagaattaatttaagtacttgttgcttgagcccagcctgggtagcgtagcaagacccccatctctataaaaaattaaaaaattagctgggtatggtggcacacacctgtagtcctagttactcaggaggctgaggcaggaggattgcttgagcccaggagttcaaggctgaagtagctatgatcctgccagtgcactccaacctgggcaacagagcaaaaccctgtctccaaaaaaaaaaaaaaaaacaaatctgtaacctgaacacagcattctgactgtgcatccttagtgggatttaaagtatgacaaaataaaggactaaagtggtaacatcaagtttacttagtaggttcattgttaatagtaatctgttattataattttggaactagtttatgtgtattgtaggataaaacaaatttattcatgttattaaggactaaaattttcaatataggaagagttttaaattattaattcattaattttttcttatacagggtcttgctttgtcatccaggctggagtgcagtgctgctgtcacagctcactgcagcctcaattgcctgggctcaagtgatcctcccacttcagcctcccacgtaactgggacccagccacacgccatcatgcctggctaattttaaagtttttttgtagagattagctctccctgtgttgcccaggctggtctcgaactcctaggctcaagtgatcttctcgccttggcctcccaaagtgctgggattacagacgtgagccactgtgcctggcctaagagagaaaatattaacaattaaaaacaaaaggttagtcctcacgtaggaaatagcaaaacaaaaacaaaggaaaacccctattatgttttggaaataacagcaaattcataataaagggtctcagaaacagtgacaactcagtagtagtgagcatatttagtgcccacatcttggatactaaataccattatctactggcaactagggctgtttagtgaaattgctgatttcagggctatggcaggggaagtacaaggtgagcctagaacaatttgtgccagatagcacacaaattctcaaagatcaatgaggtcacatcaaaaggacataggagagctggtcatggtagcatgtgcctatagtcccagatactcaggaggctgaggcaggatcccttgagcccaggagttggaggctgcattgacctatgattgcaccacaataaaataggaaggaagggaaggagggagataggaactggcttgaaaggactctggctgactgaattagagcattaaaaagaataatgacagtaatagattatagtgtataaaaaaaaggattcctgggaccataatgacataaaaaataaaagaggggttcatttttaaaaatcagaataccagctaattaaagtagaatgatagagttagaaaccactaattttcaacctgtaatgtaataatttattcaagcaaggtgcatcaatgaatgcaaaaatcattagatggaataattttgggaaacaagattcacgtggtctcaatttatcatcccatagatacttattaattctgtaacaaaactgcacatctatgatgaagtggtctggtggtttccaccttcacccagtgattaagctcagcattaccactggcagacgacctgagttgccatgccgtgttgtgcagtaagatgtatacattatcacctattcatgcccaaaatgtttgacatgaattaaatcttgaggaaatatgcaaatccagaatgtgagacattttaaaaggaactgcctcgatgcttaaaaaaaaaaagtcactggtgacagtgtttcttatgtgagaatggtgttatggataggtacgaaaacgtactttttagaatatgcttctgaaacatttagcagggatgtgctgtgatatctgcaaatcgctttcaaatggcatagcaaaaattgtgtgtgagtatacacagagagggagaggagggaaacgtggcacatgttcatgattgatcagtctacatgaaggatatatagaggatcattctttcagtttttctgtagatttggaattttttgaaataaataaaacatttgaggcaaaaatgtcactggtacatggtaccaatggctcatttttagtcaccttactcttaaatgtgcttcgctctcccagttttctgagaatttatttcaaaaggctagaaattgtgcattatttcagtttttactcgtttcctctttcttcccttcaaagtattttaggattaaattgtgtagactgggcacagtggctcacacctgtagtttcagcagttttggaggctgaggcagacagattgcttgagcccagcagtttgagaccagctgggcaacatggcgaaacctcgcctccacaaaaaaacagagaaactggctgggcgcagtggctcatgcctgtagtcccagcactttgggaggctgaggcgggtggatcacttgaggccaggagtttgagaccagcctagccaacatggtaaaactctgtctctattaaaaatacaaaaattagctgggcgtggtggcacatgcctgtagtctcagctacccaggaggctgagacacgagaattgcctaaacccggaaggtagacgttgcagtgagcagacattgcaccactgcactccagcctgggcgacagaatgagactctgtctcaaaaaaaaaaaaaaaaaaaaaaaaaaaaaaggagaaattacccaggcatggtggcatacacctatagtttcagctactagggaggttgaggtgggaggatcacttgagcccaggatgtcacggctgcagtgagctttgatagtgccactgcactccagcctgggcaacagagttgagacccggtcttcaaagaaaaaaagagattaaattgtggtttattttgccaattataccatgcatatgaaaaaaacgtactttcgcttttagaatttttgtcacagaactcttaaataaagtcagttgacatatctttttttttttttttttttttttttgagacagagtctttctctgtcacccagactggagtgcagtggtgcgatctcagctcactgcagcctctgcctcccgggttccagcgattctcctgcctcaggcgcacaccaccatgcccggggaatttatgtatttttagtagagatggggtttcaccatgttggtcaggctggtctcgaactcctgacctcaggtgatccgcccacctcggcctcccaaagtgttgggattacaggcgtgagccactgcgcctggccttttttttttttctttttttttcttttttttttgagacagggtctcactgtgttgcccaggctggagtgcaatggcgttaatatcgctcattacctcaaacttctgggctcaagcaatccttcctcctcagctcctcaagtaactgggactataggtgtacaccaccaagcttggctaatttttcatttttcatagagatagggtctcccaatgttacccaagctggtctgaaactcttaagctcaagcgatcttcttgccttggcctccgaaagtgctgggattataggcgtgagccactgtgccccgccaatttatatatcttcttacatgatacatcttattatcaattgacagctgttcttttacttgaattttactctttgggaggctaggtcacaaggcttggtgtggtagtgtctaagttctctctgctgtttggtgcttaactacacagggttcaacaagagaatcataggtagtcctagttcttctggatttgatagattgttgcttgtagcacagtttatttcttatttccgaacatctttccctgactgacagtatgtctgtttgggctcttgagctcataacagggacagctgggcagggctttgatgcagggttgtgtgagatgtggccagcactgtaaaggggcactttgttttaagtgtctccttttccatcccctttcagtgttgttacttgaaggactcttacctgtgcaacgtctttgaaagatcgtatgggacctttggcacttgatttagtctggtctcagggccagaatcatcttgcatttaccagctgctttagtgttgctggtactgtgagagtggttagggctttgattgaatttccagaaggtaagaatattcttgtacagcttttacataagtaatgtcatcatgtacaagatgtgttcttctaaagaagcagaggttttctcttgcccctcagtcatgtctgtctgtctgcttcttgtgtttcagaacttaaagcagcagtattacacaggatacacagagaatgaagtattggaagtcatgcagcacatggccaagaatgtggtgaaagtaaatgaaaacttaactaaattcatcgtaagtactactgttttcttaagctgtggaaagctttaggttctgggttttgtgtgtatgttgggcgggggggggcggtgtgtgccgtcatgtaaatatattaataacatgtgggagttttagcacaaatcctttatcctttatatttttctggtacagtatggtatggagcatactgataaaccctgaaagcaagctttatttgaaacaaggtcgataggctagccatgtccaggcccagatcccagtcaaccagtcggttactcaatgtattgaattactctgtgcttatactagcatcctggggagggcactttgcaagcagggaaggctggtctgcatgtgattgggaagagagagggcccacttcaaatggcggtgtattatattgcgtattcaggtgatgttactcagagcctttgtccagggtcttttgaggcaatgatggaaaaacgcctaattagcaagcatggttaagagggaagaggcccattcagggggcatcctgagggcatggtgtctatctctgcatggcccacctatgaggaggagccaaaggagacttagtgctgtcctgtgcttgtgtgacaccaaacatcagagctcaccaagtgtgtggtggcaaagagcaaggtatttgaacctcagaagagtctcaagtgtcctcacaacatgatttgcttcatggaagtgtaatatgtgttcagtcctgagaggactgtctgggatttgttaagcactagttgccaccctcttttattgtcttttattgtcttttaattgttcctattgctgccaggcctggtgaacctgttatgtcctgatggcacttaggtgtcgtaaacacagctccccctcccatccctctggtagcctacaagaggaagcctgctacttggaccttgaaatcatttgttcctatcacctgtgctaccagctgtgttttattcattaatggggatggaaggaaatggtcaggcacatgttatgagcccagagctttcactggcttcagcgattgggcatcatcaatgtgatcatgattgtagccgtggacctttgataattgtgagttagactaggaataaggtatcattgggggttcctgacatgtgcttaatcacaaatgacttctgcaggccatcaagaataagtatgcaagcagcaaactcctgaagatcagcatgatccctcagctgaactcaaaagccgtcaaagaccttgcctccccactgataggaaggtcctaggctgccgtggcccctggggatgtgtgcttcattgtgccctttttcttattggtttagaactcttgattttgtacatagtcctctggtctatctcatgaaacctcttctcagaccagttttctaaacatatattgaggaaaaataaagcgattggtttttcttaaggta

SEQ ID NO: 50 - DNA, 51202 bp, Homo sapiens
gtcaggggcgtgttggccccgcacagattgagccgagttgtcgccccgctgggagaagtgaccctcctgcgcctggtgagtacttccctgtttgtcttctcttttcctggcgaacttttacgcgctgtctcggggcctccgcgcctcagcctgagggctccaggagccccccgctctctgaggccccgaagctgaggtttgttgggtctcccggctgcgggagccagtacgctctgcgtttgcctggctgcggcagtcgcgtgctctgattggctcctggggccgtcaaggtgacgttgcgcctgccttcacctgtccacccaagtgcggagagaggggcgacaggtgtgcggggcggttggggctgctggtgtgggcgagctcagctggggaggagggatccagccgctactcgccctgctttaaatccagagcggtatcagagcccgaaggtactgtgggatcttcaggggcaccctcatccctaagcgcctggcacttagagggtctgtttttttctgttcatcatcctcggaaagaattgatgaagtctctggccctgcaaagagaaagagacagacagttattcttgccctctagcaaggtttataggctcttccctgttttttctcccagtccatgcagggtctagaacgcccacatgtgcggaactggggaatagagctggagaccctgcgcgatgccttccgcccacaaccctcagtttggaggactgcccggggagaggctggcaaaagaaagggaaggcttgtagagtgccttggaagtcagaggaaagttttggagggcgtgctcctctatgcagtcacccgtggttcctttcctaatcttttcacaccgagggattgaatgttgtaaatttgagtgctttgtggcatggcatggtggaatagctgatccccagtggttgcaaagagatgattttaggtcagagcctgggttttgcttcgcttgtgtgaagagcaaaaaacaaacaaacaaaaacaacaagaacaacagaaccgctttgtgaattgctatctgatcacctgtcttggcacttaaatgattagaaattgaaattctcaccacctcagattccctttgggaacaaattggaactgtttcaaatgacagaagtggaaactctagtgatctggtgtagatgccgatacctgttgtctgactcatctgtttcaaaatctcattagaaaccaactgtcattgaacagtaggtgtttgctatctgacattgaattagaagtagtaatttttttttttttagcgtgacagagttgctaagcaggggggctctgaaatcagacttcattggatatctgactttagacacattatttaatccttctaagcctaaatttcctagtctgtgaaagaaggttaataatagttcctactttattgagaggattgttgtaaagattaaatgaaattccacgtaactaatttagcacagtgcctgatacatagctattattatttctctgctgtttaacttagacaaaaagttttgagctctccccaaaggatggggagaggtagaaggtgaaggcagtaccagagatagggataattattgtttattgactaaattatacatgtaaagcatttaaaacagtatctgacacatcataaacacgtggattactatttatcaaacacatcattatatatcaggtattgtgttctttacttatattattgttaaacctcttagtaatcctaaaatgtagttcatgttatctctatttttttttttttttttttttttgagacagagtctcgctctgtcgcccatgctggagtgcagtggcgcgatctcggctcactgcaacctctgcctcccgggttcaagcgattctcctgcctcagcctcccgagtagttggactccaggtgtgtgccactacgcccagctgatttttgtattttggtagacacggggtttcaccatgttggccaggatggtctcgatctcttgacgtcgtgttccgcccgactcggcctcccaaagctctgggattacaggcatgagtcaccgcgcctggccgttatctctattttataggggacaaaactgaagctcaaagaagggaaatcacttactagggttcacctggaattcagtgcaggcttttttctgtgttacacacctttatattcctaacattaagtaactttcctgcactggattgtcagtgtgacccagattaatttctgctgtgggtatgggtttattttgaatacattatgaattttaaaataatgagaaataacttgtgatggtaaatcaaaatttgtgataaaagaatagtgtcaacaaaatgcatgctattagtaaaaaaaacagtgatattttggagttttgatgtttggagaatggccacttcagaaatgatgttcctaatttatattttgataaatagaaatgatgtttggagaattggctgtttcaaaagtagtatctcctcatttatattttctcatttaattttcatttattcactatgtttttactaagctactcttcctttttttttcctatcaatttaagtttggagataataggaaaggttcagttatttggatagattactaaagagcttgctgttgatgatgaggaaagtaagagattaaacttaatatgtattcttatgttttactttcttacagtaacgtgtgtattttacttcttattattggttttcatactttgatattagatataccagtacatatctaatgagtcatgcaatggacatagaatgatattagatatacctttacagatctaatgagtcatgcaatggacatagaatctgagaaaataggaaacttgagtctgttggccaatttgtctcacattgagtttcttgatttttaattagagtttagttgtcacagagaaatgcttcagaagtaatgtttatgagatacagaccataattataactgtatttctttaatgtttctcctaaaaactcagaaagtgttttcatttgattacattgttacagagtaggtagggtgttttggttaacagaaagccaccatgtatttcataagggtgttacaaatttccaaagaactagaatgtaataaaatgtagcagcctactaaatgtgatgtcatctttgcctctgtaagcatcctagagtttatagtattatgaccatcagtcatgtgctggatattgctgaagtggtgactcatagagacttccgcctactgtcatacaacataaacgtttctctaagaaagtataatattagctatggtgaagggctcactttatatagatagttagctgttgaaaaaaagtttgatgttcagcatgtcttctttgttacacacacagagaatttagaaaagcactgtgatcccagtaacattacatatactgttctacaggttgcttttgttcacttaacaaaatagacatattttcatatcagtgcatatagctctgtgttattctttgaagtggttaaatgagtctactgtatgaatgtcccattagttatttgagcagttccctgttaatggatagttagatattgttcttatattttttatgttagtgtttatatatgtccccatacattcttttaatctatcatgtgtaaaggcaaactgatcttaagttcgttaaaaaaattgtatgccacaaaatttttgacaaactaaaaattatgtctaatataaaattaagttattcaggttgggtctctgccaaacatttcaaaaggaaaatttcaaataaaaaaagattctcaacaaagtctctatatttttcaaataacatgtaatgttttattaaactgtaaacattttatttttctcttaaaaatctttatctgtaatagaagcatctgttgcatttaggagtaattctagtactaattttaactctgatttcatagtgacatagaagaaatgaagactgttaaccaccttaaggatcttatttttaaaagtatagagtgcagcaaaatagaagcatataatattgctatatccctaaattggggagatgattcagggaagactttggaggaatagaatctagacaggtaagagtgagtctggaaaagaggtgtaagaagagcataggtggatcagcaagtgcgaagacctagaggtgaaagcatggcgcttagaaggatctttaacaagttcactaaggctgaagtgtaagagtcaagagacagggctggtgaggatcctacaaatctttgttagcttggttaaggagtttgggctttatcctgaaaacactgggcaaccattaagggttataagcagggcagtagtaaaatgtccttggatcagagttgtgaaaaaatcattctggctgtggttcatgaagaacagggttgcaaggctggagaaaaggtgactgtttcagtaaacctggagaaggatgatggtggcttgaactagaggagtggctgtaggtattgagaaaatttagaggtagaagcaacaagatatagtcactgttctggctgaggaaagatggggcaggtggaggtgtgagagaggagggaattaagaatgtcctggtaacttagtgaattttaatggtgttccctgagatggtaaacacaggcagcctctgtaaacatataaatgagtgaatggatggatgaatgatagatgtacaaaggcaggaccatttgatgaggaggaggatgatagtaaatacatagtacttgcggtaggtttaacctatcagtttttttcttcttttgcatgctttatatagctggtgctcttttcttcattatttcaacagattaggttagctgcatcttctaattgtatatcatattttggatacatattactttctctaggtcaagtgtcttggcaaatcttcctttcttcacgtaagatgtgtattggcggcagccgtgggaggtccagacacaggtggccatggaactcgctggtaatagaggacacatctcttaactgggttgctctaagaactgatgcctaaaccatctcagcatggcgtataaaggagaaggtgggcatggccagcctccctcagctacactgtctcaggttagccctggaagtctttacacacgtagaacccatacccataatatatgtatggcatctgactttttctacccaaatatgggaggtgtggaaagccacatttaccagctccctcagtgcctgattggaagaggggataaggttataattgtcatccatgcttatggaaatcgaaaaggcatccgttacctcactaatgacctcaaagtctattacttgcctctgaaagtcatgtataaccagtctatggccatgaccctctttcacagtctgccattgctcaagtacatatttgttcaggagagagtcacaataatccattcacatagttcattttctgccatggcccatgatgttctcttccatgccaagacaatggggcttcaaacagtcttaacagaccatcccctttctggatttgctaaggtccattcagtgcttacaaacaaacttctaactgtgtctctttgtgacacaagccgtatcatttgcgtttcttatactagtaaggaaaataccgtactacgagcggcactgattactgaaatagtgtctgtcattcctaacgctgtagatcctattgacttcactccagacccatttagaaggcatgatagtataactattgttgtcagcagacttgtttacagaaagggaacaaatttggttagtggtattatacccaaactcttgtcagaaatattaagatttaaatttcataattggaggagagggaccaaagagaatcattttgcaagaagttccggaaagataccagttgcatgacagggtgcatcttttgggagctttagaacacaagaatgttagaaatgtcttagttcaaggacatatttttcttaatacctcccttactgaagcattctgcatggcgatcatggaagcagccagctgtggtttacaggttgtaagtaccagggttggtggaattcctgaggtgcttccggaaaatcttactattttatgagaaacttcagtaaaatctttgtgtgagggattggaaaaagctattttccaactgaagtcaggggcattgctggctccagaaaatatccgtaacatagtaaagactttccacacctgaaggaatgttgtggagagaactgaaaaagcgtatgaccaagtatcagtggaatctgtgttgccaatggacaaacaactggacagacttatttctcacagtggaccagtaacaggctacatctttgctttgttggctgttttcaacttcctcttcctcattttcttgagatggatgactccagattcttatcattgatactggaatagatgccactgggccaaggggtgcctggactcataaatgttctcacagtaaaagagggggtgagaatattaagatatctaaaaccaggtagaagagagcctacattgtaagattttaaacatttgtaatagttgtattaagactatggaaaataacctgctttttgggggcttgtgttttttattagttttttataagttaatttagtaagttatgctacttctatatcattcaatgttttcttttgaggaaagataaaaacttaggcaattcctgagtgtagaaaccttgcacttatttaaaatttagaagagaacatttaaaccattcaggtattaaatttttcagactactgaaatccctgtagcagagatgttttaacattatattttgagagctttgggtgctgaagggccaaacattttctgggcatttttttggccagtttttaatgttatgccattagttagacactcactagatgtttacaagttttcttcagggaagtacaacaactatatgaactattttaagtcatgtttatatacatttattagaaatctaagtcatgcctttaaacatttattaggttcactcagtaggtgttaacataaaattaacaggttccttgagtaagatagtccatcagttaccagcacattttgagcacctgctatatgtggaatgttgaactagatgcttcctgccgttaaggaccagaaatgcattaactctttatcattcaaatggcttatttcatcatagtcatggttgatataagatatatagcctacatgccaaaaatgctcatgccagttaatgccaggaaaaaaatcaccgacacactactagtacttctttgatcctgttctatgcattctcctaggtagagccttcatcttccattgtgttgatgaagatattttttgctttttaaatactagggactgatatcactgttgatagtgcagagaaaccctccataattaagttttctgtaaaagccttcgtgttttctgagcagaatgtacgaggtgtgccatcccaaaaccagctgctaccctgtccttttaatgtaagtcactctcctttgctgtggccttgctgatgtctgataagtattgtcagtgtgcaaaaggctttatttcagaatgttttatttatagcaaaccaagtctgaaagttttaagaacacagtctttgtgggtggatgttattaactgtaattgttgttgcccagagccatgggttttttaaccccaaattatccacatggtgtgtattattctttgaacttttaaggtttttgtgagaaaaggactgtgaaatcaaaataaggaggcacttgtgggtgcactagatagattccgtcagtattgtgattatgagattttaaaaaatgacaaaattcacaaaacttactactttctaaaaagtaacatgtctgttaactggttgtactgatataaaaagaaatatatttgggttttgtttgcactaaaatgcaaaagcaagagtccagtttttaatatctagaagttagggagttcttttgttggagaaaaatggactgatctaaaccattcattcttgttgagatttttatgtgtaggaactcacatataaacatgaaataaccactgccaatattcacggtaaagtgagaaactataacattattttacttaacaagttttaaaggcataccaccgttttttccttattttttgcttaatttttaaaaattgtcatttaattcttaaattgtcatttatttgagatggaaatgagatttaaagttagttgcctttgcatgtaaaatatataacttgcaaattaaaatatttttatttttttgaacaagtggaagtaaatttgttttacataaatcttaattttcaactttcctagatactgtcacacgtgcccatgttaagagaccaccaaacaggctttgtgtgagcaagaaagcttttcaatcacctgggtgcaggtggactgagtctgaaaaaggagtcagcaaagggagataagggtgggcagttttataggatttgggtaggtagtggaaaattacgtcgaaggtggtttttcccttgcggggcaggggccggagttacaaggtgcttggtggggaacttctgagactcattgtccaggagaaggaatgtgacaaggtcagttgatcaattagggtggggcaggagcaaatcacaatggtggaatgtcatcagttaaggcaggaactgcctattttcacttcttttgtggttcttcagttgcttcaggccatctggatgtatacgtgcaggtcacaggggatatgtgatggcttagcttgggctcagaggcctgacagataccttaattgtaactgtcagtgttgcactggtcagtatttggaaacacattgttctaccctgctacttacattgatttgaaagttaatttacagtgatgaggaatttatgaaaaatatatttcttttgatgtttcaaaaggttgcccatgacaaactgatttgttaaaacatgctacatgttcaaaaataaagaccagaatgacaaaaaaacccagagtgtattagcttctagttacggctgtaacaaattaccacaaatttattggtttaagacgacacatattcattatcttatggtttagaaatcagaactcagggtctttcagtgctaaaaggtgctgacagggttgtgctgtgtttggagcctccaagggagagttcttttcctttcccagtttccgctgacacctgcatattccttggctccctcctccgtcttcacagcctgcagtgtagcacctcagatctctctttgatgctcttccatcatgacttctcctcctgtctctttgcagctgtcctcacatcaccttcggtgactctgacctttctgcatccctcttgtttttctttacccccaagagagggttcttggatctcatgcaagaaagaattcgggacaagtccatagagtaaagcaaaagaaaatttattaagaaagtaaaggaataaagaatggcactccataggcagagcagctctgcatccctcttacaggaactcctgggactacattgggtccactaggaaaatctcccacctcaagagccttaattaatctgaaaggtcccatttgctttgtaaggtcacatattcacaggttctgaggattaggatgtagacaactttgagagccatcattctgtctactacacatggagtttacttaagatgtaaaaatgtttgtgcccactggggcagttgtatgaattcctgagtagctcatttatcagaatccttgccccttggcagagctgttgtcctgttaacttggaacctctgcctacacagaaaccttagtcatttctttctttcttccttccttccttcctttctttcttttttttctctcagctcactgcaacctccacctcccgggttcaagcgattctcctgtctcagcctccctagtagctggaactacaggtgtgtgccaccatgccgactaattttttttgtatttttagtagagacggggcttcaccatgttagccaggatggtcttgatctgatctcataatacatctgccttggcctctcaaagtgctgggattacaggcatttgccaccgcacccagccgtcattttttttcctagtaattcctctggtatatcaggcagctcacttgacatgctagcaccttgaccgtaatcactgtacatattttacctggaatatgttgggtgagaggcaaaattatgtatcaattcaggtcacgtaaataataataagaaataataaatgatatcaaaaaaggtcccccggcagatgctgttcactatgtggctgcttctaaactttactgtcacatttcatcgatagcagaaacattgtggagaagggagacaatcagtttttcctaggggttttcacatttctcctacaaaaactgtttcctaaactccaggcttgaatacttctatcaactctatttccaatagcaacccaggaaaacttatgcttggctaagcagtgtataggaatagctcaaaatagtaaaaggcaccatacaggcaagtaatagggagaaatgtgaattcaagggctaaagatataatcagaattaattcaggccaatcaggaagggctactagaaagaggtgaatcaaaaaagttacaagcctagattagttaagatcatgaagcaactctccaactgtttcttctctgtctcctttgctgactccttcgaagtgtaaatgttggattttcacaggtcttgttcttagacccttgtcacttccttttccatttccctcagatgatgtcattctttccaatggctttaactcccaagtatttgctgacaatttttatctcctcctgaatttttttcttagttctagattcatatttccaactgcctacccgacattcctacttgaatgtcttttttttttttgagacagagtctcgttctgtcactcaggctggagtgcagtggtacaatctaggttcactgcaacctccgcatcccaggttcaagcaattcttctgcctcagcctcccgagtagctgggactatgggtgctgctgccatgcccagctaaattttgtattttcagtagagacagggtttcatcatgttggccaggatggtcttgatttcaagacctcgtgaaccacccaccttggcctcccaaagtgctgggattacaggcctaagccactgtgcttgggccctacttgaatggtttttttttttttttttttttttgagacggagtcttgctctgttgcctaggctggagtgctgtggcgcaatcttgactccctgcaagctctgcctcctgggttcacgccattatcctgcctgagcctcccaagtagctgggactacaggcacccgccaccacacctggctatttttttttttttttttggtatttttagtagagatggggtttcaccgtgttagccaggatggtctcgatcttctgacctcatgatctgcctgccttggcctcccaaagtgctgggattacaggtgtgagccactgtgcctggtcctacttgaatgtttttaaaggcttcctgaaacaaaccaaaacacagcactctttttttttcttcccccaagatggagtcttgagtcttgctctgtcacccaggttggagtgcagtgtagcaatcttggctcactgcaacctgtgcctcctgggttcaagcaattctcctgcctcagcctcccaagtagctgggattacaggtgcccaccaccacacctggctaatttttgtatttttagtagagacggggtttcaccatgttggccaggctggtcttgaactcctgacctcatgatccacccaccttggcctcccaaagtgctgagattacaggcgtgagccaccacacccagccaacacagcactcttgacccatgtatgctgtgtatccagcttcaggttgttcatcaccctcatctcagtaaatgctgcctctgtctctgctcaaattccctaagcctgaaacagtagttcttgacactctgctcttacattcctctcctttaccccatcatctctgacagttgccaaatccgtttgttcttaactccaaatatatgtcagatccatctcctttccagtggagactgttagattctagctcagtcaccattgtttgtcactgaactactgcagtggactcttccctcttccacactactctcccatctcatttcttatacagtgtttctttggctctcaccttttctacccctacttgtttctccttctctcagtgtttccctagttctttttcctacatattcatccacttttcccccttttctctgttaaacgcatcactgtttcactccaccctttctctctcttcctcggatttcctttaaaactgtgaattagatcatgtcgctactctcttagttaaaattcattaggggcttccattgcatttaggataatatctggtgagggacttcaataaaccactgacaacactagacaggtcatcaagacagaaaatcaaccaagaaacaatggatttaaactataccttgggacaaatggacttaacagatatatacagaacatttcatccaacaacagcagacagaatacacattctgttcaacagcgcatggaactttctccaagatagaccatgtaatagggcataaaacgagcctcagtaaatttaggaaaattgaaattatatcaagcactctctcagaccacagaggagtaatactagaaatcaactccaaaaggaaccttcaaaactgtgcaaacacatggaaactcaatagcctgctcctgaatgagcattgggtcaaaaacgaaatcaagatggaaatttaaatgtcatttgaactgaactacagtagtgacacaacctatcaaaacctctaggatacagcaaaggcggtgctaagaggaaagttcattgccccaaacgtgtatatcaaaaagactgaaagagcacaaactaatactcttaaggtcacacctctaaggaaatagagaaacaagaacaaaccaaacccaaacccagcagaaggaaataaccaagatcgtagcagaactaaatgaaattgaaacaaaaaaatacaaaagataaatgaaacaaaaagctggttctttgaaaagataaataaaattgatagaccattggcaagcttaatgaagaaaagaagagaaaaaatccaaataacctcactaagaaacaaaacaggagatattacaactgacaacactgaaatataaaagatcattcaaggctactatgaacacctctatgcacataaactagaaaatctagaagagatggatacattactggaaaaatacaaccctcctagcttaaaacaggaagaattagataccctgaacagaccagtaacaaacagtgagattgaaatggtaattaagaaattaccaacaaaaaagaagtccaggacaagatagattcacaacagaactctaccagacattcaaagaagaattggtaccaatccttttgacacaattccacaagatagagaaagaaggaaccctccccaactcattctatgtagccagcatcaccctaataacaaatccaggaaaggacataaccaaaaaagaaaactacagaccaatatccttgatgaacatagatgctaaaatctttgtaattgacaaaatactagctaactgaatccaacaacatatcaaaaagataaaccaccatgatcaagtgggttttataccagggatgcaaggatggtttaacatatgcgagtcagtaaatgtgatacagcacataaacagaattaaaagcaaaaatcacatgatcatttcagtagatggagaaaaagcattaggcaaaatccagcatccctttctgattaaaactctcagcaaaatcggcatacaaggggcataccttaatataataaaagccatctatggacaaacccacatccaacgtaatgctgaatggggaaaagttgaaagcattccctctgggaactggaacaagacaaggatgcccactctgaccactcctcttcaacctagtactggaagtcctagccagagcagtgagaaaagagaaagaaataaagggcatccaggctgggcgcggtggctcacgcctgtaatcccagcactttgggaggctgaggcgggtggatcacagggtcaggagatcaagaccatcctggctaacatggtgaaaccctgtctctactaaaaatacaaaaaattagccaggtgtggtggtgggcacctgtagtcccagctactcgggaggctgaggcaggagaatggtgtgaacccaggaggtggagcttgcagtgagctgagatcgtgccactgcactccagcctgggtgacagagcgagactccatctcaaaaaaataaaataaaataaaataaagggcatccaaatcggtaaagaggaagtctaactattactgattgctgacgatatgattgtttacctttaaaaccctaaggactcctccagaaagctcttagaacagataaaatattgggggaacccacccccaatatttcagtgtaggttctttctattttccataagtgtcggctgactgagaaataaagagagacagtacaaagagaagagttttacagttgggctgccaggggtgacatcacatatcggtaggcctgtgatgccctcctgagtctcagaccagcaagtttttattaagggtttcaaaagggcagggagtgtaagaacaaggagtaggtacaaagatcacatgcttcaaagggcaaaaaacagaattactaataagggtctaacaaagatcacatgcttctgagggaacagaacaaaggggaaaagcagaactaataagggtctatgttcagcagtgcaggtattgtcttgataaacatcttaacagaaaacagggtttgagagcagagaaccagtctgaccacaaatttaccagggcggagttttttcccaccctagtaagcctgagggttctgcaggagaccagggcatatctctgtccttatctcaactgtgtaagacagacattcccagagcagccatttatagacctccccccaggaacgtattcctttcccagggtattaatattaatattccttgctagaaaaagaacttagcaatatctttcctacttgcacatccatttataggctctctgcaagaagaaaaatatggctctttttgcctgaccccacgggcagtcagaccttatgcttgtcttcccttgttccataaaaatcgctgttattctgttctttttcaaggtgcactgatttcatattgttaaaaaacatgttttacaatcaatttgtagagttaacacaattatcacagtggtcctgaggtgatgtacatcctcagcttacgaagataacaggattaagagattaaagtaaagacaggcataaggaattataaaagtattatttgggaactgataaatgtccatattaatatgaaatcttcacaatttatgttcgtctgctgcggctccctccgtttagggtccctgacttccagcaacaataaaaattcagcaaggtttctggatacaagcttaatgtacacaaatcagtagctcttctatacaccaacagcaaccaaacagagaatcaaatcaagaactcaaccccttttataatagctgcaaaaaaaaaaatgaatatacctaaccaaggagtcaaagacctctacaaggaaaactacaaaacactgctgaaacaaatcatagacaacatgaacaaatggaaatacatcccatgctcatggatgggtagagtcaatattgtgaaaataaccatactgccaaaagcaatctacaaattcaacacaatccccatcgaaataccaccatcattcttcacagaattagaaaaaacaattctaaaattcatatggaaccaaaaaagagcccacatagccaaagcaagactaatcaaaaaagaataaatctggaagcatcacactacctgatttcaaactatattataaggccatggtcaccaaaacagcgtggtacagctacaaacataggcacataggaaatggaacagaatagagaacccagaaataaacccaaatacttacagccaaatcatctttgacaaagcaaacaaaaacataaagtgggggaaaggacacccttttcaacaaatggtgccgggataattggctagccacgtgtaggatcctcatctctcaccttacacaaaaatcaactcaagatggattaaggatttaaacctaagacctgaaactataaaaattctagaagatgacactggaaaaactcttctagacatgggcttaggcaaggatttaatgaccaagaacccaaaagcaaatgcagtaaaacaaagataaatagctgtaacctaattaaactaaggagcttttagtttgtatagcaaaaggaacagtcagcagagtaaacagacaacccacagagtgggagaaaattttcataagctatacatctgacaaaggactaatatccagaatctacaacaaactcagacaaatcagtaagaaaaacccaaacaatctcatcaaaaactgggctaaggacatgaatagacagttctcaaaagaagatatacaaatggccaataaaaataagaaaaaatgctcagtatcactaatgatcagggaaatgcaaatgaaaaccacaatgtgatactacctcactattgcaagaatagccataatcaaaaaatcaaaaaacaatagatgttggcatggatgcggtgaacaaggaacacttctacactgctggtggaaatgtaaactagtacagatgctgtggaaaacagtgtggagattccttaaagaactaaaagtagaactaccttttgatccagcaatcccactactgggtatctacccagaggaaaagaagtcattcgaaaaagatacttgcacatgcatgtttatagcagcaagattcacaattgcaaaatcatggaaacaacccaaatacccatgaataaatgagtacagaaactgtgtgtgcactcccccccaccatatagataatatatgatggaatattatgcagccataaaaaggaatgaattaacagcatttgcagtgacctggatgagattgaagactattattctaagtgaagtaactcaggaatggaaaaccagacattgtgtgttctcactgataggtgggaactatgctatgaggacacaaatgcataagaatgatgcaatggactttggggacttggggggaagagtgggaggggggcaagggatagaagactacaaatatggtgcagtgtatactgctcgggtgatggatgcaccaaaatctcacaaatcaccactaaaaaacttactcatgtaaccaaataccacctgtactccaataacttatagaaaaataaaaaataaaagtaaaaaataaaattatgtattcatttaggtatttgctattttcagtcttctcaactggtatattaaccccataagggcagaaacatgtcttttatgttcatcactgtgtctcttgcctatggcgtctagttcagtaaaggaggtgaataaataaataagcgtataccacatgaaaaaagatcacagcgcaaacagttaaatagccccagaaataagtataacttttagagaggacattgaggagacaggttgaagggaatgaagggactatgttaaataaattcctaaatatttattctagcaaagtgagttgtcagtcacaaatttttatctgagtgtcctgccaattatgatgtgggtattttaaagcttttactctcatttataactatatttatttttgtgttagtaaaagcagctttccaaattatgcctaatgatatctgagtattactagctttgttttcttatctctttaattggataaattatatcaaatgaactacaattatgtctcatcaccatattcataattcatttgttaagtgctaactgtgtatctggtactttataggtatcgtctcatttaattttttacagcagccataagaaggaaatggtcatatttcattttacagatcagaacactgaggctcagagaagttaactactccaaagtcatatagccagtattttctggagctgtaattcaaatcagatgtgttcaataccttctactaccccattgctgtctttatggtgagttattttagtacacattaagaaatacatgaaatatgattggtatagatatattatttctattttctttattaggcagttaggaaacatttaactcaaaattttaaagctaagaaactttttttctgagtaaatcagaaaggatgttttcttcaactatttttctaaatgaagcattaaaaaaggatgaaatattttgacatacagaaaggcatacagactagtataataacacctttgttcttaccgcttatcttgaaataaaatcttactggtacagttgaaaggcccttgtgcattcctccccagggtcattttcctctctcttcctcagtagtaaccgcgatctcaacttgatcctatccttgcagcttgtgtatcttggcgataatctggtggctgagggctgaatggatgggtgacacaatggcaattaatgttattctttttcctgaagaaacttaccttatttctttgcttttttttgtttgctactcttcctggttgacttcagatttgtaacagatggagccatgacattttgaattctccccatcataccgtataacgtgagaaaggattgaaaatgtgtaagtttcagatcctgtatttttgggacgaaggatcggttcagtagttggtgtttttaatcccattatggtatgaagtcaaattagaatgaagagccttaatgcaaataatcttgagtacctcatgactttttaaaaatttttaaagatgagtgggttgggctcaaattctggtcaaatttcaggtggatgagcacattctgtgtttccaacattttcctcggattttaaaagttaagtatagtattcctaactttgtatgatctatgcataagagtgtcttgtgaaagattcccaacaggtttagagtggagtttagacttggttacgtgagaggtcttccctcaccctcgcgaaatctaagggaaaagacttcctcaagttggcaaagaattgaaataggcttcttcaaaaagacagaaagacaaaaacaaaaaataaggacaatatgttgctaattaagatgcaaaattaaatgttactggttcagtgtaactgatttatatgaaacaaatagagatttttagggaatgatagaaaagaggaaaataggtaataaaatgaaggagaagcaagaaatgtgattgtgatagtatcgaggactggggctaaaaaggtactcttgggaataaatgcctgagacacaaaaatatcttggaaagatgatagtgaatgactagaaaataccaaagactggctcttagtatctgttatatagtgagtacttattacttaattgatgattgactgataaaatctcatcaatgaaaagcacatgctcatgtatattatagcttttcatgtatgaagatacataataacttctctgcatactattttttaaagaatttgttttttaaagttaatccagatggttatatttttgtcatcttaaaagtagttttttctgttatgcaagaaggatgattttaaaaatgtatgtgaagactcttgctaaagttcaagtgaccaaatattgtgcataaattctttatttctttcataaaactaattttgttgaattttccataaaaagtgcagcgactaaacattcttgtgatagcttctttgtgaatgtgtcactgttcttgatttgcacacgccttataatttaggctttcttttgttttgggctggcagctccaactgttaaagctcttgtctgattatgtggaactccattttaataggagcagcttctttgctgcatttttaaaaaatggtcttggaagcttcttacttccgagaagtggatctttgttgcggacaaaggattatttatgctaaaggaaaatgtattccccactgaattagctcgtgggaagcataacaagctcattaggaatgctcacttgtactttggccttttgctgtggtggagagaagggaaaatgacatcaaaaaggacattctgttgtcttttgccttcctgcaaagaaaatgtgttataatattaggcttttcagtatggtttagctcaggttcaactttggtactagaagaaatgttcctgaaaggaaagtggtatgtatagttgacactgtgcatgaggtatgtctgatataacttagaggaaaaaataactttttcttggaaagtaatagcattatagctttgtaattattatatattttttcttaaaatattttaaagatggtttataataaaactagactagcttattatgctgctatgagcaataaaaaatcctaggtttttatagtctatactgttgaatgtttttaaactcttcacttttatccctttgaaaatataggaaagaattgcatttacctaattcaatgaattaaagtattttttttccatgtagatttcaagaatactactttggagctaaaattgctgtttcttctttgtctttgggaaattattatggggaggcattgagcattttggttcacagttaaaattgatgtttatctttattagcagaataagcttatagtcaagtttgtgaatttatgcaaagtgcatatgacctgttaggactttgatgacagtcagataaaagatacttgactttcaatatcagttgttgtaatatttatatttacattatattcacaggggaaaataaaattctgggagacttttatatgagctaagttttgttgattttttttcaaaactgtccagatggttcaagaattactttgatgctaatgccagaaaatacatattatattaaagtctgtttcaggttttcctttttcaaatgagtagtcctttatgaagtaaaaaggagtgatatgaattttcttatactcagacttttctaactagaagaaaaagttttgcgtttgcagtcgagtaaacacattcctaaatcttgtaatttgggggtttgggggagtagcaaaactgccactgttaactgtatgttaatattttgttcttttttcagaaaagaaatttcatttcaatataggtgactatgcagcctgcaattcaagtaagtttttttcttggaaacaatatttaaattatgagattaatataattgaactgtaataattagcaaagataaaattatcacagtgttcttattgtgctagtttttttaagcatcacattttaataacacatactatattttgactttctagttctcaaaaacgttcaattctaagcttttgtttatactgaatatttgtaaaattcaaaaataccttagggttatctcttctcagccttttggctaagatcaagtgtaaaaataccttagggttggtaggtctgtcttatttataccactgtgggaaaagaggtggaatattttgtggttttcccctcattacaatttagtatgtatttacagttaaaagagctttcagtgaaaacaaatatatgtttttaaatttcagatagttgttcatgtgctctataaatgcctgtatatgactggccattaaaattttaaagagtgggtttttttttttttgttttgttttttgtggaggggtgcaagctgggtataatgagacaatcagaatagccttatatctgaatgatttccagagttggtgtttgctatattattcttattttttaagttttctttcttttgtataaaaagaacatgattgaatattaacttaaaaataaaagtcacattgaaggtctgcctggaaagaagcaagcaactgataataaaatttgccttgggaagtaaaaacttgcatcaattagatttcagttctgatcctagttctgcccctttgattctgagattctggcaagttatcttacttctgagtctctgcttccttacctctatggtgaggataatagtgattaacttgagggtagttttgaggaatcaatgagataacatgtgcaaatggactgctagaatatatattgcctgtaagcacgtcagaagtttggttgtatccttgatatgataaaattttccagatataaacctagagatagtacctgtgtcataaaagtcagtctttccttcccctcctccttcttctcttctttcctttcctttcccttatcaatttaacagtggatgacagcctagagaagagaatttatcaaatggttaagaacagccctgcatgtgaccctgttgtccaccttcctatattctgcagctgtagtctcctactctactaaatacagttccatcatacttttccttttgggactggggagtccatgactgtctcccagaaggtcttattcttcccctttgggtcctctcacatccacttgcatatgcttagaactctgttattactcaaaatcatttttgacctgattacttctattcatcccctttttatccagtctcaggaatgtcatagtttcttatcaattatattttctagattccttatagagtgttttctattgttgccacattgcccatgttttttcttatttctacactaatggccatttatattttcttaacatggtagattctttcatagtttgtctaatgatttcataaaatcttctctgatccagattccaagatctgtctttactgatttttttttccaagactatcctcccttcacatgtctcatggaggtttttgctgctgcatgtgaggacttcccaggatttccacctctttctctgccaattatattagacagttacttggttattaagtgccttgcagagaggagacatccagtgaatagctgttattaattgatgtcttactaatttaatacttcaagatatttcttgccattcatctgtgtccttcattctgattaataaataaacatataaaagccaatggacaatagttcttaacctttctggggtcatagtcccatttgaaaacctgacaaaggctatgaagtcactctctgtgaaaaggcccatttgtatataggcataaaattttgcctaaatgtaagcaagtgcaagtacctaagttaatctgtagagtacccatgaattaaatatctcttaatgacaatatgacagctttcagcatgtttgagaacaatcttcatacatgcagtttttgttaatatctgacttttaatactaatttctactgactagcccaggttattactaaagtcgtctgcttgcaataataggaaaatccaacatgtactcttctctctaatgtgacaagaagtaaaaatgacttcttaaaaaatgttagcatctccattttcatacatgattttaaaaaaaccaccctcttaatttatgcccttctttccttgacaaacatttacatctgctctgctttttttcagctcaaccagatggttaatggacaaataacatattccattgactgtcaaatacaattgattgtaagatacattttgattttgatggtacaaagagtcatttgctaatatctattcctcaattattgaacaaatatgtttgaatactatgtggtaagcattacactgagtctcaggattataatagaaataaaatatgcttataaagggaagaattagtaaagcgttactgtacttccttggaaataattttaagagaattcagggaaataaataacatcattttcctattcataggatcctcatatatttaggaattcattgcccaatccctaccttaattcctgaagtaaatgtcccttaaataacttacatttcttttttgtctttgatggggtttttaaatttacttttattttattttttattttttattagatttccctacccctgcatgcttcttgagtgtattcattttctttgtttgccttggggttaaaaacaaaaaaaaaacttgtttatttctcatcatgggagattggaagtagtttcccccattccccgccaccagtttgttgcattacctatggcattgctatagcttttgatctggtatagtaagacttgcctcaaattaacctcaataagcttagtatattttaagaggaaaatggtctatatttaaaaatcaagaaaggactagattcacttggtattccttttacttacagttcttttttaaaagtttggtttttttaaaaaaaaattttaaagccatcacagactacagagtagttaagtgtagtacaaagaaatttgtttgcctgagccatttgagaggaagtggcgactctaatgcactattacctctgaatattttagtgtgtatttctcaaaaacaaggacatcttcctacacaaccacaatgaaatagtcagaatcaggatattaatgctgcttctgtactaccatttaatacgcaggccactttcaagtgttgccagttgtctcaataataaccagctcagaattatgtgttgcatttagttttcatgtctctttagttattaggctggaacagtatctcagtctttgcttgtctttaattaccttgatacttttgaatattcccgaccacttattttgtagaatgtccctcaatttggatttgcttgatgttttttcatgactaaactcaggttatgcatcttgggcaggaatttttatcattgcctcctatcaggtagcatatgattttgatttgtcccattattgatagagttcacctccattatttggttccgatgctgtctgtcaggtttctgaactgtaaaattactccttttccctttgtagtattttttatgcaggtactttgaaactatgtaaaaatcccattcttgttaaaatttcagtgtattcatttatatctgtgttaactcatagtttcctattttattcagtgtggtataatccattcctatcatttatctcaatgctcaaattgccctcagttcagccagtagaagtcccttcatgctggcttatgtgtccttttggcattctttgagagtttctttactttcagataagagatatttgaattcaacaccaaaggattcattcttacttctctcattccatatttgtacctgtcttcagtgagaagattggctcccatttgataaatcctcatgtgtgttaccattcttttattgttgctgccactcacaccctgggtagatgctcagctcacttggactctgacactctgtattgggacgttccccctttgcacctgttagatgccctctttatcctactcagggcctgacatcttgcacagggctgtccccatacccggatgcccactcacctcactcatgctctgactctccattccaagccaccccactcttggaatctcctatgcgtttctcttaggctctaatattcctttctaagttgttcagtaaggagaaggacaagagatatttatatctgttttaaaaagtgacttcataatgacatgattacttcttttaccatctgaagaattgatacagccttttctatgaataatcttacattaaagaataatcatatttcaaaatttggcaagtgtcgattataacatctataaaattataaaatttatagagtgtcagtttttattctaaactctcagttgttcaggtagtatttcatgctttgtggaccagtaggcaaaattgagatactacgcagttacttatataacaaccattttaaaatgtacaaactattcttagcttctgggcttacaaaataggtgagacaagatttgccccatggactatagtttgccacccacttgttttaaactaaagtacttagaaatttttttaaagataacactgttattatgatttgaagtttacaaaatgccatttatgcttcattcattcatttattcattcattcaacaaatgtttattgagtctctgctatctgctaggctcaatgccagatgctacaaacatgtattttataaggcaggaatcactaacccatcttacagctaggatgttaagactctggtcaagtaacttgttaaacttactcagctaacaagtgaaggaaaaatattatttgttgaattctaccctcttggctcaatagtagaatccattcattaattcggggttttcttacattgaccacagtattgaatattgaaaatgtcttggctgggcacagtggctcatgcctataatcccagcactttgggagtctgatgtggaaggatcgcttgagtccaggagttcaagaccagcctgggcaacatagggtgaccacatctctgcaatacataaaattaaaaacttagctgggtgtggtggcatgtgcctgtgctctcagctactcgggaggctgaggtgggaggattgcttgagcctgggagtcaaggctgcagtgaaccataatcgcatcactgcactctagcctgggcaacagaataggactaatactttgcttctaatttatatatttgctgtgagccacagcagctttttatatgtgtctattatgtatgatttatgcttcatcatttaaatattgatgtggattatgatgacttttagcaaaggttttattcattcagttgattgattttttttttctttaggtatggtttggagaagatctgcctctaagtcctcggagtcctctgactcccagacacggaccaggattggctaatgtttgtcagtacgatgagtggatagctgtgaggcatgaagccactttgttgcccatgcaagaagatctgtcaatctggttatctggtttattaggtgaggcttgaaacaatacccaaaattgtattatcttattcaatatgcatttattgagagccttactctttgtcaaggagtgattgttacagatgctggggatactccagtgaatgaaatattcagtgcccttggtctcacccaggttacatttcagctggggaaatagtctgattcaccctgaaccttgggtcttgaatagtaggaaatttgcgatttaaccgaagaggtcagtaagctttgaataatgaacattttcactgttaatattaaaatcatctttaaaaattgtattggtctaatttttttttttactgatttcctcctgcctcgacccaccttagtcttgtataagccatgaactttgagtgaaacatatactgtaggttaaatgattacaatttttgaggcattgaaggatacagccatatgaaacctaggaagaaatgtcaggttggagaatggcattgtattttttactctattagagaatatgatgaatgctttaagctttctccccagaaaaattttactttaaataattttatgtagaattctaaagttttcctgaaaaagaatatcttaaaagatacagctcttccaagataattaaataccaaatacccactgtagttgtctattatcagtttgatggataatatttagagtttattatgtaataataatgtttttaaagaagacattctagaagtaaaaagttagtattccctgggtatttgttatggtattgtctttaattttaaaattgcaaccaagtccatcttatttatagagactgtttttcttgtgcaaggaatattaatatgcagtgaatttatttcattttaaatgaaataaaatcgatgtcagtttttctgtacttctacattacagatatttttgtttcagtatcattaagttaactggccattatttgctattttaactgtaccttctaagagtaagtatttagagtctgatctgatatttttctagtgttttgctgtaatctgattctatttaattaattttaaccatattgtttttatgtttctagaagattcttaactttgaaatatgtttttaggtattaaagttaaggcagaaaaattattggaagaacttgataatggagtactattatgtcaactgattgatgttcttcaaaacatggtgaaaacatgcaactctgaagaatcaggggtaagtaaatgttcgacagtattgattttatgtcttggtacatattaatttatgtacacttcttatctctagaaggttgtaaacttccatgccaactggctatgagatgttgaataatttacttaacccttttcaagatctggaaaaatgttctctttcataaaatgagattagatgttgaataatttacttaacccttttcaagatctggaaaaatgttctctttcataaaatgagattaacagttccttaggatttatttgtgagagttcaatcaaattaaatgggtgaatgtatagatagtgtctaacatagtgcttgatgcatagtagatccagctcttcttgagaacattaacataacttccttgtagaattgttgtgagggttaaatgggaaaagagcttgtgatggttcctggcacacaagtagcagctgctattattattattttcttctttatatattctccatatattgcattagtggtaaattttataaatattgattggataaataatacattttttagacagttttcattcattaaccctgaagtcatgatttgaagtagataaggtttcctgtcttttcatcaaatgtaggtattctcaagagtttggagtctggaaatttacacacagttggtggaaatataaaggagtatcatcattctgggggatagtggatgatatgtgtgtatatatatataatatatatatcactgaaaataaagtatatcttgtaaaaaatattttgtgggtacatactaggtatatatatttatggggtacatgagatactttgatacaggcatgcaataagtaataatcacatcatggaaaataggatatccattccctcaagcatttattctttgtgttacaagccatccaattgtactcttttagttatttttaaatgtacaattaaattattattgactgtagtcaccctgttgtgctatcaaatactaggtcttattaattctttctaactatatattttttgcacccttaaccatctccacttccccccacctgccacaacccttcccagcctctgctaaccgtccttctactatctccgtgagttcaattgttttgatttttagcacccacaaataattgagaacatgtggtgattgtctttctgtgcctgatgtatttcacttaacataatgacctccagttccatccatgttgttgcaaatgacaggatctcagtctttttagtagctcagtggtactccattgtatatgtgtgtcacattttctttacctagtcatctactgatggacttttaggttgattccaaatcttggttattgagaacagtgcttcaggaaacatgggagtgcagatagtctctttaatatactgatttcctttctgttgggtatatacccagtgggttgttgggtcatacggtagctctatttttagttttttgaggaacctccaaactgttctccacagtggctgtaataatttatattaccaccagcagtgtatgagggttcccttttctccacatctttgccagcatttgttattgcttgtcttttggataaaagccattttaattgggatgagatatctcattgtagttttgatttgcatttctctgatgatcagtgatgttgagcaccttttcatatacctgtttgccatttgtgtgtctttttgagaaatgtctattcaaatcttttgcccatttttaaattggattattagattttatcctacagagttgtttgagctccttatatattctacttattaatcctttgtcagatggattgtttgcaaatattttctcccattctttgggttgctcttcaaggtgttgtttcctttactgtgcagaagctttttaacttgatatgatcctatttatttttgatttggttgcttctgcttatggggtattactcacgaagcttttgcccagaccaatatcctggagagttttcccaatgttttcttgtagcagttgcatagtatgaggtcttagatttaagtctttaatccatttttatttcatttttatatatggtgagagataggggtcaagtttcattcttctgcatgtgaatacccagttttcccagcagattttattgaagagcctgtcctttcttcaatctatgttcttagcatgtttgttataagtgagttcactgtagttatctggatttatttctgggttttcttttctgttccattggtctgtgtctctttttatgccagtaccatactgttttggttgaagtcaggtaattcctccaattttgttctttttgctcaggatagcttttgactattctcggtcttttgtgattctgtataaattttaggatcttttttccatttctatgaaaaacatcattggtattttgataagtattgcattgaatctgtagattgctttgagtagtatggccgttttaacaatattgattcttccaatccatgcacatggaatatttttccattttttggtgtcctcttcaatttttcattagtgttttgtttattgtagagatatttcacttcttagcttaagttaattcctaggtatttaattttatttgtgactgctgtaaatgggattactttttatttccttctcagattgttggcacaaaaatgctacagatttttgtatgttgattttgtgtcctgaaactttactgaatttgtttatcagctgtagttgttttttttttttttttgagtgtggggtctttaggtttttctaactataagatcgtatcatctgcaaacaagaatatttaacatcctcctttccagtttggatgccaaatctttctttctcttgtctaattactctagctaggacttccagaactgtgttgaataacagtgatgaaagtgggcatccttgttgtggtccagaccttagaggaaaggctttcagtttttccccatttggtatgatactagctgtaggtctatcatcatatggcttttattatgctgaggagtattccttctatacccagtttctttagggtttttatcacaaagggatttaaattttatcaaatgctttttcaacattagttgaaatgatatatacggtttttatacttcattctgttgataagatgtatcacactgattgatttgcatatgttgaaacatctttgcatccctgggataaatcccagttggtcatgatgaataaccttttaaatgtattgttgaattcagtttgctagtattttgttgaggatttttgcatcaacattcatgagagatattggtctgttgtcttcattttttgatatgtctttgtctggttttggtataatactggcctcatagaatgagtttggaagtaatccctcctcttctgtttttcagaatagtttgagtaggattgctattagttctttaaatgtttggtagaattcagcagtgaagccctagggtcccaggcttttctttactgggaggctttttattacggctttgatcttgttacttgttattggtctgttcaggttttgttgtcatacagttgctcagtatgatcctttaaatttctgtggtatcagttgtaatgtctcctttttcatctctgattttatttgggtcttctctctttttttcttagtctgacttaaggtctgtcaattttatttatcctttcaaaaaaccaacttcaagttttatcttttggtactgtttttgtcatttcaattttatttatttcttctgattttcattatttcttttcttgtactaatttcgagttgatttgcacttgcttttttagttctttaagatgcattgttaggttatttattttatgtttttcttcttttttgatgtggacacttacagctataaatttccctcttaagactgctttcactgtatcccataggttttggtatttgtgctttcattattatttttttcaagaaatttttcaattttcttcttaatttcctcattgacccactggtcggtcattcagaagcatattatttaatttccatgtgtttatattgtttctgaaattactcttgttatggatttctagttttattccattatggtcagaggagatgctttatgttatttcaggtttttttttttaatgttttaggacttgttttgtgacctaacatatgatctatgcttgagaatgatccatctgctgaggagaataaagcagctgctgaatgagatgttctgtaaatatttatttggtccatttgttctatagtgaagattaagtctgatgtgtcttttttgattttctgtctggaagatctgaccaatgctgaaagtggggtgttgaagtctccagctgttactgtattggagtctctctctctctttagctgtattaatatttgctttatttatctgagcgctctagcattgggtgcatatatatttacaatttttatatccttttgctgaattgacctctttatcattatacaatgaccttctttgtctcttcttatgggttttgtcttagaattcattttgtctgatataaatatagctactactgttctttttcagtttcccattggcatggaatatctttttccattcctatattttcagtctatgtgtgtcttcataggtgaagagtgtttcttggaggcaacagataattgggtcttgctttttcatccattcagctactctgtgttttttgattggagaatttactctatttacattcagtgttataattgataaataaggacttattcctgccattttgttgttttctggttgttttttggttggctccttctttctttccttcctgtctttcttttagtgaaggtgattttctctggtggtatgctttaatttcttactttttattttttgtgtatctgttgtatgttttttgatttgaggttaccatgaggcttgcaaataatataacccattattttaaactgattacgtaagcaaatgaactattaatagcaaaaagaaaactaataaaaactctaactttatccccttgctttttaattttggttgtttttctttatgtcttattatactgtctatgtcttgaaaagttgtagttattaattttgattggttcattgcttagtctttctactttaatataatattttacataccataattacagtgttatagtattttgtgttttcctgtgtactattaccagtgaattttgtaccttcagatgatttcttattgctcattaaaagtcaaaagatttatacgatctgaagggaaaccagaatattcttattgctcattaacatccttttctttcagactgaagaactcactttagcatttcttgtaggatggtctggtgtggatgaaatccctcagtttttgttgtctgggaaaatctttatttctccttcatgcttaaaggatattttcactgggtatgctattctagggcaaaagtttttttccttcagcactttaaatgccatgtcactctctcctggcctgtaaggtttccactgaaaaatttgctgccagacatactggagctccattgtatattatttgtttcttttctcttgctgcttttaggatcctttctttatccttgacctttgggagtttattaaatgtcttgaggtagtgttctttgggttaaatctgctagtgttttataaccttcttgtacttgaatattggtatctttctctaggtttgggaagttctgtgataatacccctttgaataaactttctatccccatctctctctctctctgcctcctttaaggccaataactcttaggtttacccttttgaggctattttctagatcctttaggtgtgcttcgttgttttttatcttttcttttctctactctgtattttcaagtagtccttccttgaagctcagtaattctttcttctgcttgatcagttctgctattaagagaccctgatgcattcttcagtatgtcaattgcatttctcaactctagaatttctgcttgattcttttaaataatttcagtctctttgttaaatttgtctgatagtattctttctctgtgttatcttgaatttatttgagtttccaaaacacagctattttaaattctctgtctgaaaggtcacatatctctgtttcttcaggattggtccctggtaccttattggtgaggtcgtgttttcctggatggtcttgatgcttgtaaatgttccagtgtctaggcattgaagagttaggcatttattgtagtctttgcagtctggacttgttgtgtccattgttcttgggaaggcttttcagatattcaaagggacttgggccccaaacccaataatgccatggttctcgcagacttatagaggtaccaccttagtgatcttggataaggtctggaagaattctctgcattaccaggtagagattcttgtgtgtgcgtgtgggtttttttctttactttatccgaaacaaatggagtatctccctttgtgctgggcctcctggatctggggatggggggacacaagtacccctgtggccaccaccactgagactgcactgtttcacacctgaaggcagcacagcactgggtctcgcccaagacctgctgtaaccaccacttgcctaccacctaagttcactcaaggctctagggctctattatcagcaggtggcacatctagccaggtttgtgtccctcctttcagagtcatgttcccccaggccctgttgggtccagagatgctgtctaggagtgagattgaagtcttttttttttgagacggagtctcgctctgtcgcccaggctggagtgcagtggcacaatctcagctcactgcaagctctgcctcccgggttcacgccattcttctgcctcagcctccctagtagctgggactacaggcgcctggcaccgtgcccagctgattttttttgtatttttagtagagacggggtttcaccatggtcttgatctcctgacctcgtgatccgcccgcctcggcctcccaaagttctgggattacaggattgagctgctacacccggcctgaagtcttaaaccttagaaatttacctgatgttctgttttactgcagtgaagccagcactcagaccacaagccaaaatccttcccactctttcttcctctttttctgggcagagaagcctctccctgtggctactaccaccactggcccatgtgggtttctgccaggccactgctaacagaacccaagggctctttagtcagcttgtggtgaatgctgccaggcctgggattcacccttcagggcagtggcctcccctctggcccaggccagttccagaaatgctgaccaagagcctaggcctgaagctggggacccctcagagcttgcttggtgctctactctactgtggctgagttggcccctaaggcacaagactagagtctgctttacttttccccctgcctttctcaaacaggaggagtctttcattgtagctaccaatactgggaatatattcagtcccacctgaagctagcatgtctcagagcccaacacccatggcatattacctgggtatcactgctggttattcggggcccaggggttctttacgcagcaggtgatgaatcctgccaggtcactactgtgacaaggcagcactgagttcagtgtaaagtcctccagttgctgcgctccctgtctcccaagtgcacagctttctttgcaccttatggctgctgccaggggatgggggaggggtggtacaagcacacgcttagccaccctggttgatgtctcagtaggtcatatgcccctcccctctggtccactggctctgtctgagtccagctcagcactgggcttgcctaggacttggaattcttgtggcctagactgcccctcaagttcgcttaggtcctcagagcactccagtttgtggtagcaaggcttgtcttaactcaagctctgattactttaatgggtgagtcccctctagctggggttggtccaaatgctttctctatgggcagacatcagctactaaagcctggttctgccttctgctgaaccagaacagcagtgagttcaatgtaaagcctcaaaatcactgtgctctccccctcccaaatacacagatgttctgtgccatgtggttgctgctggaagatggaggaaggggtgggcaatttaagactgtctttcctgccctcttcaatgtctctctcagtgatacgaaattaaaaccagattgctcatttgattttttattcttgtaatggtgctttttgtgtgtagctagttgttaaaatttgatgttcctatgggtaagacgaatggcgtaggtttgtatgcggctatctcgctctgccccctaaagcacatcttttgatacatagttctacttgtagcagtttattctgagaaaataatcagaagtttatgaaagtgatagtacaaaaattaggaacaacctaaatgtttatcaacagagaaattgttaaaaattaattatggtaaccagacacgttggaatattatacattcattggaaacaattttttaaatatgttattttgaaccccagatgatgtctacaacatatcatttcatgtatatgcacacatacacacacaaatcaaattgaagaatagtttatgtgacattttgtagatacaaatatgtgtgtagttgtgcatagagatgtcttgccaaaatgtgggtgagaggatttcagttgatagtttgtattttgctattggtttgattttttttttttgcaatgattgtctattctgtattcaatgaggaaaaaaaaactcctaacgttattttagttttggaaataaatagtaacaggaaggatatacaaggaactggtaatagtggttaactctagggagagagaggaactgggggtaggtgagagaaagacttaatatcctactgtacctactgcattaacaaagatcatattcatgaattgcttattcaagtaaaaatttaaaccaaaccaaaacaaaaaaatctctcagtctcagcagaattatctaaatactcttggagcagatagtaaaaaaaattaagattctgtgaaacttagatcatcagttttcaaagaactttaattaagaaggaacaactacttccttatttgatagtctcctcaagaaactcagaaccatctttattaatctgcgtggaaggaagtaagcaaaaatgggtgtctgtgattctttttttttttttttttgagaaagagtcttgctctgttgcccaggttggagtacagtggcacgatcatagcttactgtatcctggaactactgggctcaagtgatcctctcacctcagcctcctgagcagctgggactttagctacatgcaaccacgtctggctaatattaaaagaaatattttgtagagatgaggtcacactgtttcccaggctggtcttgaactcctagcctcaagcaatcctgcttcagcctccgaaagtactgggattacaagtgagtcatcatactcatctcttaacttttaacatagcaagaatttgaggtttatattgaactatgtgtagagagacataacattgagatgtgctttgcaattattaggctgtcagtttttattttaattaagattcttgtttcattttaaaaagaaagaggtgagagatgtttgatcttactgctaattttgaccaaatcatttttctaggaatcattttctggaatatactttaaagcagcagtccccagtctttttggcaccaggtaccagtttcatggaagacagtttttccacagatttgggcgggggtggttttgggatgtaactactccacctcagatcatcagccattagattctcataaggagcacgcaacctagatctcttgcatgcacagttcacaatagggttcaagctcctgtgagaatctgatgccatcgctgatctgacaggcagagctcaggtggtaatgcttgcttacccactactcacctcctgctgtgtggcctgattgctaacaggccacagaccggtaccagtctgtggcccaggggttggggacctctgctttaaagtaaaataaaatagttttcaaaactatcttttttctctaaaattgtgtactttttggttacaggtgatggattgaacatttatttagcaatatcaaaatgaatgtttaatgaaagtatccttgatacatttttgaaattattcttttgtcttttccagaattttccaatgagaaaagtgccctgtaagaaagatgctgcatcaggttcattctttgctcgggacaataccgcaaacttccttcactggtgtagggacattggggttgatgaaacttacctctttgaatctgaaggtttaggtaagtgatgttcttgtcattcttgtttttaatgcttactaggatgttttaatatccttcacctctaatttttctttccaaataaggactcaaatgcctcatctcattttcctagaaaaatgtatactttgaatatatgtagaattattggagaatcagatactaaatcaaatatattaaccttttcacttaaagattttatgtgtctagaatgtcctaaaattctgaattcctaaatgagttggctacaggaaggttctggactaatgctttagtaattgatattttcattaagaattactccaccaagcctaaaaagtagtaacttccctttaaccggataattacggaaatgacaggaggcctaataatgtattatcacggtgtttagctttaccttacaaacaacagctgccaacttgattatctaatggattaatatttttgacaattcattttgaggagtcatgctctgttgaagaattattgacgtattttctcatttccttgaagtcaacagaagcatctgtgcagtgactaaagcggtagctatttaagttttatactatatttgaaagcatttatatatgtgtacatacacacacacacccaccaccccacccccacacattgaattcataatgtgataagtgcagcagtgtaccaagggcagggctgtgggagttgtctgccctggtagaagttttatcactgacatagtttaggattgctggtttgtggtgatagtaaaaagcaaactgactttttgttggttgtattattttaaaattctctactgacagtacacacccttattgccctcacacagggtaagcggcctcctgtttgctctgcatctgggcacccctatccagtgtagagcaagcatgggatgctattttatccctctgtttgcaccttgctttagatccagatgggctgatcattattgacagtgtagttgatgtaatggcacatctactttctaaagatcaaaacaaagtggaaatgctttgaattctctagtttctagtttattatttctgaaaggacataagattgttgtatatttctcattttcagtagaaggcatcttctcactctcctgaaggtcagtataggactaagtaaagcactgccaataccagtaattcattttgaggcattgaaccgataagctaatgtttttactctccagaggtctcaaagatgagcctcttaattttttacactttgctagcaactcaaagctattttatgaaacaaatatactattttaaggaacttagaagatatttagaaaaacaaatctagtaaaaattttaggataaattcctctgttggtatgaattttaaactcaaatgtaggctttttatagctttgaaagagtatactttgtgcttggggtgtataatagatgctattcataaatcaaagaacaattaccatttctttcttttttttttttttgagatggagtctcgctatgtcgcccaggctggagtacagtggcgcgatctcagctcactgcaagctccacctcctgggttcccgccattctcctgcctcagcctccagagtagctgggactacaggcacctgccaccacgcctggctaattttttgtatttttagtagaggctgggttacaccatgttagccagggtggtctcaatctcctgacctcatgatctgccagcctaagcctcccaaagtgctgggattacaggcatgagccaccacgccaggccaacaattactatttctattgagggaatcagggcacatgcaattcatgcacatattgcacatgattaggttagaattcagaagtttcctagagtttctaactttaaggactgcaacagaaaaggagatgatccacaactactatatcattgcatttagcatgtgttctatgatcaggcctttttaaaaattgttttaaggatctctgtttacctttatattgcatttccttttatatttatttttattttaaaaattgtattaaaatgcacgtaaaatttactatcttaggctgggcgcattggctcacacctgtaatcccagcactttgggaggctgaggcaggtggatcacctgaggtcaggagtttgagaccagcttgggcaacatggcgaaaccccgtctctacaaaaatacaaaaattagctgggcatggtggtgcacgcctgtagtcccaggtactcaggaggctgaggcaggagaattacttgaacctgggaggcagaggttgcagtgagccaggatcacgtcgctacactccagactgggtgaaagagtgagactcataaaaaaaaaaaaattactatcttaaccatgtaaccatttttaagtgtattaggtttcttttgtagtagcataaaaattgagatatgctgtacataatctaaaattcacaattttaaaatgtacatttcagtggtttttagtatattcactatgttgtacaatcattactactatctaatttcagaacatttctggaaaatctgtacctattagcaattagtcccagttattctcctaccccatgccaaggcaaactctgttctctgtctctatggatttgcatattctggatgtttcatataaatggaatcatacaatatgtggcattttgtgtctgtttcttttagttagcacagtggttcatttatgttgtagcatgtaacagtacttaattcctttttatggtagactaatattccatcgtatagatatgccatatttttttaagccattcatcagctagtgggcatttggattgtttccactctggctattatgaataatgttgctctgaacatttgtgtacaaattttgaagtaaacatatttcttaattctctcagatatatacctaagagtggaatttctaggtcatatggtaataattctgtttatctttttgaggagctgttttcaaagtggctgcaccattttacatttctgccagcagtgcccaatgttccaatttctccacatctttgtcaatacttatttgcctgtttttgtttttattataaccatcctagtgggtgtgaagtagtattttgttgtggttttgattcgcgtttccctaaggatattgaacatctttttatatacttgttaaccacttgtataacttctttggagactatctattcaaatcctttgcctattttaaaaattgggtcatttaccctttttgtcaacttgcaagaattctttatatattctagatactaggccatattagataagatttgcaaatattttctcctagcctttgggttatttttttactttcttgatagtgtcctttgatatacgaaagttttaaattttggtgacatttaatttatctatttttcttttgcttgtccatacttttggtcatttaaaaatccattgcctaattaaagtcatatatatttttaacatttttttctataaatgttacagtttgtgcctcttacttttaggtcattgatctattttaagttaatttttgtatatggtgggaggtaggggttcaaattcattcttttgcatgtggatgtccagttgtgccaacaccatttgttgaaaagcctgttctctccttattgaattgtcttagcatcttgttgaaattaattgtacataaatgtatgggtttatttctggacactcatttccattccattggtctgtacatctatccctatgccagtgatacactgtcttgattactgtagcttatagtaagttttgaaattgggaggtgtgggtctccaaatttgttctttttctagattggttaggcttttctgtgccctttggaatcccatactaatttgatcatcagcttttccatttctggaaaaaaaaaggggtgttgtaattttgataaggattacactgaatctgtaggtcagttgggggaatgttgctatcttaacaagttgtcttccaatccatgaacatgagatgtctttatttataatcttttaaaatttcattcaacagtgttttatagttttcagtgtacaagtattacaattctgtgattaggtttacttctaagtactttttctttttgaagccattgtaagtgtaattattttcgtttcattttcagactgttcatttctagtgtatgcaactaatttttgtgtattgatgttatctcccacaactttgaacttgcttattagctctaacagttattttgtagattcttcagggttttcttctacacataggattatgttacctgttttttgtttttttgtttttgtttttgttgctttgttttttgagacagggtctcactctgtcacccaggactggagtataatggcacgataatagctcactgtagtcttgaactcatggattcagttcatcctcctgcctcagcctcttgagtatctgggattacaagtgtgcaccaccatgcctagctaattaaaaaaacaaacaaacaaaaaaactgtagaaacagggtctcactttgttgcccaggctggtctcaaactcctagcctcaagcgatcttcccgcctcagtctcccaaagtgctaggattataggtgtgagccaccatgtctggcctatgttatctgttaatagaggtagttttccttcttcctttctagtctatatatgatttatttatttttcttgcataaatgccatggctacatcctccaatacaatgctgaatagaaataataagagtggacatccttgtcttttcctggtcttgagggggagacttgcagtcttttacctttaagaatgataatggttgtgggtttttcctagatgcccttttatcagattgagaaactttcttttttcttcctagtttgttcagtctttttttttttttaatcatgaaatggttggattttgtgaaatacttctttgtctcttgagataattgggtttttttcctttattctgctaatagtatattgcattgggttgattttcttatattgaactatttctggcataaatgccacttgcatggtatataatccttctatatgctgccagatttggtttgccagtatttcattgaggatttttgtatctatattcataagacatattgggttttagttttcttatgatatcttcatttggctacctttgatatcagggtaatgctgtcatcctagaatgggttagaaagtactttctcctctttgtaagagtttgagaaaggtattaacacataattcaatgctaaagatagcttaaaataaaattgcggtactatatatcttttaatggtatctcttgttgaaagatctgaaacataagcaatgttactaagccctcaattttttagacttcaaatgctgtgcaaataaaggtccatggtaatttttcattctgttcttattagctgttttttttaaactaatttgttgaagataataagtagaaaaaataaaagtgtcttttcttcattttttctaaacaagtaaacctgctgtcttcattattcttttttatttaactctcttcttccatgccagaaatatgtttccatacttaattttgctgtataaaataagtggttttattttccacagttttgcacaaagatccaagacaggtgtatctttgtcttcttgaaattggtcgaattgtgtcaaggtatgtattccacaatatttcagaatttcaatgttataaacattttaaatctactgaattttagtttagaacactattttctataaataaaaaaatgctttaaatgaactattttcctgttttatctttttgtttctttatcaacttcattctgtttgcatgagcatatgtaaacatccgagttctcaatatagcttgtcttcttttactgttaaactatgggagtggttacttaaattttttagattaaggatagggtaagagcatgcagtctaaggcagttcaagtcaaagcaagtcctctgaacacagagaggatctggcagaaggcaaggagtggtgtcccccatacctacttcagttctatctttactcagcagctgattcgaaagccacctttcaggatcccaggtagaatattgggagcatcctgcaacccaaatatgtgctatgatgtgaggactgtaatatagatattttacaatctgtgagacattaaaaagcattttcaaatatcccagtgaaacaattggtagaagaggatcatatagactttacttcagaaagaaaatctatcttgatatgcaggcaagtactgggtcaactttgcttgaatgatcagatctcctggttggttttcagatacggggttgagccaccagtgttagtaaaacttgagaaagaaattgagttagaagagactttgcttaatacttctgggcctgaagattccatcagcattccaaaatcatgctgtcggcatgaagagctacatgaagctgtaagtagttgccacactttcttttgaccatgataccttgaagtctcatagttttaagcacttctagtgtgctacaggtgatgctatttttaaaagcaagtgtttcttattcagaatataaaccggtactattctccattctctgatgaattcagggcattatattttaaaggtgatttgttattgcttgtgtatgatgaggaataaatgtgtagttgaggagtggtggggcaaacagattggaactcatcatgaagagaactataggccacaagaattcattgattcttttttcagtctggtagtattgtaatctgatttgcaaattataaggaatattctcatggtcttgtagaggttatattggttttgtggtaataatccaggcataagatgagagcttgaacttgagcagcagtaatggggatggagcaacaggaacaaatataagacatatttaggaagaattgttaggagaattgacaggaattagtgagtgtttgtgtgtgagagagaatctagggtgatttccaaggtttctctaagtagatggtatattgatccttgcagaatacaggaggaggaaaagttgtgagggaagattgatgggtttttttttttgagcattctctcctccagaatatatccaaacttgttagatgataggttacaactggacagtcttcttaactttatctgttcattaggtagaagttaatagaattgctcttccttgggttgtgggtcttctgcagtgactacaatgtgaacaatgaaggtgaactgagcatgaacattttctgcttagactgttgtttggactgtagcattttataaaggggttaaatatacaaaattaagaaataatgaataaatcattactaataaacattttaaaagtattgctttgattgttttgtttaatgtaataaaagtctatagtaaaactatcagataaccttgcaagacagattaagaacatgtcagaatgaataactcttttatctggccaaaatatctacctacattatgctattcatgtgtgtgtgtgtatatatatataatgattgtcaatatcaatatgggaagcagaaagaatgcagtaggtagaaaataaaatttaaatctcatataaccttaaagaatgataaatgaaaaggaaacattggaacaatatttttatcaagtggaaaatacagtgtgttcatttccctattatataaagaccttacacaatttgataagaaaaacttgcagtaagtaaatgggcaaggtctgtgttcacacaagaagaaagtgcagtgttgaaacttgctgataatcaaggaaatcagattaaaacagctatgaaataccatttgccccactagcaagattttttaaaactattaaacctggtgcttttaaattctagcaaactgtacttagtgtttactgttggcaatggaaaatgatgtaaacttttgaaaaagaaatggacaaatattaagagctacaaaaatattactttttcatttttattgtagttgaagagggaaaaagtggcataaatgaaagtgtttattacattaggacttagaatggtgaaaaagtaaataccctcaaatagggcaacggtttggcaaattaggattcataatcttaacaggataatcattgtgatcattgtgaagaataatgtagcaacaagaaaaatgtttattttgtgtaaaatatgtacatatagacaaactgtatagaaatgagaatgaaaataatagtaatatagtacctttgtagattatttttatttccttagctatttccttcagtattgtaatgtaaattatgtaataaaatcagaagaaatcatttcttacctacagctcttatttcttttaggctcatgccttgttctgattgtgggttagtgctgatttgtactgctcaatataagtgagattcgggtatcttaaataaggaaaagatacgacttgttatatctgcattcttgttatgaaaactaaaaagaaacatttctctaaatatatgtgtgctatatgaatacattcattgtctacctgtgaatatgtgatctacagatatcttggaaaataaggaacaattattttctgattcacgatttagggtcctgttacaaaatatacaacagcaattctatatacttaggaaatttttacagacagaaagtggtgactaaaagatatatctcctttcagattactttggttaactaatgtatcagcatggttctaataactgtaagccctttcccagagttcagtttatttttcaccattttatgcacatggtgtgtatgtttgtatcaacatagatgcagatgtgcacgtgtgcatgtgaacaagataaacttgattgggtgacttatgaaaatcagttctatttgtttatacgcacgttattttgttaaataaatgatataggaaaataagttctggacctttcctttcaggccctagtgaatccacaggtgttcatttgatttaggtagatatttaagacaatcatataaatttctattggtgctcagctaaattaggcctatctaaagagactctctttaatatcatgcctaagtttagttatatgaattcgttttgataaattttgtgtggcaataattgagaaaaacattcatgaccttcctttttcaaaaatgtaattttaggaaaagccaaatattttccacagtggctgatgtgtgacttttttcagtcataggtatttcaacaaatatctttacttaatatatttccatttccatgttttaaatatagaattcttaaatttgtttttatatttactgcagttctaccattaaaaaatatttataataatagaaaattctataagcttcttaactggttgaagtagggttcccccatgccaactcctacttccttagcaggctactgaaacagagcatttttagagaaatgcatcttgaattgaaaattttaagaattttatccaatcttgagagaatagatgtaaatatgtttctgccaattttaataataaatttgatcaaatctagatatttcccccaaaatattagtttagtacacttttaagggacaagtgaaaattcctacttagcctttactgactggcctgtctctgatttgacatgtattattaactcagggcttaaaataaattcaagcttaataacgaactcatatgtttcctaaaactcaacaaatgtgttaattgacctcactgtgttatatgttcgaagatgaagggtggtggggagggagggtgggggggggagagagagagagagagagagagagaaagagagagagagaggcactgagagagagacagacagagagataccagctaggctgtttggatctgaaacctggctctgctacttactagctgtatgatctcaggcaagtttaacctctctttggtaaaattggggaaaataagaattttaccacaaagtcattttgggaagactgtggcttttttatgttagattagcaatgtctaatctcaatatttgttaataagcacaggagaagcgattaaattattgaacctgaaatttttatctttgagtttggttttccttagctatcaaataatattacactttaaacaaaatgctttttgtgacaagcactaaattttatttgttcgtcatcttaggttaaacatattgctgaggaccctccttgtagttgttctcatcgattttctattgagtatttatctgaaggacggtaccgactaggggataaaatactctttataagagtaagtccattatttacactttatttacacataaatactgttttgaaattggatttattgctttactaaccttttgctctccttttacttttaaaaacattggaaaagatgctattaatggaaggatttcactgtacagggaaaatggagtaatttctttcatgagtatataatgagtttaggtaaacactcatcacagcaaacaactaacttcaggatagctaagattatttaggcagtgagtataatggggaaaaatccttgcatacctcaaggaacatatttctcaaattttcttagaaaaaggaataattttccatcataagaagaaaaaccaaaacatctaataagattgagtatccatagtaaaaaaaaaaaaaaaaaaaaaaaaaaaaaaaaagaaaagaaagaagtgtagagtttataataatacaagccttgggcattaaacagaaaatatttttctcattgacacagaatcagtatgtataccagtatgctgatatatatgttcatttccttcctctgtcccatctacagttgattaattgttccttttgttggtaaggagattgaaatttcacctgttcatcattctttccacttctcatacagaagctgtcttatttccaatttaggaaaataatataaaagtatttaaaaatattatttcaccatccatattttcttctatttcacatattattacctcctcagccccacctagctcatacagaaacatttgcatgcattttcttttaattagctttctgttttaaggcagtatgatgtagtagtgcacagagcataggacttagagttaaaatttgtggataatctcatacagttgtgcagatttgcttactgaatggacagggccctaaaacccaacttgagatatattggcagagccaggatgtcttatttttaggatgcaagttatatgtaaataccttccttacaaattggaagattttgtatcattagttgcataattcaatgtgagttaaatttattatattaataatacaagaaacaaactgtcaatttgtagtgaggctgttggcaaatgctctgaattttatagatcacagacatcacatattgtaactgctaatgaattgtaactataaacctcacagtattacagctttactttttgttttcctttgggggcagatgcttcatggaaaacatgtcatggttcgcgttggtggaggctgggatactcttcaaggatttttgcttaaatatgacccctgtcgaatattacagtttgccacattagaacaaaaaattttagcatttcaaaaaggagtttctaatgaaagtgtacctgattcgcctgccagaacacctcagcctcctgaaatgaatcctttgtcagcagttaacatgtttcagaaacaaaattcaaaacccagcgtgccagttagtattccaaaaagcaaagaaaaacagggacgtccaccaggtgcattggtgccagcatcttcactgaaaggaggtaatctgggctctatgtcagtccgttctaaattgccaaattctccagcagcatcttctcatcccaagctcaagtcttcaaaaggcataacgaagaaaccgcaggctccttcaaacaatgcatcatcttcacttgcttcattaaatccagtaggtaaaaacacttcttcaccagctttaccaagaactgcaccttgtatatctgagtcaccgagaaaatgtatttcatcccccaatacccccaaggccaaggttattccagcccagaattcagcagatctgcccgagtccacacttttgccaaataagtgttcaggaaaaactcaacctaagtatttgaaacataatcatatttcttccagagataatgcagtatctcacttagctgcacattcaaattcatcctcaaaatgtcccaagctgcctaaagcaaatatacctgtaagacctaaaccttctttccagtcctctgcaaaaatgacaaaaaccagttccaaaaccatagccacgggtctaggaacacagtctcaaccatccgatggagccccacaagcaaagccagtcccagcacagaaacttaaatcggccttgaatttaaatcagccagtttctgtgtcctcagtttctcctgtaaaagccacacagaaatcaaaagataagaatatagtttcagctaccaaaaagcagcctcagaataaaagtgcatttcagaagacaggacccagctccttgaagtctcctggccgtaccccactgtccatcgtgagcctaccccagtcttctaccaaaacacaaactgcaccgaagtcagcacagactgtcgctaagagccagcattcaactaaagggcctcccagaagtggcaaaaccccagcttcaatcaggaaaccaccctcatctgttaaggatgcagatagtggagataaaaaacctactgcaaagaaaaaggaagatgatgaccattattttgtcatgactggaagtaagaaacctagaaaataaatacatactcattataaaaaaa

SEQ ID NO: 51 - DNA, 13112 bp, Homo sapiens
gcggccgcgtctcctccctcggcgttgtccgcggcgcgagccacagcgcgcggggcgagccagcgagagggcgcgagcggcggcgctgcctgcagcctgcagcctgcagcctccggccggccggcgagccagtgcgcgtgcgcggcggcggcctccgcagcgaccggggagcggactgaccggcgggagggctagcgagccagcggtgtgaggcgcgaggcgaggccgagccgcgagcgacatgggggaccgggagcagctgctgcagcgggcgcggctggccgagcaggcggagcgctacgacgacatggcctccgctatgaaggcggtgagcgcgccgggagcccgggcggctggccggggggggcctggcgttggggagggacggggatggccgcgggcgcgttcccctcccggccatgggcgacccggcgacccggctgggcgtggccgcccgcccgcccttagcccgcgcttcccgctcccgctgggcgccccgccacttcctgaggctgggcccagggtgggggatccgggagggtgcagttcgggatcgcgaaggcagccccggaaggggggcgggccggtcggggtcgccacatcttagttcggaacccggccgggggcagagggtgccctaggggacgcgaaggagccgcatttctcctagagcgtttcaccggacccgggggctccccctctcgtcttcctccgttccccaacttggaataaagaatcacctagtaagtggcgccctgtctcagctggttttctctgccacgacctgaagtctgcaattccgatctgttttgctctgctcgttcgaattgttctggttccatcttcccacgcctgggggtctggctttgtgtgcgaagacccctttcctgcagtctaggcgtggacgggggcgggagagtgggcggagggtgtggggccccactccacagccccaggtttgctgctgcgctgtctgcttggagattaaaatgaaacgtgacttctaggtgagacgaatctgtgtgtctttgcattcctgagaccctcataaatcgattctgcagcttctccggtggatgagtcgtgcccagccacaccctagcaaaataccgtgggtcacacaccacctgcatttctgagttccggttaccatctcactctctctccacgttattttacgttttctgtaaatgaatatttcctctccctgcgtcaaggtcacacagtggtagaacaactgcgaccaccaacctatgttcagtgtacaacctcctgagacctgggaggatccccttgaactccgccttagacctatacattcagaaattcgggcggtgagactcagacatctgcattgtaaccagctctcacaggcgatttttagctggcttaagtctgagaattactgcccatgattatagtaaatgtatcctttgctggccttttggagggagttccgaaaaaaaactgccaatacaaaggctccctaaaatcttaagtcatttggaaagctcatttgaaggcttttgatgttaatatcagatgaaatatgtagttggggccaatatttaggattgttcaggtaagaaaggtgcttgaagagttgcctttcctctggtgtccttgttacacacataactgggtgtgtttggaaaccagcaacaccgttgcccgtatgttgatttgttggtgatcttgacttgagcactattagcatgctgttgtggtgaggcaggttttcttccagaccgggggacggtctaggtctggaggctgaactttatgtaattcagggggtcctttaaaagaaaatctaaaatatagttttgcatattttacaaaaatgggactgacgaatgcatttccttggaagggaccctgaaccttaattttctgtgggataaagctgcctctgtccacagcaggtcacacttaagcccctcctccccagtaactgagtggtgctgggattatgcaggctgaggcctctccacacattttcatgaagtggttgctcaccctctaagtgagacgtaaagactgcagtgttcggagccctttgggaaataaatgtggtgaaaagaaaggagggacgaggtttaaaggaaggggaaatggaggttaaggaaaaatggctagaaggtgtgttctggaacaatcagaaacctgaggcaacttgaaatgggggaaaaaggcaagaatggagagatgttaccagaacgaaatctagtttgagcagagaaaaagactggctttctagtaggcttgtaaaatgctttcctgcagcaagctacttgtgtccatagatcttctctggagggttaaggtagccttttgtaaaccaaaggaatctataatatctatatttgaaataattaatgagttggaaaagccacccagcgtagaagagtcaatccaagctttaattctgccatctcagaatggtgataaacccatttctcccccatcatctaaatggaatatattgtgcttataggtattttctttaaaagaaaaaaaagaatatattggaagggactggcaggggtcactttccctgctaacttggtgtttgtagattaaattcttaatgttactgggatgactcagtctctatgttattaatctcatcagccttaactaaggcttttggaaagggtgtaagtttcagtaaccctctgggtttacctgggctttcttcagggctggggaagggcaggtaagtagcctgctgtagggaggatggagcaggacacatgtgttaaggatatattctgatgccaccagtctgtaaccttgaaacttacatcttggctttaggtcctctgaagtataaaactagtgatgttgctgttattaacaagtcagttttgccttcagtcttctaacttgttttctgtttccttcataattaaaatgctcacttgataatactgccttcctgtaatgattgatgttcctcattctaccagcgtcacctggaggacagtgttggtaagcttgaagaaaaatcgtgcatactggaaacaatggtcttgcctcaaacctgttgagaacttctcttccctgcttctctccataatttgaagaagcaagaaatgtttctgaagtgaagcataaaggagtatcttcaagctctatctcatacctaccagcttgcatagagtataatagtgggaagaaatattgtgaaagattctagaacctaagtcctttctaggctaggcaattctaggctacacaattcgtagtctctgtaaataccatttgataactgaaataaacctataaagtgggattaaatgttagtccagaagactaagtgatttaaggaaagagggaaaataaccagatagatttctggtggatattcatagacagacataatttcatcatgtattatggccctaagtcatctattttatattaaaacatagatggtaactgtaaagttatcaaatgtaaaaattactgggctagcattgtgttttaacactgatacaccagttgattacagtgttgacagaaaacgggcagaaacacgtttaaagtacctgcagaatatatatatagaaatcttttttttttaatcagtgttgaccaggttggcctcgaacgtgtagcctcacctccccgagtgccagggcaaccggcctgagccacagcggctccctagaaatcttaagtgcaggaaacaaaactacagtttaaggaaacaggagtcggagaggaggggcatttggcccaaccactggcaaaaggctgttgttgcaacaactgtgagattctgggaagtggggaaatgagcaggtgctgtgtaaaagtgcacagctgactgccccaggtgagacagatcagtgtcacagagagtaggaggattttgaggtgtgattagtattttttttttttttcttaaagagatggtctcgttctggaacccaggctggagtgcagtcgtggcacgatcataattcactgtagccttgagctcctgggctcaagtgaacctcctgagcagctgggactacagatgcatgccaccgtgcccagctaattattaaattgtatagacaggatctctatatggtacccaagttggtctcaaactcctggcctcaagcagtcctcctgcctcagcctattaaagtgctgggattacaggagtgagctaccacacccaaccagtaggaaatcttaaagccacattgatactacagtttgaaatatgtaaaaactagggagctatgtttcccactaactgggcatttaaaatgtaatcgtctttgaggaaggaagaaggctctggattattcttgtaatagtttgaatttaaaaggtcctttcaggtgggcaaacagcttacgtggctttcttgcactgaaatagaaactgtagtccccatgtgggtttgggtccctgaattatccccagaagaacttccacagtccggaactgactcccttaaagaaaccaaaaatgtattttctttggtggggattttctttagttggtctttgtctgggattttatatcagtgacagactgtagcgtcacacttttccagaaatacggtttcggagagggtacccctaacgttttatgtgtgtgtgtgttacatttagcaagtttatataacatattttacttttttttttttttttttttttgagacagtttcgctcttgttgcccaggctggagtacaatggagcaatctcggctctctgcaacctctgcctcccgggttcaagcaattctcctgcctcagcctcccaagtagctgggattacaggcatgcaccaccatgccatgcccgcctaattttgtatttttagtagagatggggtttctccatgttggtcaggctggtcttgaacacccgacctcaggttatccacctgcctcggcctcccaaagtactgggattacaggcgtgagccactgcgcttggttagaacttatttaactttttaggcacttggtaaacggtagctgttagtccatgtgtacttttttttttggtgggggggggagtcatgctctgtcacccaggctggagtgcagtggcaggatcttggttcactgcaagctccgcctcctgggttcacgccattctcctgtgtcagcctcccaagtagctgggactacaggtgcccgccaccttccatgtgtacattcttgtttaacaattcaggataggtactgttactcccctttacaaatgagactttcagaggttgattttctcatggtcaaacagctagtaagttgtgaattcaagattcaaactcaaatttagagctctcattttaaccactatgtaacaatgccccatgaggcaaagggataatatgtctagtatacattctggtatattaaccattgtcagcactggtgactgaaatccaagaactcttcataagtgggcttactaaacaaataattttatctgttgggtgcaagtcattttttttttccaaatacgattaagaacaatctgccatttatgggttttagctacaacagagaaacataagagggaaactcacatatctggattttgcttgttctgaaggcttggaggccttttttttttttttttttttttttttttttttttttttgcttaacaaagtattgaatttgagtttctcctgagttaagaagtgcaggactatgttacattttatttggggtattttaagaaattatttcatattcttggcaccagttgtttctccatattgcctttaatgtatttttctccctgcaccctttagtatatttttatgcaggccccaaaatttctgtctctaggttgctggtaaaattcctcctagtgtccaagtggaggcagcttgtcttctgtcccagcattttggtgctcctcccgcccctactcctggctgcagtggcattcccttctgcggtggtgagtgttagcacttccaatgatccgaacctggcacagcttctgaagccttcaattcggatgcctctagggacagtagcatgcagtaatgccattcagatggtgttgtatttaatccttgccaatccccatgaaaatgttcagttatgtcaaaagcaaggcaaaaacagtctcttggctatacaagggtagctgttttatttgactaaaatttagcttagagtggatgttacttacccgaacttgcctgctctgagcttgaagtttagcctatttgtggtcttacagaattgcagcctcatcctggtgaggataaggggctcagcctgaccctggctggtgatgttcttgcccagtggcctgtaggacttggtctgttggtggatatctttccagcttggggcaggccaggcaagatcctcacttcctaagcattaacttgggaaagagctcagcaagctttcatccctctagctcattttttgtttttttgagacagagtcttgctctgtcgcccaagctggagtgcagtggcacagtcctggctcactgcaacttccacctcctgggttcgagcgattgtcatgtcccacccaagtagctgggattacaggtgcacgccaccatgcccagctaatttttgtatttttagtagagatggggtttctctatattgactgggttggtgtcgtactccctggcctcaagtgatccgcctgccttggcctcccaaagtgctgggattacaggtgtgagccatcacacctggcccctcaaaccctcaaactgacttttctcacacagacacacacacatacacgtacacacacacttctgccaaagaagcttaaaggttttatgatgtggttatgtttacttaatcatgagaatcatttactcatatcaaaagcaagctggttgatagcatgtaggtgtgggtagctataaaggatgagcccatagcatgtgtggagctgtgaaggatggcagcatattcgagtgaggtagcattacccctaacttaggcagctatggcctggcagctcgggggtggcatttttgtttgctcagtgttacttttgatgttggatgtttcccagattgagaactttaaattttcctaaatagtccctgtactgtttttggcagtggatctatttttactcacacacatagttttttgccttgtgagtagtgggtggaggcccttaggggtttttgggtaaatgaatagtgtcataggaagataagtgaatgatcagcaggccaggtcatttttgacatttagtaatgttgggggtagtcctggagcagagaaaatgtgtgaagtgagtgccctggggtggggactaggtgtagccaaaggctgtttggtcaggacgtgagtaaaactggctgacagggaagtccaatccttaaaagaaatggagaggagggcctttgtgcatgggaagagcccatcagtttaaggttgtccttcaggaagggtgtaagtaggattacagagggtgggaaggcaggcaggacacctagaaagcagagaggctgtgagcaggggtggcgaaacccctggtttgtggcccggtgaagactcagtgcctagtgtggctacactgagggaaggtgccgtgtggcagaaatgactgttgtaatcttggtgttagagcggaaagaggctgaaaactattgtctaggcctgtctgtaaaattctgtcttgttgttgcttcatgttcctgatttgtggagatgcagcaaatgtgatttcattagattttgcagatgatcttaggtagcatggtcggggcctggagagcatccattactctgtgttgccacccggtgtttgcctctcagtacagtttatgactgaacttttcattagttctcctggctcctgtattttggtatttgaagtgttgggaactggtgctaagtatcatccatcaagattggctatccatctttttgttttaatggactgtctgattttacatgggtctataattttccagtctgggaaaaactcagttttctttagttatctggtcaagtagtaagccatcttcatttcatgtttccttttgttaactgaattataacccaggagtattaaaaaatactgtatttaaatgtatccagttatttcctagttaggctctggctggggtattaggaacaatatttgcttgctgagatatgttagtcaccctcagctaatgctgatagtgattcattcagactggcaggcaaccagatgatttttacataaacactaatactcccagtaaatgatttttcttgtgaaggtgtcatcataaatactgcccagtagccttttttggcagcttattcctgatggagaaagaatatgcttacagatacacccaaacttcacgttagtaggaagccctgccacaccttttattggtgcacaggaaaaacgaaatcatggaacattggagctgaaggaggccttggagatcatttgggctaatcctgcttattttactttggatgtccaaaaaggttgtgatttgtttaaggtcacatagctagctcagactaaacttcagatgtcttgggtttaataattataccgccttttgtgttatgcaagcattctgtattatacatacatgtatttcagatttgtactcactttaaatgatatactctgggaagttaccttggtgtatctttgccagtttcacagaagcagctttgttagtcacaggaggaagtatattgtgactccttatggatattatttgtattttaatgccaaatggccttagtttaattactacaagatgaaaggagctctccaaattctgttgttgccttatgctttgttttattgaatattgctctagaaacgcaagtcattctagaggattcaagcattctgaaatttatcagaatatttgggatggaattttgattcagaagtgttgttcgttaaaagactaagtagttactcatctttttgtagttcataagtgtgatgattgggttttgacatgcaggtgtgagatgtgccaccctcaaaccttgttacaacatagacatgtgaccctctgatgtgggcaaaaaaagactaagttattaaatatttacaaagtctctattttccgtaagaaaatgtatgtaagtgtttaaaggcacttactggaggaggaaactagtggggttataggtgttcagctggatttaaggggagcatggattgtagattcatggtagactggggcagatcacagtgagaggtatggagactactaatgaatatgtgaggatgaataatgagaaccctggcttgaccagagtggaggcagcacccctggggaatggtcaggatagctgttagccaaagaccacactgaagaaagaagtgggtaggcaaaggagagactttgcctgtgttaagggtttgtagcagaagagtaggggtcctggggacagggaaatggagaaattaagagtgagctggtatttttattttgtctggggcttgggggtagggaggactcagacaattgcttgttttactttgtgagaacttggcacgttttctgatttttacctgtaataatgattacacttgctgcttatgtccttgaaccactaattccccaaataaaccatcattgttcatgatttctgatactccactgctcagtcttctcaatccattttaagtgtgtctatttgaatatgctattgataactttccccaatgaacttggccttttccctctggaggttctgtccttacagattggtttaagtaataccttttttgtttagtgttttatggtttcctaagtgctttgctttcttttttttcattattgaaattaaagaccttttggataagcagagactgatttaataaaattaaagacctttaccagtaggtcatattaaggaatccctctactttagacgacacaccatcttttaagggcttgtgaaatgtcctgggtcaatttaggaagtcattttctttgcttgggcccagaccaactctgttagcaactctgttaggaactcttgttaggaaactctgttagtttcctagggggtgctgaacctagtacgacaaactggatagtttaaaataataaatgtattctctcatagttctggacgctagaagtttgaaagtgaggtgtaggcaggccacgctccctctgaaggctctagggaagaatccttcctaggcactctcccagcttctggtggcttctggcaacccttggtgttccttggcttgtagatgcgtcactccagtctttgcctccactgtcacatggcattcttcctgtgtgtgtgtcaaaatctcactatccttataaggacacctgtaattgcacttagggcacaccctaatgtccagtatgacttcatcttaactaattacatctgcaaagaccctatttccaaataagctcacattcacaggaacctagggtcagaacttcagcgtatcttttggcgggggatacagttcaaccactgcaaagtctaataatgctcttcctactaactgcatagctagttcacttgtagttggcatcatggagaactaagggaagttaaagcttgtgaaatttaactcttccacttaaaataattgatgcttccatccttgatgaccagagtttcctgtgaggtaggtcagagtacaacttcctgctgagtagctgtgcttcctttcactaggagctgggggtactttcatgtcacttatgaattgttcttcattttggtttgggagagggctgggagtatcagttagggttccatgtgtagccacacagggcgaagctctggccactggatctgtgtgatgttccatctgatctgtgaagccccaccatctgttaatgtgtatttgaggagtggttggttctttccagagtataaagctggaagcagagtctggaacacttccagtctgttgtctttgaacatttgacaaagggaccgtacgatcttactgttcagagtatcttttttttttttttttttttcttttgagacggaggcttgctctgtcgctagctaggctggagtgcagtggcacgatctgggctcactgcaacctccgggttcaagagtttctcttgcctcagcctcccaagtagctgggactacaagcgcgtgccaccacgcccagctaatttttgtatttttagtagagatggggtttcaccatgttggccagaatggtctcgatctcttgacctcatgatctgcccgcccttggcctcctgaagtgctgggattacaggcataagccatcgcgcccggcctgttcagagtatcttttgcagaatggctgaagctcgaggttttcttcttcaccattatgtactgctgctgtacaaccttttcataattatccttagtcccattcctctaccaaggtgaaagcaacatcttatcagacccgaattatgaatttctcaagcccctatgattttctgttttgggtgccaagtatttatctcttctgttagactatagtctttcttcacatagggttcatgtctatattggttttatccatgggtggtttttattctccagagtgactgacctgttcgtaattccgttcttgagaaggattgttgattatgttgaagggaaggcttcttaccaagattttcagattttgctttcaatgtttatctttttggggttttgcaggtgacagagctgaatgaacctctctccaatgaagatcgaaatctcctctctgtggcctacaagaatgtggttggtgccaggcgatcttcctggagggtcattagcagcattgagcagaaaaccatggctgatggaaacgaaaagaaattggagaaagttaaagcttaccgggagaagattgagaaggagctggagacagtttgcaatgatgtcctgtctctgcttgacaagttcctgatcaagaactgcaatgatttccagtatgagagcaaggtgttttacctgaaaatgaagggtgattactaccgctacttagcagaggtcgcttctggggagaagaaaaacagtgtggtcgaagcttctgaagctgcctacaaggaagcctttgaaatcagcaaagagcagatgcaacccacgcatcccatccggctgggcctggccctcaacttctccgtgttctactatgagatccagaatgcacctgagcaagcctgcctcttagccaaacaagccttcgatgatgccatagctgagctggacacactaaacgaggattcctataaggactccacgctgatcatgcagttgctgcgagacaacctcaccctctggacgagcgaccagcaggatgaagaagcaggagaaggcaactgaagatccttcaggtcccctggcccttccttcacccaccacccccatcatcaccgattcttccttgccacaatcactaaatatctagtgctaaacctatctgtattggcagcacagctactcagatctgcactcctgtctcttgggaagcagtttcagataaatcatgggcattgctggactgatggttgctttgagcccacaggagctccctttttgaattgtgtggagaagtgtgttctgatgaggcattttactatgcctgttgatctatgggaaatctaggcgaaagtaatggggaagattagaaagaattagccaaccaggctacagttgatatttaaaagatccatttaaaacaagctgatagtgtttcgttaagcagtacatcttgtgcatgcaaaaatgaattcacccctcccacctctttcttcaattaatggaaaactgttaagggaagctgatacagagagacaacttgctcctttccatcagctttataataaactgtttaacgtgaggtttcagtagctccttggttttgcctctttaaattatgacgtgcacaaaccttcttttcaatgcaatgcatctgaaagttttgatacttgtaacttttttttttttttggttgcaattgtttaagaatcatggatttattttttgtaactctttggctattgtccttgtgtatcctgacagcgccatgtgtgtcagcccatgtcaatcaagatgggtgattatgaaatgccagacttctaaaataaatgttttggaattcaatgggtaaataaatgctgctttggggatatta

SEQ ID NO: 52 - DNA, 33831 bp, Homo sapiens
gcggaatggggcgggacttccagtaggaggcggcaagtttgaaaagtgatgacggttgacgtttgctgatttttgactttgcttgtagctgctccccgaactcgccgtcttcctgtcggcggccggcactgtaggtgagcgcgagaggacggaggaaggaagcctgcagacagacgccttctccatcccaaggcgcgggcaggtgccgggacgctgggcctggcggtgttttcgtcgtgctcagcggtgggaggaggcggaagaaaccagagcctgggaggtgaggggcgggcccgtcgttactttttatttgatgttagtcccagaaacaaccagagctcagttcctactaaactaacgggtgttttctggtgcagcatagaccgaagaagacgagcttgagctgaaattgttcaagttaggcatacatttatgtgtgatttttggaaaggcggtggtaatgtggtttatttggctgcagatgcttgtcagctttttacacatctccgttgccaaacgtttcttaaccaaatccaaaaccatgaatgaaaaggtaaaaatatcacacctaatccaaaattcaaaggaaaagagcagcgcatatatagcactacgcatgcataacgccatcattgttccttttaaaagttcaaggaacgttttacttaattcattgaagttgggagccatttctgtttatttttgtttaatctctgcctcgtggaactgtgatgtccacaaatagtttattttaacaaaacgaagtgtgtaaaatttaacagagtacttttagtacctactcactctgctcagcatcgtggtgctgcaaataaatgagaaaccagatgagtaattataggttaatctttgctactcgttagacagagtattactgcatatatattaagtcatttatatactttatcccacctaggagctcaaactatgtagttggaaagtgtcttcatctctcgttaatgaataaattgtaactgaaattgtacttcgaaagaatgatagaatttggatattggaggaggttccaaaaggaaatactggaagtttgggaaagttaggagactaacttggagcagaaatttcattcaattattaaagggtttagaagcctagcagaaaaatttgaatttgatgtggtgggtaaggtgagtaattgaagtattttcatacaaatattatatgatgcgttaagtgtttttataaggattaatctgatagcagagtgccaaacattagagaagagaggaacaagtgataataattatgaagatactttacacctacgctttctattgcaatactctctaattcagatgcagcttttttggaaaagtgactttttctgaagtctttctttggtccagtccttttatgaacagtttttaaggctgtgacttagatgaaaatgtagaatgcatatttatgctgaagggaacatctaatatgtgatgcatcagaatctggattccaaaagatcccagctctgtggcctggcaaggtggcttatgcttgtatcccagcactttgggaggttgaggtgggaggatcacttgagcccagaagttcaagaccagactgggcaacatagtgagaccctatctccacacacacacaaattaacagggcgtggtagtgtgtgcctgctgtcgtcctggctacttgagaggctgaggcaggaggatagcttgagcctgggaggtcgaggctgcagtgagctgtgattgtgccacactgcactccagcctggatgacaaactgagaccctgcctcaaagaaaaaaaaatagacaaaacgtcctagctctaaaaggaaagcttgcaatcatgaaatttaatagtagaaagtacaaatccttgcttaagtttcaaataatcaatttatacaacaagaacacaagtgacacagcagatggtgaccaaaaaaaaagagagggaaagggggaaaaaaagaacagggagaagccgccttgatgcaagacggtcatgatgaagttcttggagtttcagttgatcagtaagtgctacagcagaggccattatactgtgccctagaccaaccatatctggagtgtcgtgttcagtttgggcactacattttaagaagacatttacaaaatagtgtgtgttagaggaagatgaataagatggtagtttctaaaacaatgtcatataaggagtattttgaagttacatatagccatacataaagaaattatacttactttaaagaagggagggcttagcagaggtgtaatagctttcttcatgtttttgaaaatggtgtcatgtaaacagagattaatatattctatttagttgcagtgactacataggaccaggaggtaaaattaccacaaaacatatttccacacactatgaggaagagttatttaatttggaaccataataaagtgggaaaaagttgcattgagagtgaattctgtgatgttgtcacatgttcaagttgaattgggaagttatttgttagtggttgtttagaattgcttccatttattagaggttaggcaagttgccaaagctcccctttttaaccctaaaattctaaaaaaattaggagcctaaagaaatagattgtcagaattgtggcccatttcaatttgtttgcaaaattgaatatattcacattgggtctccgagatcattttgcttcactggagagtaggggatctgaaggtaacacaacaggtatttaagggagtggctgagagcaataacagtggctgctattgctgctcatttctctcttgctgttactactgctatttttgtggttacagggagagatatgaagaaaatgaaaagatccttacttaccggaatctcacaatgtggtgtcagagttctttaaacataattccagtacattgtaacaagtattataacaggggtaaatgcaaggctctaggacaaggtttcttttcttttctttcttttttttttttttttttgacacagggtctctgtcacccaggctggagtgcagtggtgcgatctcagttcattgcaacttctgcttcccaggctcaagtgatcctcccacctcagcctcccaagtggctgggactacaggcataggccaccatgcctggctaatttttatgtgttttgtagagatagggtttcatcatgttgcccaggctggtcttaaactcctgggctcaagcgatccacatgctttggcctcccaaagtgctgagattacaggtacagggttttttaacatcagcatttattgaccttttgaactggataattctttgctgttgggggccaccctatacatcgtaagatgtttggcagcatccctggtctttatccactagattctagttgcacccacactcctgtgctgacaatcaaaaatgtcttcagccattgccagatgtgcccttggtgataaagttagagaactactacgctagggggacacaggtaggaataactcactacgtgaagacattaggagaaatggttttttgttttcttaaaattctcactctggtgataggatttcctatcaattatatcatctattcttactcagttttttttctctcttctatttgcatctacaaccttattagccatctcactatatatgtaatgaataggatgtcaaaactgaatacaattttttatgccctatattactgttgtttatatatagcttctgctgatgatgttgcctatatgccttgctttgagaattaattattaggattggtcttgttaagctccgtggccctcaaatgtaaaagagaagcacgtggtttctcatctatctattcaaccaaagtcctccttcccaaatgtgttgttctcttcctacaaaagagaacgacactagaaaattagcagaaaataactgtgtcaccttagaataaaagtaattttaggatacatatataaatacttgtatttatcttactaagatatttgatgatagttaacactactatgaatagttcaactttggctcattttgtcattatgtttattagtttccagataatgagaactactgatcatgtggtatttctcattgttttttcttccttcagattaacaggaaacttccaagatggaaactttgtctttccccagatataatgtagctgagattgtgattcatattcgcaataagatcttaacaggagctgatggtaaaaacctcaccaagaatgatctttatccaaatccaaaggtaaaaggtggttacgtttgcatgtggataatggtatttagggaaaaagtaagctactaggtctattgtgtggcaagaaagggatatggcctcctatttgatggagaccagtcattttcattgagagagaatctctcacctagcataatttaaaaataacactaagtttatatgtgtggtgacttctacattcccattaggattcaattctttaatatagtcgttttcttaaaaaaaaaaaagcttctaaaccatattaaagtatattaaattttttattattattattggaatggtggtctgagagtatcatttattgatagggcttcaaggaacttattccaagtggttttcaaccacaaaaaatgcttagaaataatcctctttggaagcctacagattaattttcatgcattatgccccagggggaattgacttgttttgacaggtattgttttttatatctttagttattaaatacaaaatgaactatttatgtgtcacagaaaatcccaaagtctccttccagtttcttgtgttggacttgaagtgataacgtagtaaaacctggtgtaatggtgtagaactcaaactttctgatgtcactaccctctttgattctcgaaaatggaagaaataccttagaataactgatgtcttcaaactgagtaaattcagctttcttaaaagattaccacgttttccctatatttcccgtcttaatgctcacccaataaacttgtattaatatatggatcagaacagattcacaggtcagcatttaggaactgctgttttagaagatccggtttttaaaattctatataaccctattacatttatacctcctgatcaagtgttcccttaaacttcaaatctaaggaaaccttaatatctatggcagcaaacaaggtttcctgtgttcacacacacacacacacacacacacacacacacacacacacacattttccatgtgccattatttctgccacatgcctgacagcctgttctgaaagattaactcttcttcttctatttcctaaggtggatgggttgcttggattggatttgggtatacttgctctcattcttaaacagctgatcccattgaccacttatatatgagcaaactaagcatcataaggtgttttaaaatttggaaaaattaaggaatatttcaagggaaatggaataattttgttgcctttttcttctttgctttcatcgattataatattgtatggtaatgatgatagtgacatagctttagagttatgcatcggagtattcaaagttgttttttgctgtagcctgaagtcttgcacatgatctacatgagagccttacaaatagtatatggaattcgactggaacatttttacatggtgagtttaagatgaggcaaaattatggggttttttttgtttgtttgtttgttttgttttgctgcagttctgcttacaatgcatactggcttttaggataggaagttcttgactttatttttaacaaattcaaagacatataaaattagtgtcacttacaatgggatcttatgcacaataatggtttatatccatagatttagtaagatgaaaaccatagtaaaagacttaaatgacacagatcattgatgcaatgcaattgttatagatttataggtttgttttcagagactacaataaacaatagctaagtcttcatattgttctcttttcaggaagaactcccaaattagagtagaagatatgcagtaagattgaaacaattgaaatgaggcaactgagcttttagcaaattatttgcataatacctgatatttagtaaatgctaaccttattccatttttaaaattcatttaaaaatctttattaagcacctactgtgaacctagcattaataatgatgaaaactctgcatttatactaggatatgtattaaggtttttaatttaatgatagtgagttaatatattttgatcttggttgaagatttttctcattttgtctaatcaatgtgtaatgtcgattttgtggtttattgcatttagatgccagtgaactctgaagtcatgtatccacatttaatggaaggcttcttaccattcagcaatttagttactcatctgtgagtaaagagtgattttattgtcttcgtctacattcgtatttatattacattaagttttcttaatgacatggttttctttggtaaggaatacctactatgttccttttcatttcatcccatatacattcattcaaactttcaaaattgtagactgtcatcaaacagaactgcctccaactgtgccactttctcagcatattttcaattgaacttctaagatactgtaagtcgaaaattgtttaccgtctttgtgaagaggtttgagttcttaaaagagtcttagtgtcaccaagtttatgtactatttattagaatctgtaactatactttagtattgcatgactacatgattaatatacagaaaaaatagatttcagtgctatagggttatacattatagtagaattctggcttcgtccactgaccttaagaaatatatccagaaatctctttctgaaaataagatgtttatatcctatagcttagcatttaatgtgcaaaatacttttcaatagtctttttgtacttcatcttcaagggactcatttttgcctatctgccgggtgaatgactttgagactgctgatattctatgtccaagtaagtgagaatttaaaacagttttaatgtctggcttcgatctaccatttcacctttccatcagtaaatgtaaaaaaaaaaaaaaaggaaaaaaacaacttcaaggaaattgcctttaaaaagtatatcccatttttaagtatgaatttttaatatcttgttgaatttctttttttccttttgagagccacagaaaagctgtttttctgatgtttttttaaaactccttccatttaaaaagtgttctataaatttgggaatatgactacaaataatatgtaagtatgattttgcatagtggattcatcataccaattttatcaaatgtaagaattactatttaccatatagaaattatcttttatcattaaaagaatagtcataatgttatattagaatgtaaaattctagctttaattgtccttaaattcgactttgatatttatccatcaagttactgtaagttaagagatttggtgtgtgtattaggctattcttgtattgctataaagaaatacctgagactgggtaatttataaagaaaagggatttaattggctcacagttgtgcaggttatacaggaagcatgatgctggcatttgcttgcttttggggaggcctctggaagcttagtcatgacagaaggcaaatggggagcagacatgtcacatagccagagggagcaaaagcacaatggggaaggtgccacacacttttaagtgaccagatcttgtgagaactcactcactgtagacaggacagcatcaaccatactcttaactttacaatccagcaatcatgctccttggtatttagccaaatgaatcgaaagcttatattcacacaaaaacttaaacacagatgtttagagcaactttattcataattaccagaatttgaaagtagccttggtgaatgaataaactgtagtacatctagagaatagaagttattcaacactacaaggaaattagctagcaagctatgagaagacatagaggaatattaaatgcatattattaagtgaaagaagccagtctgcaaagcctacacagctatatatcattctggaaagggcaatattgtggagacagtgaaaagatcagtggaaaccactggttaggggtgagggagggatgaataggatccctttagcactaaggatttttagggcagtaacaatactctgtatgctactctaatggtagatacttgtcattatgcatgtgttgaaactcagaatgtacagtaccaggagtgaactctaatgtaaactgaatttgggatgataatgatgtgtcagtgcaagttcatcagttgtaacaaatataccactcaggtgaaggaagttggtggagaggagtttgtacatgtgtggggacccaaggtatatgggaactatctacttcctgtttagatttactttgaacttaaaactcctttcaaaaaggaagtctattaaaaattaattgactgtatatttgtctatttttgagctcgctattctactccattgatctgtatgtctatctttatgtcaagcagtactttgattatttagctttacagtaaattttgaaatcagtgttactcctctttcttcatctttgtcaagattattttggctattctggtcctttgcatctctatatgtattttagtatttccagcttgtcactttctacccttcttcccctgaaaaagccattttgattgagattacttttaatgtattgttcatttgggggatatttgacaatttaataatattgggtcttctgatccatatgcatgctatatctctgcatttattaaggctgttaaatttctcataatgatgtactataaatttcagagtgcagaccttgtataataaattttgttaaatttatgcctaaatcaaatttttagtggttctgtaaatttaatttaaattttctgattagtcattgttagtgtagacaagtacaattgatttttatatattgactttgctaaaatcacttattatttgagtagatttttttttttgtagattccttaggattttccttattgacaattctcaatttttgtttgaggacaaaatttttttctaatagagatgccttttattcttttttttttttttttacgtttctgcactggctgggacttttagtataatgtcgaattgaaatgatgagagcagtcatcattaccttgtttctgatcttgggggaaaccatttagtctttcattattaagtattcgttgtaggatttttcttagatgttttttatcagaatgtacaacttttactttatttcactgagagtttttatcatgaagggtattaaatgccttttcggcctctagtgagataatcatgggttttctcttttttaatctaccaaattacattacttgatttttgaatatcaagccaaccttgcattcaggatgtgtcctgattggttatgatatatttttaatatattgctagatttgatttgctaatattttattaagtttttttgtctgtgttcatgatggatattgttctgtagtttttttgcaatgtcactgcagtgactgatctgaatatcaggatataccagtctcatacaatacatttggaaagattcccgcttccatttttgggaattgttttataaaatttgtattatttatttcttttttgaatatttggtagaatttaccagtggatctatcttggattgcagttttctctctgggataaattaagaattcaaagtctttaataggttaagggctattctggttgtttattgtcaaaactcctgagtgagctttggtgatttatttttttaaaggaatttttaggttggcaaatttgttaacataaaattgttcattatattcccatattattttaatgttattggggtaggtaataacatcttctctatcatttctgtcattaataatttgtttattctttttttttcctaaccagtctggttatcagcttatcacttttcaaagaactagcttttgacttaattgacttttctgtatttctggtttttgattattattgaattttgagcttattgttattctttcttcatggttattttgggtttcatttactctttttttctagttttgttttttttaaggcagtaagccaagtccattaattagatacctttcttctttcctaatataggtatttattgctgtaaatttccctctagcactgctttagctgcatcccccaaaccttgatatgttgtattttcatttttattgggttcaagatattttctaatttcccttttgatttcttttttcatgtatgggttatttataagtgtgttgtctgctttccaaatatttggggattttcccacaattttttctgttactgatttgtaagttatttcttttgtgatcagagaatatactttgtatcatttgaatccatttaaatgtattcacacttattttatggcccagaatatggtctatatttgttcactatggtggctgtaataaatcaccacaaacttggtgacttaagataacatacatttattctcctgtagttctagtggtcagaagttcaaaattggtttcactgagccaaaaccaaggtgttactaaggttgcactccttcagatggctctaggagagagtcagtttctttgccttttctagcttctagggttgcatttctcagctcatgacctttctgtctttgaagccagcagtgtagcatatttaaatctgtttctactttcatgatcacattgctttctattttctgtgtatagtccaatctctctctactttcctcttataaagacacttgtgattgcatttagggcccacctagatattctagaataattttctcatttcaagatcttcaattatacttataaagccactttgcaaataagataacatgcacaaattccaaggagtaggacctgaacatctttgggtgctattattcagcccaccacatggtctacccttgtaaaagttccatgagtgctgttgttgatgagtggagtgttttaaacatgttaattggatccagttggttaatagcgttgttcaagcctactgggtccttacagacttttttcctggttgttctttgaactgttgatagagagatgttaaaatcttcagctatgattgtgagtttgtctgttttgtctgttcttttaatttttgttttatgtaccttgaagctctagttttagaagtgtacacatttagaattgctatatcctcttgatgacatagtctttgttctgaaatatacttgattttatattaacatagctacttcaggtttcttttcattagtattaccatgccatatcatccttgtaacttgtgcctttggattcaaaacgggtttcttgtagacagcatatggttgggtcttgctttttaaattcaacatcactatctcggtcttttaatcggagtcttagaccatttacatttaatgttattattgatatgattgggcttaaatccacctttatactatttgttttctctttgtcctgttctttagtcctgttttctccatttcctgccttattttggtctattaaaataaattttattttatataatactatatatgaaaaagatattctaccttgtctgttattggcttatcagctatatgtctttttaaaatggtatttgctccaagtttcagtatacatgtatatatctttaacataccattgtctatcttcaaatatattataccttacaataatatacttttattttctccactactggtctttgtgctattgtgtcataaattttacttttacagatatcataaacaccttaatcgatattagatttgtgtgaaacagttatcttttaaaggattttctattttgacatttaaaaaatacatgtagtgggtacaagtccacatttcttacatacatatattgtgtagtggtgaaatctcggcttttagtgcacccatcactcaagtagtgaacattgtaccaaatcagtaattttccaacccttgtccctctcctaccctcccacattttgtagtctccagtgtctgttctactttgtatgtccatgtgtacccattatttatttcccacttataagtgacaatgtgcagtatttgactttctgtttctgagttatttcacttaggataatggcctcaagttccaaccatattgctgcagaagacattatttcttctttttagtggttgagtagtgttctctggtatatgcataccacatttttaaaatccaatcctccactgattgacgcaggttcattttatatgtttgctattgtgaatagtgctacaataaacatacaagtgcattaatctttttgatataatgatttctttcttaaagggattttttatatgaggaaaaatgtcttctatattaactcacattcttgtaagtacaccaaatttccatctggtatgatttttcttagacatgaaggattttatttaacacttattgtagtgctgttaaaaagcctttatttcactttaatttttgaaaggtatttttcttgaggccaggtgcagtgactctcacctgtaatcttatcactttgagaggccaaggtgagagaattgcttgagtccaggagtttgagaccagcctgggcaatatagcaagatcctttttctacaaaaaaaatgttaaaaatgagccagatgtggtgatgcatacctgtaatcctagctattccagcagcttagaggggagaatcactggagaacaggagttcaaggctgcagggagctatgatcgtgccactgcatcccagcctgagcaacagagtgagacctgcttctttttgagaaggaaagaaagaaaaatggataaataaaaggtgtttttcttgagccctcggtggatatgaaaagtcaacttttcaatccacagttggttaaatctgcagatgcagaatgcacagatatggagggctgactgtactatgccattttttgtgtgtttgtcttgttttgttttttttgtttttgtttttgagatggagtctcgctctgtcaccaggctggagtgcagtggcacagtctcggcttactgcaacctccgcctcccaggttcaagtgattctcctgcctcagcctcctgagtagctgggactacaggtgcatgtaaccacacccagctaatttttgtatttttagtagagaaggggtttcatcatgttggccaggatggtctcaatctcttgaccttgtgatccgcccacctcggcctcccaaagtgctaggattacaggtgtgagccaccacacccagccactatgccaggtgtaagggactggtgcatccacagacttgggttctctaggcatcttggaaccaatatctagcagatactgagggactacagtatagaattcttagttgacagttttttcagtgctttaaatatattgctccattgtcttctggcttacattgtttctgatgagaagtctattgcttttcttatctttgtttctctctatataatgtgttttgttttcctctggctgcttctaagatttttttgtcttctaagctagttgttagccgtttgaatataatgtgacttttaggtgtttgtttttggtttttttttgtttgtttttctgttctttcttccctccccctacacccctgcccgccatttacgtttgttcactttcttggatatggttattgtttttatacaatttggaaaatattcaactattctgtaaaagtctttttgtccctttttgtaggattccaattacacattagttatgctgtttgatattgtctctcagctcacagatattgtattcatttttttctctctggactttattttagataacttctattatgtcttcaacttcatgaatcctttttattttaggtctgaactactgttattcccatcagtgtaatttttatttcaggtatttttcaactctaaaagcttaattcagatcttttttaaaaaatctttgcttttatttcttcatattgctgattcttttctctatcccctttatttatttataaaggttgttttcacattcttatctactaaatctaccatgtatgttatttgtgttatgttttaatatgtttctgttgattgattgtattttcttattatggatcatgtcctttttcttggcatgtctggttatttttagcagatgccagacattgtgaattttaccttgttggttaactgagaacctgaggggattcctctacagatttccagaactctttctctttacagcttcctcatcttaatactcagttccataaatcctagttgctttggcttctgcaaactctaaactctgtcttcttgacccagcaagatgtacaagttttatttgtgttctctttctctggagtacagcctgtaaactcttcagtcatggactggtgcagtaatggaattcacctcatttgtttctcttggagattgctgtcctatattgccttttatccagcatctaaaatttgttgcttcatgtatttttgtttttctagttttttaatatgggagggtaattctggtttctgttatttcttcatgaccaaaagtggtttacctttttttttaaagttattaatacaaagataatttttacctttaagttagagcagattttctacactttgttatatcctatacagttttattttatatattatgagcagaatatatagtggaagaggatgaattttcattttcatattatgttagttcaaaggtttatttaaagagtcttgctttctattttagaagcaaaacggacaagtcggtttttaagtggcattatcaactttattcacttcagagaagcatgccgtgaaacgtatatggaatttctttggcaatatgtaagatttaaatatgttttggggttacatgccagatcagtaacattatttatgaacttataatctgttttgaaatgattgtcatagacagcaaattgctgtattgcctttagaattgaactcatttttatatttatattaacttgcagattttagttactggatagcatatctcagaatcagattttctttgaaatttggtaacactatggagaggctgagttctgtttgttttaaaatcttgtagctgaggcttgttttcctatattaggaaatgttagagaatattgatatgtttacatttttttctttgaagtttgcgtagatagtgtagcttttattaaataacggacatatttgaggtttatatttgccttttaaataatggcataattggactgtttgtggtggtgtttatcatgcttgcccagattcagtccaaggcaatctctttaacagacagaaactcattttcctttcatcaacaacttaaagaactgggggagattatgggtcatctgtgtgatttttcccatttgtcttcaataatggggtaccatactcttagaaaaacaccagagtaactccaaacacttagaccctaggcttcagctttactgagctatatagatccgtacttctttgcacaaatcatgctaaccttataactcctaaacatcatataatcttcaaagcttaccacattcatgtgccaacatacacacactctcataattttgcttggttaattactatctttaagacacacctcagacatctatcacctctatgatgtcctatcacccttcttcccagccattacccaagttgggttagatgtcactcttgttggttcccattatatgaaaaataacaagctattttgtgggtttttattcttgtatctggctcctcaaggaggcttagctacttaaggtcaagacctataagttagtcttcttgagaattctcagtaccgagctcagtgcctatgatgagaatccagcatttgtgttgagtaaagaaattcctaattcatttgtcatgaaggcctaactctatcttaaattttttatttctgatggttcaaactatagtatgagtaaacattttggacacactgattgtgttgaaatgcactaatatgagatgattaaaattgctttaatagaaatcctctgcggacaaaatgcaacagttaaacgccgcacaccaggaggcattaatgaaactggagagacttgagtaagtgggagatttacaagtaaaataaatgcaatttcaaaatgcaaaatgaattgtaagtagtattttacaaccctatattccaccttaagtctcttttatctcccttaataaatagcagagtatttgagtttgccttttcttaaaaaaaaaaaaaagaaaaaactagtttttcttctaactcttaattatataatacatcctttggcttttgttgttgttgttgttagtgtgttagcctgatttgtttaaagccattagcttactgtcctgatttatgtctggaatattgtcttatgtaggtgagcagtaactgcctggactatcttccttcagatcagttgattccatcaaatgtttactcctacaacaaagttttcatttatttgttttgtttttgacttataggttatgtagggaaaagaatcactcaacagttgtgatttcttggccttccttatatatatatattgattttgagcaggatttttaaaatctcttctaatttatagatgtctttgaggttatctgttttagatgagagattttctaacctgcccctggttaaaattgcctttacaggcagacattagaatataacagggtaaaagatgccaccaactaaatcaaaacaagaatgacaaagtggagagaatatttgcagcacatgccacaaagccttaccaactctaataacaaaacccatgtaatattcctaatatacaaatataatatgcagaactacaaagcagtcctgtaaactgacaggaaaaatgataactttaaaaaaatagacaaaggctttaaacagggagtttatataaaaatagctaatatatcagataggcaaaaactaaatttgaaaacgttcttatagaagagacttgaacacgtgtaagtgttgtaaggaaggactagtagcggaagaatggatggtatgggagtaagagttgtgaggcaatgatagccagtgcagaggtagagaaatcagcattaccagaaggcatacaatattcatgttattaggagtgaagttagaaaggataggtatgtgtgtggatggatccatagatttgatagtagaaaactgaaggagctcatgtgatttttattttctgcctgtagtagaggccagatcattcattttaaatgattgccacatgaaagggtgtaattcagaaacataaaagtagacaatttcttcatctcagttatttgaggacaggtatttcattttagcctttcaaaagtgaagagcagtattttaatctattttgctgtgttaagttctgttccagttgaagagcaagaagagttcaagcagctttcagatggaattcaggagctacaacaatcactaaatcaggattttcatcaaaaaacggtatctgttgtgaggcaccttaaactttaaaaaacaaaatttgtttgtagatgtggtgggacatatagtggaggtaacagcacattgctttctctattaccaaagaaacagaatatatttctgtgcccatttgtgccccttataatggatacatacttctctcaaccatctagaaccgtgatggtttttgttggcaaagttttttgttgtcttattgaatagaattttttagggttttcctaggtttaatttcactgcttccaaaccatgcactgtggcaccctggatactgcagtaaaccctcaagaatgcctcaaaatatcttaaattttcaagggaaccactgtagtactcagcatctgtcatatcctttttgaattcaaggtagttcacagtttcagtttttggtcacattcctttcatatccttgtgcagctgggattttggtatttgctgtgataaaagcaagtacaatgtaaaaatcactgtgacacaggaaatgagaatgtctatatccaatctgaaatatacgctccaacgtacgtgaatttatgcagtgcccaataggtacatacatctaattaggaagtactcgaggttatttaagaacaaaataaaaattttttctttcaacttatatgtattatttttcaaagggctacaatgttaggacataaatactaggccattatttggagttaactacttagtaaaggaactcttagatatttcttttggcttaggagcatcatgaacagagaaagtttgaagaatatctgatctaacacatttaactcctttcttaccttaattttatgagacagcagtgagtggctaaatctaaatgttttgaatcattataaaacgtgtttgctttttcccttagatagtgctgcaagagggaaattcccaaaagaagtcaaatatttcagagaaaaccaagcgtttggtaaacatcttttcttttcactagcatttaaagtttgaatatattgtgtggaggagtattttagctgtgtgtgttattatgggcaaatgtttctccctttttcccttcaaaatgaaacaatctttttcaacttaaatataatagatgactattgttttaaaaaatatcgaaacacagaaatgtatgaagaaagtaaacatcacctgaaagctcactatacaatctgatttatatcaaagattgtatttgctatgcaaatgtaaatatgcatgtgtaattttacataaatgatattaggctcaatacatcttacctgcttttttctccacttagcgatataatacagttatgaattttaaatagatcctcattatattaatgcttgcatctagttgagcattatatgtatgtgctgtcttgtagatccttttaatccccttctgatagacttttacatagattctaattttttgctattaaacagaaatatatgtatgtgtgtatcatatgcatacatatgtacatacatacatttctgcaacaggctgcttttatttaaaataaatttttttgtttaggatttctgggtcataggaaatacacatgtaaaattgaccaatgcagccaagctgatttctagaaagataccaatttatattcctaccagtagaacaagagactgtccctttccctatacccttgccaaaactggatgttttcaggcttttaaaatctttgttactgttacattgaaaaaaaaatctcattttatttgtacttattttattttttagtttttttgagacagagtctcactctgtcacccaggctggagtgcagtggcgcgatcttggctcactgcaacctccacctcctgggttcgagcgattcttctgcctcagcctcctgaccagctgggactacaggcttgtgccgccacacccagctaatttttgtgtttttagtagaggcggggttttaccatattatgcaagctggtctcaaactcttcacctcgtgatccacccgccttggcctctcaaagtgctgggattacaggcatgagcgaccacaccaggccaaaaaaatctcattttagtttaattgctttaattctagtgattttgtccatcttgcttagtgatttcttgttatttcttattttgtatattgtttgtgtaccttgtttatttattttatttatttatttattttttgagatggagtctcactcttttgcccaggttggagtgcagtgtggcatgatgtcagctcactgcaacctctgcctcccgggttcaagggattctcttgcctcagcctcccaagtagctgggattacaggcatccaccaccactcccggctaatttttttgtatttttagtagagatggggttttaccatgttggccaggctggttttgaactcctgacctcaggggacctgcccacctcggcctctgaaagtgccaggattacaggtgtgagccaccgcacccggccacttatttatttttcaagaaactccatgaattagggattttagctctccatttatttgtctgtcaaatttatatattttttgcccattaaaaggtttatgtttttatgtagtaaaatttatagatacggcctttatggtttttggctttaattgtgtacatagaaaggacggtcctattcgtcagattattttttaatactatattttctcattgtacttttatagtttccttattgttttaaaatgtatactttagatccttgagaaacttactctggtgttatatttcccttatttttctatctttttttttgctgggaaatgctttcatctgagtagtacttactatggctcaattttattgtttatttatttctgtctcatttaaatccaagttaaaacaagcactttgtacttattaagtttagaccttttataaagaggagaaaagtgatgaaagttaacactattgtaaggaaaataacctctaatcttgtagagcattaaaagagtagataatgtggtggtttgcagaactctaagaatgaaataacaaaatatacagaaattacaggaatgcattatatctaacattcagttttggcgtctgagttagctgatcaaaaagtaagaatcttttcttttaagttaaaaatatttagacaaattacacaacacagtaatacattcctgttatgaaatattctctctttacatacacacacccacacatacatatatatatatgtatgtatatagagagaggggagtatacacacatatagagagagacagagaagggtacgaaatgtgaaaggccttctctcagcccattttaccttgaggtaatactattcccttcctttttccaacatcatatgcatacacatatagaggcacataatcatgtgtcactgttttgttgttctgtttttatagaaatgtatttatgtgttatatgttgatctgtgaattggttctttcacttaatatatctggaaaatctttcctgtcaatacatagagtcatagagggtccccaaacaatgtaaatacaacttatcaacaaatatctgagaagaaaattcataggaattttttttgacataatttcagacttacaacaaactttcaagagaatttccagctacccttcactttgattcttcaaatagttacattcatttttgaaattcaggagaagggaatttgttttcattcagcaagcatgtagtgagcaccttctcagtgctatagctttgtttgggtactgggaaaaccaggatacattttcacaactccaatttgctcagtcttatgaaacacatattaagtacataattatagtgttgcatgtacaaaaattgtactatttaaagaagaaatgtagagaaaatgggagcaggattttcagggatcagtacaaatttagcaggcagaccggagtgggataatgatattctaggaggaccctactggtcaaagaaagatcacttatacttgtctaaacataagatcagaattaccagattgtagggtgcagtagggaactggtgggagatgagactagacaggaagagagttaagagccatgtaatgaaaggctttgaatgtcctgctaaggagcttgatctttggcctatagacaaatgtgagcaattaagtaggtaagtgatgtgttcagaatttaattttaccctcattacagagaacatggacctaatttctttgttctttcccattactagaatggtaaatcaccaagtttattatatctaatatataaaaatgttttctcaacagaatgaactaaaattgtcggtggtttctttgaaagaaatacaagagagtttgaaaacaaaaattgtggattctccagagaagttaaagaattataaagaaaaaatgaaagatacggtccagaagcttaaaaatgccagagtgagttttctttttattttaatgcttttgtatctaaaaaaaaaaattagcaaattcttgtttaattatgtgttaatttttggatttctgaattatctatacttctcttcctcttaaacttttttgaccttatttctaatctgtagcttttctctagagtgaatatggggaaaataaatataatttcaagacatttgttcaattatgcaacaatttttcgaggcttttctctgggagatcaaaacagaaatgctgggtggtgagatttaattactttattacaagggaggaaagtattaagtaattttacaaacaattgtaattataaattacaatatatactataacaaagtataaggtatgcatgtgtgtaggtaggggtatacgagaaatctctgtaccttctgattaattttgctgtgaatgtctaactgcttgaaaaattaaaatctattaatggtatcagaaagaggaaagaaagtatagagtgctttgaaataatgtaataaggggagcccagtttagtattgggctggaagtacaggtggaagagggaaggaagaatgctaccattcttcagatcgtagcataaaaaaaaagacgcttttcattttaaacatagcagtaccaaggcccaattcattgtgtatggaagaatattaaaggcagagggaacagcgtatgtgaattctgtggggtagtggggagtaaggtgtgttcaagattatgggttactgtgggagatggattgacgtggtgcaatacaaacttagaagtgggtagacaatttaccatcttttgtgaagcaatgtttttaaactattaatttaaaaaacatatgtggtttgtgtttgaatttgttattcagttcattcttgacaattaagattaccacactagactagacaaagatcaccagaacagaaatgagaacccagaaatagatttgagtattaatgagaaaaggatgatttatttaagaaacagttctggctcaattagctattcatctggaagaaaagggtgttgggtctacactttgctcttttacaaaaataaattttgtatgtattgaaaatttaccttaaaaaatttaagttttacagattttaggagaacacttatataatcttggactgagatagatttttgaaattaagattggaaacagaaaatctatagagaaaagtagacacattagaacataattacggtgcatatgacaggtagagggattatatccatgatttgcaaagagtattttacaaattagtaagaaaaagaaaaaaataaggtagaacaaggggtaggctagtgaggacaagggaaggaatctttgtattgttaccatggttgtagtaaatatatgttcattttgtaattttagaagatgagttaatgtttttaaaagaattagctatagtagtcgttattatacaaatgaatgggaagattataaatgagtaatacgattgattgcccaggagtaatcagaaatagtttgagtattagcaaaataaactattttaatatcatcattattaacttttggaaggtatttcattgagtagtaaaattatggcacttttcctttgtttgaagatacttggcaattaaaaaacaattatttgtgcttaaacacatgtcagtaatagtgctgtattactgacctagaaatttaattgttccgtgctcttaaggtttcagtattaaatgtggaaattatttaagagcaaacaaattgatattactgcagcttcataaagaagaatatcaaactgtggtctctgttttttgtctttcaaagcaagaagtggtggagaaatatgaaatctatggagactcagttgactgcctgccttcatgtcagttggaagtgcagttatatcaaaagaaaatacaggacctttcagataatagggaaaaattagccagtatcttaaaggaggtttgtattgtatggaattttgatgtctttattatataacagcttactatagttccttgtattttgctttcactttttgttatgttttcctaaagaaaaacagggtcattctacagtataatagatgtggcaatgtatgctatgaaaaagacacttttctttttaaacatagcagtagcaagacccaatttttaaccttctgatgaaattaataataactaacccatcacattgctgtgtatattttggaaaatagtacagtagctcccccttatccttaggagattcatttcaggacctccaggggatgcctgaaactgtggatagtaacaaaccttatatatatatatatgttttttcctttatgtacatacctatgataaagtttaatttaaaacttaggcacagtaagagattaacaataattactaataaaagaacatttatagcaatatactgtaataaaagttatgtgaatgtggtctctctctcaaaatatcttattgtactaaaatcaataagtttagtacaatgatgtgagatgataaaatgcctacataaaaaattgaagtgagatattgctaggctactgttaatcttctgaccatacatcagagtaaggatcatctgcttcaggtgatcctagatcctcaaggcactatgatgtcgacagttggatgttgatgactaaagagcaagtggtgtatacagcatgaatctgctgggcaaagggatgattcacttccagggtcagggctgggcatggtggctcaagcctgtaataccagcacttcggaaggctgaggcgggaggaccattgagaccaagagttggagaccagcttgaacaacatagcaagatgctatctctacagaaaattttaaaaattagccagctataatggtgtatgtctgtagtcccagccacttgggagtctgaggtgggaggatcacttgagtcaagactgcagtgagctatgatcatgccgccacacttccagtctgagtgacagagtgaagccccatctgaaaagcacacacacacacacaaacatccagggtggaatggagtaggatggcgcaagatttaatcacactacttagaacagcacacaatttaaaactgatgaattttttatttctgatactttccatttaatatttttagaccacagttgaccaggggtaactgtaaccatggaaagtgaagccatggataaggggaactactgtcatgggattttaaatttgttctaccagttggaaatgatcttagcatcagaaagttccaacttagtgcccaacactgtatctaggacctatagagagatttaaagtttattacatagtctgccctgaagaaatgagagctaagggcggtttctcaggctacaagcttgaaaatccttttttgcttcttaacttgatcatcttcatccaggctgcgcctccaggataactaacattacatttgataaacaatttcttttttgagataagtagggattagaaggtgagattgccccaggtattctttcccaactacatagtcccctcatctgccattgtgttacccaaaaaagatgtgtatctactgctttgaattgtttctagcacctacccttttccctttatttgtactactttagttcagatcctaacccctcaactctagtctcttagctaatcttaacatgtctccctttcagtctgtactgatagaaaacacctctctagttgtcatgtcctttctcagtatctctgatgcctccttgttgtctcttctggttcatctgcatttttctgccggactttcaggttttaaagagttttgtctctttttaaatttgtgtttaattatagttcatcctagaaaatattctttcattttatttctaaatcctaattggttatgttgactttaaatacttcttataaaatacagagcctgaacttggaggaccaaattgagagtgatgagtcagaactgaagaaattgaagactgaagaaaattcgttcaaaagactgatgattgtgaagaaggaaaaacttgccacagcacaattcaaaataaataagaagcatgaagatgttaagcaatacaaacgcacagtaattgagtatggagttgttttcaattttagtgtattagaaagcaattatgaaaaacaaatacatttttcccccaggatttcaaaacctcggtattttccaaaagagtttaaacagctttatctttatttcacctttagttgactaaaacagatgagttaattataaaacttatactgctagttctagatttagagatgtcttagctactcttttcctgggtatacagttccaattcctttgcatcattcttcagaagggttctgatgctactgattatttcattgcactttagagatagtggtctagcttgcatcagaattaactaaatggcctatcttatagtccagcttgtctgtagagttacagcatttgtgttttgagaaaaagtcatatattcaggtaagaagtaatactttcctaagtatgtaagtatgtttttagctggtacgttagggtactttattggtaaaatacccatcagttctaagaatgtgtttttaaaatacctgccccagatatgtctataatctcattccttcagttactaaaaggtgcgtcagagatcatctgagtatttccttcatacttcctcttgcagatgaaaaagggcagaacttaaggattttatgtttgttgccaaactgccttgtagaaaagttaaactgattcacattcccaccaacagtacctaagtgtgtacaactggggaaatgtaacttaaaaaatcttcattttaaatattgattgattgattgatttactcattcactaacccaccaatgagggaaaaaaaatctcattaatatattgagagaaagagttcacactatgttgtgatgtgattatagtaccacactttggggttttcattcctttgcttttatatcttgagaagagttttaggtttgtcaaatactgacacatggtcactttggaatcaaaactagaattgtgtttgcctttttagttgctgaagaggattaaatattagctgtctcgattttctttcagggattgcaataaagttcaagaaaaaagaggtgctgtctatgaacgagtaaccacaattaatcaagaaatccaaaaaattaaacttggaattcaacaactaaaagatgctgctgaaagggagaaactgaagtcccaggtgaatatgtgttcataagaagttaatttcaaataatctctcatgtatttgagttgttaactgaaacaaaacagcttacttggtctctgtgtaatgagacttttaatgatacctaaaattatttactctttattcttgttttgaatatatttactgtaaagcttcataaatagtcctaagtttaatgagaacaggcatcttgtctcctacatttttatctttaaaaatgctagtacagtgctaaacataaaatgtttacctgtttctattcttttaactgccaatgtctctaacaagtagtatattcctaatatatttattaaatatttattgtctccttatcttttgaagtttgatttatgtcttcaagagtgttctaccagaacaatagttcaaactgctctgccagaaatcacaaaaaattgctatttattatgcaaaatcccttagcctctttttttttcattcttcaccttgtttacattgacaacttagattgaggtttctaaaaccgctgatacctgataaatagttaaacatttgctgccattactttccgtcatccacacccaatttgtaaaaattcttaatactaacagagccacagtagacaattcccttatctgttctcagtaccttatcccccagaaagattatgttgttagcacttgcacatgtgagcattatcttaaggctactttaaaaggaaggaaaggaaaggtagtggagtgaggaaaggaagagggaaactggaaggaaaagaaataaaatggttgggatttcacgtccatggtcttcccaatacctggcctgctcttttctgttttttgtttttttttttctatacctcaactacttttatttttcctgcctcttaacttgatattcaccaagagtcagtctctctagtatggcaattagaaagacttagcagatattggctgggcgcggtggctcatgcctgtaatcccagcactttgggaggccgaggcgggcggatcacgaggtcaggagatcgagaccatcctggctaacaccgtgaaaccccgtctctactaaaaatacagaaaaattagccaggcgtggtggtgggtgcctgtagtcccagctactcgggaggctgaggcaggagaatggcgtgaacccgggaggcagagcttgcagtgagctgagatcgcaccactgcactccagcctgggcgacagagcaagactccgtctcaaaaaaaaaaaaagaaagacttagcagatatttaatcctgcttcttaaccgaatcaaatcaataaatatttatgtgttactacatggtctaggaacagttagtgaaccagttactaacaatttagtaactagttactaactcaaattcgaggcacctttgtctatcagtcataagagatacccatgcctaccttatattactttgagttttatgcatatatgtcttgccagttacattttccatttcttaacagtagcaattgtctattgttaaccttagcatatcatgtcaaaccatgcctagaatggtgccttatgtgtagtatgttttccataaatatttataaaattgaaaggtcatctagcatggtgcttcttaaaactagctgtgtattcgaattcagtgaggaattttaagatgaacaaatcctcacccaaacacattgattagcatctccagcaatggggcccatgaaatgtgttttttaatgtggcatttgagacccactaataggcttggcttaattgtgttcaatggtatagagttttcaataggtatggccacccaagctgttctactagggcagctttaattgttaaaattctgtctcttattttgagtttaaaatatttatttctgtactctatagtcagcccagatcttctctgtggagcaaatgtgtacccttttctgcttaataacccttcagacatttgaggataatgatcacggtttctttcagccttctcatattcaggataattagtcctagttttccaccattctttatatagcttcattttcagatttattactatcctatttactgtcatctctgtttcctatttgtcattattctgcttaagatttacaacccagtgctaaacacagtcttccaaaataatgatgtgaccagccagacccaaaacacatttttagtgaagcataatattggggtagatttttagcagcagcatcttgcccttgacttatattgaccttgtgatcagttaaaggactcctgtcttttccacataaagttctgccttgttaagagtttttcaccatactttagcacaactgttacttttaattcagaattttacttttttaggttttatttatttcaacctagatttcaaaatgtcaaggttagtttaaatctatcattctgtcttccaccttaactatttctcattgcttagtgtcacctgcagatttgatcagcatgcctttttcttcaaaataaaaatgtttactagaacaaggtcctttgctgcattataattttttcatcctagaggcgtagaactattgatcaaaactttgggtacaattcttcaacttgctaagttgttcttacctaccttgattcaggctacgttgtgatatctatttgttacacaaatgggaaggtctctaaatactttggtaaaatcaaatactttttgtcaaagaactcttcttagcttactttataatcatccttcatgaaaagaaaaaaggatatgattgccaaattgttctttgtgcagttctgttgcattttgtgatcatcatagtcttttttcattaaatgttctttcccatagataatttatctcttctagtttcaattattatcttcatttggatagctttcaaaaatctatgtttcttgttctgtccactcacaacaaaaataatattttaaaattacattcaacattttcccacatctgaccttttcttcactttctttcccttttctttttctctcttttgctcaacttcttcataaatttctttgtatttctcaattgcatcatcattttctatcacaaagcattgaaattttggacttgctttagataattctgacatccagataatctccaagttaatttcatgattgcttttacatggtggtactcttcatacatgtacatagcccttcatacatacagcgctcttattattatacgtctgtcacataattttgtagtagtcatggattgcagcaacatttgctaagtttctttgattttagattcttctgcatcaaatatgccttgaatactaagtactaccacatttatcctgctaaaatattattctcaatactacactttcttgtttaaaacaagggccattttccttcagttcattcattcacccagtcagtatttcaacaaatggccaatgtatctgctaggtgtcaggcttcacacttgattcagagagtaagttgtgaacaaggcaggaatgatttccacctctaggactttcaaaattttctgtctggctgggtgtggtggctcacgcctgtaatcccagcactttgggaggccgaggcaggcggatcacgaggtcaggagatcgagaccgtcctggctaacacagtgaaaccccgtctctactaaaaatacaaaaaattagccgggcgtggtggcgggcgcctgtagtcccagctactcaggaagctgaggctggagaatgtcgtgaacccgggaggcggagcttgcagcgagctgagattgcaccactgcactccagcctgggcgacagagcgagactccgtctcaaaaaaaaaaaaaatattctatctaagctaatcatttccattatttaaggtccagtagaaactatgtcttccacataactttcttttacttctttgaagtatctttctgttctctctcaaatactatagcactctcagtctattccaaataatctggatgtgtgctgtccagtggggagctattagtaatatgtggctatttacatttaaattaattacagtgaaataaaataaaaaattttgttctttatttgcactagctatatttcaggtgctcgatatccaaactggtctggttatatgttcatttaggaaagaaaccataattggtgtctttcattgtactattgtactatttacagtgctacttatacaaagtacccaataatatattggttgactaatttatacgtatgtgataaatggctacactggctgtaagactccatggatagtgtatagtcttaaatatttctgatttgaaaagtgagatagttatctagactgacactgtccaacagaactttctgctgtaatgagaatgttcttctgtattgctgaatactgtagccagtaggcacatgtggctattgagtccttgatgtgtggctggtgcaactgagggactgaatttttaatttcatttgattaaattaaattttattaaatttaaatagtagccacatgtgtctagtggttgctgtattcgacagtacagaactagcctttgactttaaaaatatttaacttcaacgaggccatcacagtaaaacttattatatgtgaattagggtggattaatatagtaaaattccacttggatgtagaatttaatcgaaaatgctaaaatacatagtatttgtcagggatacgatctgtcaccattaaacatcttgtgagggttggcttagaacttcaaatgtttttgtctctgtgcctgtgccactggaattgggccttaatgtttcattcacttgtggctctactagcaggattttgctcctccttgagagtgttacttgttctcggaaggaaagtattcctttgggtattttgaaatggttggttcagatacatacagattgtatatcttaatttagtcacacttagttctgatagtttctcataaggaatatcttcctaccaaatttattcagctttcttttttggaatgaataaacatatacccctatagagctagaaagttaaattgatttatagctgctgaatgtgctgtttttttataatggcgttcacacaagctagcaactaattcaccttatttttcctacaagatttaagaaataaagccttcaaaaattttgatttattttcctattggttcatattctatcatagttgtagtaatttgatacctgcttagatctcagaaatctaaacacactcttctatttttgtgttaggatttaataactatgtttggatttttggagaatgtttagtcttaagcatatatttacattcacttaatctgtagtaatagttctcaaacttgcataggtggcagagttgctggaaatagggttctttttcggaatactgtgaatttatactatatcaaattataatctatgtaatttattcaaaatcagatcgtatctctgctagaatttaaactaaggtaagtagtagccaaaattttaggcttaagaaaaatttagtgggagagacacttaaaattgagaacattgtattcatttactgcttttcttcccccactggaaaaagatgactgttttatttcagtggcaaaacacatcctgtaaccttgtaaaataccagtttcttgtggtattatgtatattatagtttaagaattgttttgtctaaaagaagtaaataatggaaggaggatcaatattatatttgacaagtatgaaatagaagaaaatgtgtacacgctaatttttttcttatttaatctataaaaattgttgttttattttttaaaattcttagcacatccatataggcttgaactatctgatcagtttattcaaacaactctacaaggtattaatatattcttcagtcctatagattacttattaaatgtttgcataccttttaaatgataatcagggtcaaatgcagagagtatagttatccacagtaatgtagttattttccatgtttaacatggaaagctctaaagtaaaatttttccttgataattataaatatgtttgttcttattgtattagaatcctaaccattgtctcatgtcgctcctttgttccttaagtagcaaactttttgatgtgtttgtacaacttacagaatgaatttttaattaaagcagacatagacatgcacatttgtgtgtgtgcataagaatttaggctttaaaatattaataaatatgaataaacttggaattcttataactcatttgtagtttaggttgttgcatggaataattattattctgtttcattttctacttaggaaatatttctaaacttgaaaactgctttggagaaataccacgacggtattgaaaaggcagcagaggactcctatgctaagatagatgagaagacagctgaactgaagaggaagatgttcaaaatgtcaacctgattaacaaaattacatgtctttttgtaaatggcttgccatcttttaattttctatttagaaagaaaagttgaagcgaatggaagtatcagaagtaccaaataatgttggcttcatcagtttttatacactctcataagtagttaataagatgaatttaatgtaggcttttattaatttataattaaaataacttgtgcagctattcatgtctctactctgccccttgttgtaaatagtttgagtaaaacaaaactagttacctttgaaatatatatatttttttctgttactatc

SEQ ID NO: 53 - DNA, 19455 bp, Homo sapiens
actgaaagctccggtgccagaccccacccccggccccggcccgggaccccctcccctcccgggatcccccggggttcccaccccgcccgcaccgccggggacccggccggtccggcgcgagcccccgtccggggccctggctcggcccccaggttggaggagcccggagcccgccttcggagctacggcctaacggcggcggcgactgcagtctggaggtgagcgggatgcagcaatggagtcccaggcctggcctgggcacaggcggggagcaaggcctccgggcgcggaggtcagggcgtctagcagcagggcacgggccacgagtggagatttgggtcacacgggaagaatctgagccagggtgcaagttttttctgcgtccacctcctggccgtggccttctcactgcttaaagcgccccttggccttccctggaagtctgacctccgcaccctgcccgcggcctcgggagggctggggtggcctaccttcttaggccgactgtggctgagatgaagactgagattgtactacattgagtcaaagaccaacctgcatacacactcccctgctcccaggctgtctcaccactaggcaacaccgcctccatcttacttacccttttgcagggcccttttcctggttcttgagaatgtagcaagatttccccgctcaggatggggatgggtcggaggagccactctggaagtttcccgggcaagaaagtgttggcaataataataacgggctggtcaggaagtagaagagaaaattaagacttagatatcctgtggaaaaagaggaataatatctactgattgatgcggggagagagggaagcctggaaagatcggaggtgaaagtaaaactgagatttgaaggtagaggtgtggagggcctgtgaactctatgcagatgacaaatgtcaaaaaagtgcagttgcttttcagggagagaataagtgtcctaaaaaagagacagccaattcctctgtcttccaaagttccgtgaaatagaattacacaattttgcttaatggtagaatattccatgtatctattaaaatcaacaaaaggccgggcgcagtggctcacgcctgtaatcccagcactttgggaggccgaggcgggtggatcacctgaggagttcaagaccagcctggcaaacatggtgaaaccctgtttctactaaaaaaaaaaaaaaaaaattagctgggcatggtggtgcatgcctgtaattgcagctactcgggaggctgaggcaggagaatcgcttgaacccgggaggccgaggttgcagtgagctgagattgcgccattgcactccagcctgggtgacaagagcgaagctccgtctcaaaaaaaaaaaaaaaattaaaaaaaatcaacaaaagacttaaaaaaaaaagactacactgttagcatttcagaaccaccttagtgtaatgatgatagctcattgtggtactaagaagacaggggttatagtcttatttctggaaaagaaattaataaagtggcatgcttagttaaaatatatataaccacatgcaagtactaaaatgccactgtataaatacaatacaaattgtaaaagaaaacatgctttttaaattagagcaagtataatagcctgtgaaataaatgtcaccctctagagttgttcagtgcacaagctgcacaactttacatgggccttcagtagaggtttccattttatgtgaggttttgtaaactgggagatgatttttccagtagtgtggcaatagtacaatctgcctttcttccctgattctgtgtgcactggtcctatttacaaagtaatataaaaatcaaaaggcttggccagacgcggtggctcacgcctgtaatcccagcactttgggaggccgaggcgggcagatgacctgaggtcaggagtttgagaccagcctgagcaacatggtgaaaccctgtctctactaaaaatacaaaaactagccgggcgtggtggtgggcacctgtaatcccagctactcaggaggctgagacgtgggactcgcttaaacccaggaggcagaggttgcagtgaactgagatcgtgccactgcactccagcctgggtgacaaagtgagactctgtctcaaaaaaaaaaaaaaaaaaaaaattaaaatcctttgtcttgaatggattatgggatcagagtttcatcaggactcctaattaccatatgctttcctattctagcatcttccatttctgtccatacagtcattgcaagtgatctatttatattatagtaggcaattatagagatttccacatatttgtagctatcccatccatttctgtagccaaatattctgaagcttcaaggagatctttgtcttatctccaacccagtcccatttttgccctttgaattgcttctgtctgctgtaattttagccttcttttgtcagtaaagcttatctccttattatctgaggtctttacaaaagtccatggaatgtttacctgggcctttaggctcatgttcctggtcatataaagaggagcacctttctctaaaaggacctcttctcagcctaaacaatctctaacatcttgccactatttgcattttccagggtccacacttgtgattctcaatggagagtgaaaacgcagattcataatgaaaactagcccccgtcggccactgattctcaaaagacggaggctgccccttcctgttcaaaatgccccaagtgaaacatcagaggaggaacctaagagatcccctgcccaacaggagtctaatcaagcagaggcctccaaggaagtggcagagtccaactcttgcaagtttccagctgggatcaagattattaaccaccccaccatgcccaacacgcaagtagtggccatccccaacaatgctaatattcacagcatcatcacagcactgactgccaagggaaaagagagtggcagtagtgggcccaacaaattcatcctcatcagctgtgggggagccccaactcagcctccaggactccggcctcaaacccaaaccagctatgatgccaaaaggacagaagtgaccctggagaccttgggaccaaaacctgcagctagggatgtgaatcttcctagaccacctggagccctttgcgagcagaaacgggagacctgtggtatgtggtcttccagggaaaggggtgagggagcccagcctttcctctgtagtggcaaggtgtgtagtcagtcttgatgcttacaacagtcaggcttctggccgagcacagtggctcatccctgtaatcccagcactttgggaggctgaggcgggcggatcacttgaggtcagcagtttggactagcctggccaacatggtgaaacccgtctctactaaaaatataaaaaaactagccgagcgtggtggcacacgtctgtagtcccagctactctggaggctgaggcaggagaatcgctgaacctgggaggtggaggttgcagtgagctgagattatgccactgcactccagcctggccacagagggagactctgtctcaaaaaaaaaaataaaaatgaaaaaagaaggggtctcaaaaataaataaatgaagaaggggtctcactatgttgcccaggctggtctcggactcctgagctcaagggatccaaccatatgggcctcccaaggtgctgggattataggcatgaacgacagcgcctgacttcattttccttcttttttttttttttttttttgagatggagtcttgctctgttgcccaagctgtagtgcagtggtgcaatctcagctcactgcaatctccaccttctgggttcaagtgattctcctgcctcagccttctgagtagctgggattacaggcacccgccaccacacctggctaattttggtattttttagtagagacaggggtttgccatgttagccaggttggtcttgaactcctgacctcaggtgattcgcccacctcggcctcccaaagtgctgggattacaggtgtgagccactgcgcctggcctcattttccttcttgataaaggagaaaactgaagcaagaggaggaaaatgactttttctttagagatgcggtctcgcactgtcacccaggctagagtgcagtggcgcaatcacggctcactctagcctcgaatgcctggactcaagccattctcccacatcagcctcccaagtagctgggactataggcatgcaccatcattcccagttaattttttttttctttttgcagagatggggtcccactatattgcccaggctgaaaagtgacttttttggtgtgcatatctcaataattcttttgtaagcctgccttgattgatctctaaggctcagtgtggctcagcttgaaatgcaatttgaactatgctcctaaatttgtcctgaaatgcataatggggcagagtaacttagagccacaatagattcagcatgtgttctccgtccctaaaggcagaggtcttggacaagtgatccctagccaccaattctttcttttttattttttatttttctgagacagagtctcactcaggctggagtgtagtggcgcaatgttggctcactgcagccttcgtctcccgggttcgagcaattctcctgtctcagcctcctgagtagctgggactacaggcgtgtgccaccacacccagctaattttgtatttttagtagagacgaggtttcaccatgttggccaggctggtcttgaactcctgacctcaggagatccacccgcctcgccctcccaaagtgctaggattacaggtgtgagccactgcacccggcctgctagccaccaattctgatggacacacctgggcatctgatgaggcagctaagtggggtgttggattattttccctctagcagatggtgaggcagcaggctgcactatcaacaatagcctatccaacatccagtggcttcgaaagatgagttctgatggactgggctcccgcagcatcaagcaagagatggaggaaaaggagaattgtcacctggagcagcgacaggttaaggtgaattgttccgtccctcactaaagaaatcagatccagtgtagggaattcctaggtagggaaatggatcaagtggcctgatggaccagaatttccaagttctggtattagctctccacttcatgctattctgcataacttttgagctatttttctgcctgggatcttttctctcccatctgtgaaatttccttgagggcagagtcccttggtcactctgtattccagccagcactgggtttagtattttgtccttagtaggtattcaggaaatgattaagaggtcttcattttgggaatccacctgaactttaaagatgcttcccaacagtatgaacagtatgaattgaatagaatacaacaagttaattttattagaagatataatattaatagcagataaagtcagttatatatatacacgtatatatattttttttttttaagacagcgtcttgctctgttgcccaggctggagcgcaatggtgcagtcatggctctctgcagcctcgacctccagggctcaactgatccttctacctcagtcttccaagtagctgggacttgccagcttggtgcatgccaccatgcccagctaatttttgtattttttgtagagatggggtttcgctatgttgcccaggctgatttcaactcctgggctctagtgatcctcctgcctcagcctcccaaagggctgggattacaggcgtgaaccaccagcctggcctagatacgaattttaaatacttctctagcaatcaaaattgatctaacccaattgtgtagtctgggtttttttcccacagttaccaatataacacatctagattctattgtatatatgtgtaaatcactcattcaacctttattttcttttttttctcaacttttattttaggttcagggggtacatgtgcaggtgtgttacatgggtatattgtgtgtcgctggggtttagtgtacaaatgattttgtcacccaggtagtgagtatagtacctgctaggtagtttttctgtctccccctcctcccactctccaccctcaagaaggccctggtgtctagtgttcccttcttcatatccatgtgtgctcaatgtttagctcctgctttttttttttttttttttttttttgagacgtagtctttctctgtctcctaggctggagtgcagtgctgcgatttcagctcactgctacctccacctcccaggtcaagtgattctcctgcctcagacttctgagtagctgggattacaggtgcccgctgccacgcccggctaatttttgtatttttagtagagatggggtttcactatgttggccaggctggtcttgaactcctgacctcgtgatccacctgccttggccttccaaagtgctgggattacaggcgtgagccactgcgcccggcctctttttttttctttttgagacggattctctctttgttgccaggctggagtgcagtggcacaatctctgctcactgaaacctctgcatcccaggttcaagtgattctcctgcctcagcctcccgagtagctgggactataggcgcccgccaccacgcccggctaatttttttatttttagtagagatggggtttcaccatggtggccaggatggtctcaatctcttgacctcgtcatccacccgcctcagcctcccaaagtgttgggattacaggcgtgagccaccgtacccagcctagttcctacttataagtgagaacatgcaatatttggttttctgttcctgcattaaatcgcttaggatcatagcctccagctcaacaatctttaaaagtgaaaatttggccaggcgcgataactcatgcttgtaatcacagcactttgggaggccaaggtgagtggatcacctgacgtcgggagttccagaccagcctgaccccgcctctactagcaatacaaaattagctgggtgcagtagtacatgcctataatcccagctactcgggaggctgaggcaggagaatcacttgaacccaggaggcagagcttgcggtgagccaagatcgtgccattacactccaacctgggcaacaaaagtgaaactctgtctcaaaaaaaaaaaaaaagtgaaaatttacatgcgtgtatatgtaagtaaatattaattgtgctatatacataaaatttgtgtactttagaaagtaatatctccaattttaaaaatgtgaatgagaccgggcatagcggctgacaattgtaatcccagcactttgggaggccaaggtgggcagattgcttgagcccgtaagttctaggccagcctgggcaacatagcaaaatcctggtctctactactaaaaatacgaaaaaaaaaaaaaaaatcgccaggcgcaatggctcatgcctgtaatcccatcactctgggaggccaaggtgggtggatcacctgaggtcaggagttcgagactagcctggccaatatggtaaaccccatctctactaaaaatacaaaaaaagtagctgggcgtggtggcaggcacctgtaatctcagctacttgggaggctgcagcaggagaatcgcttgaacccaggaggcagaggttgcagtgagccgagatcgtaccattgtactccagcctgggcaacaagagtgaaactccatctcaaaaaaaaaaaaaaaattagctgggcgtggtggtgtatgcctgtagtcccagctacttggaggctgagacaggaggatcacctgagcctgggaaggtcaaggctgcagtgagctgtgatccagccactgcacgctatcctgggtgacacagtgagaccctgtctcaaaaaaagaaaaagaaatgtgattgatcagctctttgcctaaaacttagctaactgtgtgctttgcagacattgtctgactcatagtcttgagaatgtttctctcatacaaacattgaaatgagatgcgtttattcacagcacatcaggaacagaaatgggactaagacctaggtttctagacccaaaagtctgaaaaacgggcgtggttttagtgtaacatcaatgctttgagaatcaaagtacatactcaaactttcctaagaaatttcaactggaagggactggattttctccaaattcaacaaaatgatggatgacaaaaccagtttcttattggctagggtctaggctagatcatctccaagattcttcccaactctaaaattttattctatgagatagtggtctcagatgagtttgtttctagaccgtcctatgggataaaggtttctctagatgttcttcaagggcttgggttgggggtgcttctcatgaactctttcatgtcattccctgtgtcataaccctcaggttgaggagccttcgagaccatcagcgtcctggcagaactctgtgtctgagcggccaccctactcttacatggccatgatacaattcgccatcaacagcactgagaggaagcgcatgactttgaaagacatctatacgtggattgaggaccactttccctactttaagcacattgccaagccaggctggaaggtaatgtgtcccacagcaaccaaaatcaaggtcagcccagcctgacagtctctccagtgctgtactgcaacttgtatctgggacagcagttaagtgcaaaggacactagaatgataaacaaatgtatcttttagattgtgactcaatcttattgaatccaggcaaaatcattaagaagagctccttaactacttcatgtgttactacctaaagtccatggagggtcttcaatgtagcactcaagcccacttttctgctacactcaacagccgtcctagatgccagcagctagagtggctaagtagttttatgaaaatgtcttgattaaaaaaaaaaatgctgtctgtgagcctcatgacccaagatgtcatctcctgtagcgtcacatagcatttctagtgggcaggggttttcctttcacttcattcatggaaagaccgagatgcctgtgagtcaacatagctcacgcagttggtcggtgtcagagccacaaatgaggtcttctgacgggtgctcaattccaagtcaagtgtgctttgttttcctcatggtagaactctttcttttttttttttttttttttgagacagagtctcgctctgtcacccaggctggagtgcaatggcagatctcaggtcactgcaacctcctccgcctccaaggttcaagcgattctcctgcctcagcctcccgagtagctgggactacaggcatgcgccaccacgcctggctaatttttttgtatttttagtagagacagtgtttcaccatgttggtcaggctggtctcgaactcctaacctcaaatgatccacccgtctcgacctcccaaagtgctgggattacaggcatgagccaccacacctggcccctcatggtagaactatgttttttttttttttgagatggagtctcgctctgtcacccaggctggagtgcagtggcgcgatctcggctcactgcaagctccgcctcctgggttcacgccattctcctgcctcagcttcccgagtagctgggactacaggcgcccgccactacgcctggctaattcatggtagaacttttaattttactcccttccatcagcttactttcctagttttttgtttgtttgttttttgagacagggtctcaccctgttgcctgggctggagtgcagcctcagccccctgggctcaagctcttccctcctcaacatcccaagtagctgggataacaggtgcaccaccacagtccgctaattttttttttgtagagacagttgcccaggctggttactatgttgcccaggctggtctgaactcctagtctcaagcactcctcctgccttagcctctcagtgcactgtgattacaggcgtgagccaccacacccagccttaatttcctagtttcttgtttgtttgtttgagacggggcctcactctgtcacccaggctggagtgcagtgacatgatcttggctaacttcaacctctgcctcccaggttcaagtgattcccctgcctcagcctcccgagtagctgggactaaaggcatgcgccaccatgcctggctaatttttatatttttgatagagacagggtttcaccatgtttgctaggctggtctcaaactcctggcctcaagtgatccactcaccttggcctcccacagtgctgggattataggcgtgagccaccacgccgggcctaattccctagtttcttaatttctctgagccacctttcttgctattgatcactacctcacagccttactctgcttttctagcccctgacagctatctaggtcttttctttatcacaatctaaggttggcatcagtctttattcccgtagaatagatgggtttatggctgaaggtgacggctctgcggtgtggagtgtcaggagagttgccaagagggctgcaaagacaccagacgaagcctgtgctgagcacagtgggaggggcctgaggctggtttccccatgtgtttgaagggtgatgtttctgaatctaaagtagctgataaccagttgtcttgctcttcttccagaactccatccgccacaacctttccctgcacgacatgtttgtccgggagacgtctgccaatggcaaggtctccttctggaccattcaccccagtgccaaccgctacttgacattggaccaggtgtttaaggtgaatgccctgctttcctctaaatagggcctaagttggaggttgtcatagccatctcaaaaggaaacaagttctgctagtgatgctttcatttgatcaggggagagttagaagccagccacccaattagtgacttgcacaaaacccagtgaattaagtacacttgacaaataccaaatgacacatttttgtgccagaccagagcaaggagaaggctgttctgacccaacagaaagggctccccagggcagtgttttcctaacttccctgtgaatgggaattgcctgggacattgttaaaacacagcttcccagacccctctcttggggctcttgatttagtgcttctgggatgggcccaggaatttgtatttttagcaagcatctcaggtgattcttacaagaaattctgggaatgcttgctctaaaaaaagcccttcctgctgggtgtggtggctcacgtctgtaatcccagcactttgggaggctgaggcaggtggatcacctaaggtcgggagttggagaccagcctgaccaacatggagaaactccgtctctactaaaaatacaaaaattagctgggtgtggtggcgcatgcctgtaatcccagctacttgggaggctgaggcaggagaatcccttgaacccaggaggcggtggttgtggagagctgaaatcgcaccattgcactccagcctgggcaataagagtgaaagtctgtctcaaaaaaaaaaaaaaaaaaaaaaaaaagcctgccttaggctggagaccagaagctgagctaccagaacgtcttttcagaaagaagttattttggtttttcagagtgcccataaggctgctggtagctgtaaccattctcctgggaggggcagttgtctggggtgtcttttgtcatcagtcaggaataagtgtttttcccaatccggtcaaattgaccacgttggtggtaacttcatctcatttctctcccacaatgcctggccgccaccagccactggacccagggtctccacaattgcccgagcacttggaatcagtaaggttctttccctctggctcggggcttggccttgttttcctttcactgctcagcatggctttagtggacagagacaagatgtgatgtggggaagggtccctatggccatgttttgtctaggtgccagccctagacacagaacaccctgagggtcaggcacacacccacttccctccccttccatgggcatcacaagggcacactgagcagagcagggcacagcaggggagcatgctgcagcagccacaagcgcatggcaccagcctcaggggcggcagttcgttcgctcacttttgtgcctagcttttctttgccacgcatatagctacctgctctggcatcccccaggggtgttgaggacacgtgggtgaagcggtagtgccactctgccatcatgtgtctgtaggccacccacctgcccactcatcacagttttggagactgctcgcctacgtccatcccctcaggttggcctcctctctctgggctgtcattaactcaagcacacaccaccagagcagctggtggggttttgccatcccctctttaccttattgtgttaacataggtttctttctctccccatctgccacaagcagcagcagaaacgaccgaatccagagctccgccggaacatgaccatcaaaaccgaactccccctgggcgcacgttagtatgggagagtgggccttgggcctggtccttgttctggggccatatctttagggaaccagactctgggattctgttcccacctcaaagggatctgagcccagagaaggagagcaaagctcctggggctgagaaggggtgtactccagtccccctgctcctgatctctcgtgtttcctcctagggcggaagatgaagccactgctaccacgggtcagctcatacctggtacctatccagttcccggtgaaccagtcactggtgttgcagccctcggtgaaggtgccattgcccctggcggcttccctcatgagctcagagcttgcccgccatagcaagcgagtccgcattgcccccaaggtgggtgtcctattttcctctgaagagagattctggccaattaagaatgttggaccttcagcttgcaaagcactctgataagtgttccttgagagcttataaatctagttgggtagaaaaggcataaaaacatagggaagtgtaatagcattagaagagctaaaaaggtatttggattacaatgtaagtggtgtcagaaggcccataaatacctgatgagcttgtaagaattcagacaaaagtgattgtgatagatgggctaggattattaaggaagatacacaagggaggcaggccttagaaagagatggatttggccgggcgctgtggcttacacctgtaatcccagcactttgggaggccaaggcaggtggatcatgaggtcaggagtttgagaccagcctggccaacgtggcgaaaccccgtctctactaaaaaatacaaaaattagctgggcttggtggcacatgcctgtaatcccagctacttgggaggctgaggctggagaatcacatgagcccaggaagggaagttgcagtgagccgagatcactgcactccagcctgggtgacagagcgagactctgtctcaaaaaaaaaaaaagaaaagaaagaagtggatttgaggctagacgctgtgggtctcacttgtaatcccgacactttgggaggccgaggcaggggtattgcttacagccaagagttcgagaccagcctgggcaacatagcaagaccccagtctctgctaaaaatgcaaaaaaaaaaattagccacggtggtagtacatgcctgtggtaccagctactcaggaggctgaggcagaaggatcacttgagtccaggaggttgaggctgcagtgagccctgtttgcaccactgcactccagcctgggcaacagtgaggccctgtctcaaaaaagaaaagaaaaaaagtagatttgggtaagcaaacaggtgtagagagagcatgctaatgggcagtgccatggaggcgggaaatgcagttcgtacctggcagtagtaaagtgactgggtcagactaactcagggtttctcaagtactattcacgttgacagctggagaattctttgttgggcgtgggagggactgtcctgtgcactgaagggtgtttagcagtatcccttgttttccccactagacgccagtagcacccaccacaggcgcggcaatccaaatgcctccagacattgccaaatgtcccctggcagggagggaatcacccctgcttgagtatcactggtctagcttgaggggaaggtgagaagggtaaattcagagccaacttggatcagccatcagatctgcacttaacactgttaaagggttctgtgagtacgggctgacatgtaaccaaagtgaaaagcttcccccatccccttcagagagatgaaaatagcatagagtctggagtttagagcgacttgggtttgctttttttttaatatataaaatcttttaggccatgcacagtggctcacacctataatcctagtattttgggaggccaaggcaggaggatcacttgaggccaggagttcaagaccagcctgggcagcaaagtaagaccctgtctgtaacaaaaaaaaaaaaatttttttttaattagccaggcattttcatgtatacctgttgtcccagccacttgggaggctgaggcagaaggattacttgagctccagagctggaggctgcaatgagctataatcgtgccactgcattctagcttaggcaacaaaatgagaccctgtctctaaaaaacattttctttaattataaataaaacatattacacacaaaattataccacacatacataatttagcgtaaattcattcatgtggccgtagcatgtgccctgtttgggttttcatgcagtgggttttctcccctttcctttttggctccctctccaccctaccatcacccacatcacccctactcccaagataactggttgataatttatgatgctttcttgcatattttatcaatgctcttagttatactatacatgtatagcgatagccattttatatgtacacatacaacacacagaacattgataatgtaatcatgttgtgcatacttctctacatgtctctttttttttttttttttcctgagacggagtctcactctgtcgcccaggctggagtgcaatggcatgatcttggctcactgcaacctccgcctcctgggttcaagcgattctcctgcctcggcctcctgagtagctgcgatcacaggcgcacgtcaccacgcccagctaatttttgtatttttagtagagatggggtttcaccatgttggtcaggctggtctcgagctcctgacctcatgatccgcctgccttggcctcccaaagtgttgagattacaggaatgacccaccacgcccagcctctacatgtctctaactcaacaatgcctcatggaatttcttccaagtcacttggcatagtcctaattcattattttttagtgtccatgtaatattccatgatgtggctacaccacagatttttcagccattccacttttatggacagattctgtttctcaaattttgcccaatgaacgacactgcaataaatatgtttgcaaggatctctcttactagtgctttcatttctctaggatagagtcccagatgtgagattgttgggtgagaaggtattttaaattctactaaatattgctagattgctttccaaaaaagctatgataagtcatgtttaaaccagcaatatatgataagatctatatctttgccagcaattggtattattagtctgtttaatatctgccaatctaatatgtataggttatatcttcttaattttttaaaatgttttatttatttatttttaaattttttatttccataggtttttggggaacaggtggtgtttggttacatgagtaagttctttagtggcgatctgcgagattttggtacacccatcaccagcttgtttaattttatctttctttgtttatcagtaagtctgagcaccttgtcattatgtttggtgacttggaattgtcctctatgaattggttatttatgaacattgcccatttttatataggttttgttatcaatttgtgagagctctttttttttttttttgagacggagtcttgctctgtcacccaggctggagtgcagtggcgtgatctcagctcactgcagactctgcctcctgggttcaagcgattctcctgcctcagcctcccaagtagctgggattacaggcgcccaccactgcgcccagctaatttttgtattttttagtagagacagggtttcaccatcttggccaggctggtcacgaactcctgacctcatgatccacccacctcggcctcccaaagtgctgggattacaggcataagccaccacgcccagcctgtgagagttttttttttttttgagatggagtcttgctatgtcacccaggctgaagtacagtggtgtgatcttggcaacctctgcctcccgggttcaagcaattctcgtgcctcagcctcccgagtagctgggattacaggtgcatgccaccacgcccggctaattttgtatttttagtagagacaaggtttcaccatgttggtcaggctggtctcgaacttctgacctcaggtgatctgcctgccttggcctcccaaagtgctggattacaggcgtgagccaccgcacccagccccctgtgagagctctttgttgttaaaataatcttctttcttttatgctgaagatatttttctacttctattgtttatctctttactttcctttcttttcttttctgagacaggatcttgctatgttgcctagtctggagtgcagtggtgtaatgaaggctcactacatccttgacctcccaggctcaagtgatcttcccacctcagcctcccacctgtagctggaactacaggtgcatgccaccacatccagctaattaaaaaaaatttttttgtagagatgggatctcactatgttgctcaggctggtctcaaactggcctcagtgtcttgcagtgctgggattacaggcattgtttgttgtttcttaactttgtttatggtatctcttgccacagtaaaattttaaagttttatgtagtcaaatgtctctcttctcttttacagtttctgggtttccagtcttggttaagaaggtcacccgcaccctcagattgtatatgtagtctcctagattctctttcaggatttgtatgattttaaggttttcattttttttttaaagccagtcaaatttagcagttgggggttgtgtaccaactttagtgacaataatgtcactacccgctaccatcagagcagcctaaggttcttattttcatgcattaaatctttgtatacagtgtaagacaagcatgcaattttatttcctctcggatgaatgctattataattatgccactacatactacatacccgcatcttttacccccagaattgaactaccaacttcaacatacatcgtattctcatatttaatagattttaagacttcaaaacgacacaaagaggatcagaacccgtatgtgatatttttgtgcgtcctgtctggtgaccgttggttcaccttatctctgtttccctttcaggtgctgctagctgaggaggggatagctcctctttcttctgcaggaccagggaaagaggagaaactcctgtttggagaagggttttctcctttgcttccagttcagactatcaaggaggaagaaatccagcctggggaggaaatgccacacttagcgagacccatcaaagtggagagccctcccttggaagagtggccctccccggccccatctttcaaagaggaatcatctcactcctgggaggattcgtcccaatctcccaccccaagacccaagaagtcctacagtgggcttaggtccccaacccggtgtgtctcggaaatgcttgtgattcaacacagggagaggagggagaggagccggtctcggagaaaacagcatctactgcctccctgtgtggatgagccggagctgctcttctcagaggggcccagtacttcccgctgggccgcagagctcccgttcccagcagactcctctgaccctgcctcccagctcagctactcccaggaagtgggaggaccttttaagacacccattaaggaaacgctgcccatctcctccaccccgagcaaatctgtcctccccagaacccctgaatcctggaggctcacgcccccagccaaagtagggggactggatttcagcccagtacaaacctcccagggtgcctctgaccccttgcctgaccccctggggctgatggatctcagcaccactcccttgcaaagtgctcccccccttgaatcaccgcaaaggctcctcagttcagaacccttagacctcatctccgtcccctttggcaactcttctccctcagatatagacgtccccaagccaggctccccggagccacaggtttctggccttgcagccaatcgttctctgacagaaggcctggtcctggacacaatgaatgacagcctcagcaagatcctgctggacatcagctttcctggcctggacgaggacccactgggccctgacaacatcaactggtcccagtttattcctgagctacagtagagccctgcccttgcccctgtgctcaagctgtccaccatcccgggcactccaaggctcagtgcaccccaagcctctgagtgaggacagcaggcagggactgttctgctcctcatagctccctgctgcctgattatgcaaaagtagcagtcacaccctagccactgctgggaccttgtgttccccaagagtatctgattcctctgctgtccctgccaggagctgaagggtgggaacaacaaaggcaatggtgaaaagagattaggaaccccccagcctgtttccattctctgcccagcagtctcttaccttccctgatctttgcagggtggtccgtgtaaatagtataaattctccaaattatcctctaattataaatgtaagcttatttccttagatcattatccagagactgccagaaggtgggtaggatgacctggggtttcaattgacttctgttccttgcttttagttttgatagaagggaagacctgcagtgcacggtttcttccaggctgaggtacctggatcttgggttcttcactgcagggacccagacaagtggatctgcttgccagagtcctttttgcccctccctgccacctccccgtgtttccaagtcagctttcctgcaagaagaaatcctggttaaaaaagtcttttgtattgggtcaggagttgaatttggggtgggaggatggatgcaactgaagcagagtgtgggtgcccagatgtgcgctattagatgtttctctgataatgtccccaatcataccagggagactggcattgacgagaactcaggtggaggcttgagaaggccgaaagggcccctgacctgcctggcttccttagcttgcccctcagctttgcaaagagccaccctaggccccagctgaccgcatgggtgtgagccagcttgagaacactaactactcaataaaagcgaaggtggaca

SEQ ID NO: 54 - DNA, 62700 bp, Homo sapiens
agtggactcacgcaggcgcaggagactacacttcccaggaactccgggccgcgttgttcgctggtacctccttctgacttccggtattgctgcggtctgtagggccaatcgggagcctggaattgctttcccggcgctctgattggtgcattcgactaggctgcctgggttcaaaatttcaacgatactgaatgagtcccgcggcgggttggctcgcgcttcgttgtcagatctgaggcgaggctaggtgagccgtgggaagaaaagagggagcagctagggcgcgggtctccctcctcccggagtttggaacggctgaagttcaccttccagcccctagcgccgttcgcgccgctaggcctggcttctgaggcggttgcggtgctcggtcgccgcctaggcggggcagggtgcgagcaggggcttcgggccacgcttctcttggcgacaggattttgctgtgaagtccgtccgggaaacggaggaaaaaaagagttgcgggaggctgtcggctaataacggtaacgataattattgttattaccatgctaacaggttataaacattgactgaactaagcaccctgcatgcccgttctcatttaatttcctcgccaagccaatgtagttggtgctattcttggtccctcttgacagaaactgaggaaggaggaaggaggaggaaactgaggcccagaatctagataaatttcgagaaatgggtgatacagtagccatgccctcaggaagtgtggcgtttgatggaggaaaacagaggtagtcacaaataagtacatttcaaaactgttgtctaaaacaggaagataattagatggtgtgagaacataattgagggagagtttaagtccacttggagttgtcttctatttgggatttaaaattcattatatgttatccatatttgtccagctctctttttgtatggaatcaccagatattattccctttctcatttcctttctcaacatttatagattggaggggggaaggaaaaccaaaccaggttataatgtagaattggtttaccccctattttcttgacatataacgtctggttttccacatataattttctagtagttcagtaacatggactccccccaaatcaggcctacttaggatagaagaggatttttgactcctggattttgctttaagaccagctcttggtttacttcctgcttcacccttaccttttcttgacatcctgtggcctctctttgaatttctctcactcatcaaatgttgtcaaaaataggactacttgctgctgtagtaaggatattcttgtattgtggccttagtgtattacatcacccccacgtcagacttgagtccccctggttggtttgggtgagtcagttcagtattaagctggcattcttggatcaaaattatgtggctgtcagctaactcagccatttagttgacctttgagggtactgtgctcagattggcatgagatattatgggtgtacagatatatgatgtactcaaacgttttttggtatgtttggggacaaaaacatggtttgaaattggcaagtgagaatcagagcaagataggacaccatctgggtgctctactgttttgtattctaggtgtctggacaatttagaggtgagggagttcaagagccagtttgtgtttctgtgcttcacaaagccacccttgtctaattcttgataaccagagtttggttagacagggactgaaacaatcctagtgcataggaatcacccactaaatacctgttgaattgagtaggcaggaaggcactatctgaattgactacaaaattgcgggtatgaaaaactggattgtattcaactaggttggtaaatttgtttagactttcaaattatctgaatagggtttatttggccaaccttatgcataaatctgtgtattccaaccttgataaaattaatttattgcaattaagtttgtccaggattatgtgagagagtccttcatttcatttctttagttaccaggagatgttcagggctcatctacatctcctggttaattttccttcagctttttctgtgtctcttccctaattctctttgagttcctgggagaaagaggagggatatttaaatgccctttgacatacttaattttctttgctatgggcaaagttaggaagcaaaattgactatagagttgttttttttgtttttgtttttgttttttttttttgagacggagtctcactctgtcgcccaggctggagtgcagtggcgcgatttcagctcactgcaacttctgcctcccctgttcaagcaattctcctacctcagtctcttgagtagctgggattatagggatctgccaccacacccggctaatttttgtattttttttttgagatggcatctcactttgttacctaggctggagtgcaatggtgcgctctcggctcactgcaacctccgcctcctgggttcaagcaattctcctgcctcagcctcccaagtagctgggactacaggcgcatgccaccacacccggctagtttttttgtatttttaatagagatggggtttcaccatgttagccaggatggtctcaatctcctgacctcgtaatctgcctgcctcggcctcccaaagtgctgggattacaggtgtgagccactgtgcctggcctaatttttgtatttttagtagatacagggtttcaccacgttggccaggctagtctcaaactccttatctcaggtgatccacctgcctcggcctcccaaagtgctgggattacaggtgtgagccaccttgcctggccttagagagatttcataacccaagcgattctgtgaatagatctgtatttgagacagagatgtagagatcagcagcccaaggtactctgtgaaaaaaggatagataactgcggagggcttccgtttttgtttgtgtagggaaacttggtaaaaggggaataaagaacagtgagaaaagtataaaattgtatctagaggttactttggaaattaaaaataatgttatttgtacttagtaaaacaaagtagtaaaagtttgctctttttttttttttttttttgagacagtctcactgtgttgctcaggctggagtgcactggctggcgcaatcttggctcactgaagcttccgcttcccaggttcaagcgattctcctgcctcagtgtcccgagtagctgggattgcaggcgtgcaccaccatgcctggctaatttttgtatttttagtagagatggggtttcaccatgttggccaggctggtcttgaactcctgacctcaagtgatccacctgccttggcctcccaaagtgctgggattataggcgtgagccactgctcccggcctgttaacccttttttactacagagaacttggaacctgtttcatcacttttctgcttcttccaggttcttgatacatatttgccagacttcaagatttcagaaaaggggtgaaagagaagattgcaactttgagtcagacctgtaggcctgatagactgattaaaccacaggtaaggcagtgaccataggaataaggaacattaatatatcagcttcataagtgtttaaatgactaatgtaattttataaagtaacacatattttggaaggaaatttatttattatgaaaagcaaaaagaaaataaaatcacccactatcccacctctcagataaaccatggttagccttttgatagatttctttataatttttttctatgtctatatagtcattccttgatatccatggggaattggttctaagaccttcccaggatatcaaaattctcatatgcggccggttactgtggcttatgtctgtaatcccagcactttgggaggctgaggcaggcggatcacctgaggtcaagagtttgaaaccggctggccaacatggcaaaaccccatctctactaaaaatacaaaaattagctgggtgtggtggtgcgcatctgtaatctcagctacttgggagactgaggcaggagaatcccttgaacccgggaggcagaggctgcaagtgagccaagatctcatcactgcactccagccagcaagactctgtctcaaaacaaacaaaacaaaattctcagatgctcaagccctggtataaaatgatgtgtagtatttgcatatagcttatgtacatactcccacatactttaaattatctctagattacttataatacttaatacaatgtaaatgctatgtaaatagttgttatactgtattgtttagggaataatgacaagaaaaaaagtctaggctgggtacagtggctcaggcctgtaatcccaccactttgggagacttaaataggaggattgcttgaggccaggagttcgcgaccagcctgggcaacatagtggcaccgtgtctctacaaaaaaaataaaacataaaaaaatttaaccgggcgtggtggcacctacttgtagtcccagctacttggggggccaaggtgaagggtcacttaagccaaggagtttgaggttacggtgagctgagggcaccactgcactccaacctgggtggcagaaagagaccctgtctcaaaaaaagtctgtacatatgcagtacagatgcagtttttttttttttttttgaggcagagtttcgctcttgttgcccaggctggagtgcaatggtgcaatctcagcttaccgtaacctccgcctcccaggttcaggcgattctcctgtctcagcctcccgagtagctgggactacaggcatgccacacctggctaattttgtatttttaacagagatggggtttctccatgttggtcaggctggtctcgaactcctgacttcaggtgatctgcccgcctctgcctcccaaagtgctaggattacaggcgtgagccaccgtgcctggccttgcagttttttttcccccaaatatttttgatctgcagttgattgaatccacagatatggaactcatagatacggacagccaactgtatttcatttttaaaaaaatcatacactaaaaacttttgttaatttttttaacttttttttttttttttttttgagtcggagtctcactctgtcgcccgggttggagtgcaatggcgcgatctctggctcaatgcaacctccgcctcccaggttcaagcaattctcctgcctcagcctcccgagtagctgggattacaggcacccgcaaccacacccggctatttttgtgtttttagtagagacggtttcaccatattggccaggctggtctcaaactcctgacctcatgatctgcccacctcggcctcccaaagtgctgggattgaggcttgagccaccacgcccggcctctaatttttttaacttaataatcaggctatgaatattttcccgtgtcattaataaattttcttctcttttcttttttgttttttttgagacagggtcttgctctgtcacccaggctggagtgtgcacttcagtggcgtgatcacagctcactgcagcctccatctcctgggctcaagtgatcttcctgccttagcctctcgagttgctgaaactacaggtgcatgccactgtacctggccaaatttttctacaacataattttaatggctatatggtattccattatttggttctttatattacttttaccagtgaaattgctggtctaaaagaatgcgtatttttggccgggcgcggtggctcacgcctgtaatcccagcactctgaggaggctgaggcgggcagatcacctgaggtcaggagttcaagaccagcctggctaacatggtgaaaccctgtctctactaaaaatacacaaattagccaggcatgatgacgggtgcctgtaatcccacttactcgggaggctgaggtggaagaatcacttgaacctgggaggtggaggttgcagtgagccgagatcgcgccattgcactactgcagcctaggcaacagcgagactccatctcaaaaaacaaacaaacaaaacatatttttaaaaacttttgacatgtaacaccaaattgccttgtaggaagattatgctgatttacctaaaacagtatatattcacataggcataaatgtataacttaaaataggtaatatatttgcatggtgcaaaaatcaaaagaatataaaaagcttcatggtttaaaatcttcctccagccttgttacttcttcactctcaccatccataggtaaacacttttttttttttttttttggagacagagtctcactctgtcaaccaggctggaatacagtggcacaatctcagcttactgcaacctctgcctccctggttcaagtgattctcctgcctcagcctcccgagtagctaggattacaggcacgccaccacacctggctaatttttgtatttttattagagatggggttttgccatattggccaggctggtcttgaactcctgacctcaggtgatccacctgccttggcctcccagagtgctgggattacaggcatgagccatctaataaacacttttattaggttcttgggtttgagtgtttgtgtgttattccccaaaccagataccttttgaagggaataaatctctataaaatgaaatgactgctatttgactaggattgtaatctgcagccacactgtcaaccattacaaactttttcagcttcatactattggaatatcagattactttgggtttctactaagatttccttttagtattttacaaagctctctgtcattatctgtcctagtagtaaacagcatcattgatttccatctaggtcctattagtcataggtggattatggtttgttgagttctatggataaattatagcaaaactgagtttgtaatccttaaaaaagggcaatatgaaacatacaagtttgggagagaaatgataggaaatatatttgcttgaagtttctggacagtgatgaattagaacaagtgtccatgtgtcctgtgctgacttctgagtgttggacagtgagggattgtcattggattttaaattgacccaattttggaagcttcatagatctgtttctgtaaacagatccaatttcaacatagaagttagcaaacataaatgtggaaacacaaagtccattaaacttccttcagacttagtttgtgactttgattaacagttaaaattgcatgctggattatgttgccatttactgactgctgctaatcccttatatacaagaaaaaaatgtaggtgttttctctctgggtaagatgaaagtaactccactctattttacttgtggtaatgtaacaggatctcttatcccttgtgaaagtaggagaggatgtccctggagaaatggcactgcctgggatgggaccatcttaactaactatacttctaatgaagtcttgtcttactctgtttattctattatattaccagtttaactcatgactttctctttaatagaaataggcaagtcatatctcactgactggatagcaaggtgtttgagagcatctgtcacaccaaagtctttgttttgctcaggagctggtagtcccctatttcaccctgcttagaatgcaccctcttgcagctttccccaacccggtctgaacctgcaccttttgatttatagagcttgtcaagactagttatttttggtttgagagtgaagaaagatgggaggcaatgggaggttaatttcagatgaatgtgggaacaggttacattgctttgtctgcaatcttcctaatttgtatttgtcttccccttccatttatctcttaccctagaaaaagtcaacgttcattcttagcttgtagaactccgcaggtctgtctgtatcttttaagtattttttacatcaggaaaccatctctgatcctcttttatgctgttctccttctctgcacttccagagcgctctctgttaatgccctcttgcagcaaggatagccctatattgtaattgtttgcattcccccattcaattgtgcgttcttggagggaagagatttttttttgttgttgttgtttgagaaggagtctcgctctgtcccaggctggagtgcagcggtgcaatctcggctcactgcagcctccacctcctgggttcaagctattttcctgcctcagcctcccgagtagctgggattaaaggcacgtacccaccacgcccgctaatttttgtatttttagtagagacgggtttcaccatgttggcctggctgatctcgaactcctgacttcgtgatccgcctgccttggcctcccaaagtactgggattacaggcataagtcactgtgcccggccgagattttatatctctatctctgtctgtctgtctgtctgtctgtctatctatctatctatctatcgttttagtcttcgctttttggaaacaaaaatgggctataagacacgatggatggcattgaataggcagtttttagaggaacctaattggttcatagcatacaggataggctttttccttgggtctttgtaggaatattggtcattaatagctatttttccatgcagaatatttctagttttgcaagaatctgaagctgtggtagattcagataattttgaaatgtgaagctgattctcttgcttggcaacttgatttgtttgggggaatgtggttgacgcatgtgccttttttttttttttttttttggtgagacctgttgacagaaattcaatcttgattaagggacgcaggaaggcatccagttcccaccatgcctggggctctctcatttaaacagctgcctttggctctggcctgttccatttcccactaggccctgtggactttaattttggaagatttcacatcctcatatttattatttctgggggaggtagtgtcgtgaaaccgaaattacccagtagttagcttttcgttttcttgatgtacttgtcctatcagccttaattgaagagagtcagacttctcaatggatatgtatttatttattctctttttccagggagaggggatggtctcctgagttggccattctagaccaaaatatagcttaaaagaagcttttttaaagaacaggtcatgttaggaaaataatattttgtttttaaaatttcacctaaagattaagtgtacttaggtttgcacccctcgccgtttgttccccactaatcaaatgtagtcttagacctcagaggacagcctttcttctgctgcttgaaccctcttcatagtctctttactctagaatatcactgaggttttcactaaccaccatcttatatagaggaaaaacttcatatggaaaagtatacttaaaaaaagaggaatcaatggattttttaaaaaatttatgggaagattcagatcagagctttccaaatatatttataacaggatttgtaatttgctaaagttttctttatgagcatatcagggatgcttagttttcataaagggcaggatttgtctttgttgaacaggatcttatgatttgattacctacctcctttttgaagcaatgtttataggaaaacttgtgcattagagagaccccagattttggaatcctgcagacttgttcttttaaaactcaacactgctatgtattagtttggtgatcttggaatagtgtaacttctctgagcttgtttccttgtttataaaatggtgatggtagcatttatttataaagacatctatctattgtctatattgttaatgcagtttaaacgagatgatttatgtgaagtgtctggtaaggtgcctggcctacagtagacagtatttggaagttattatctcttgctccatgacatttgttatttatctatttaaatgtgaatttttttttttttttttgagacagagtcttgctttgttgcccaggctggagtgcagtggcgcgatctcggctcactgcaacctccgcctcctgggttcacgccattctcctgcctcagcctcccgagtagctgggactacaggcatccaccaccacgcctggctaatttttttgtatttttagtagagacggggtttcactgtgttagccaggatggtctcaatctcttgacctcatgatccacccgcctcggcctcccaaagtgctgggattacaggcgtgagccaccgcgcccagcttaaatgtctatttttaaataaataggcagtggataagaacaccaccttcggtgtctattccatttggaatcctggctttactgcttcttagctgcatgactgtgaataagtagtaaatctctctgtgcctcaagtccctcagtatagaatgaagataataacagtacctactttataggattattgtgaggatttagtgagttaatacatgtaagacactgtcaacagtgtctggcatgtcataagtgctcattaagtaatagctgttggccgggcacggtggcttacgctagtaatcccagcagtttgggaggctgaggcgggtggatcacttgaggtcaggagttcaagaccagcctggccaacatggtgaaaccccgtctactaaaaatacaaaaaattagttgggcatggtggcaggtgcctgtaatcccagctactcaggaggctgaggcaggagaatcacatgaacccgtgagccagaggttgcagtgagccaagattgtgccactgcattccagcctgggcgacaagagtgaaactctgtctcaaaaaaaaagaaaaaagttaatagctgtttttatttttaactttttcaaatttatatacccttttattaagtcaatgccccaggaatcatttttagttctatatagaaatcttattatttgtttatttttaattttttaaattaattattattatatttttgagatggagtcttactctgttgccaggctggagtgcagtggcacgatcttggctcactggaacctcctcctcccgggttcaagctattctcctgcctctgcctcccgagtagctgggactacaggcgcatgccacgatgcccagctaattttgtgtttttagtagagacagggtttcaccatgttggccaggatggtctcgatttcttttttttttttgagacggagtttcgctcttgttgccccggctggagtgcgatggtgcgatcttggctcactgcaacctccaccccccaggttcaagcaattctcctgcctcagtctcccaagtagctgggattacaggcatgcaccaccacacctggctaattttatatttttagtagagacagggtttctccattttgaggctggtctcgaactcctgacctcaggcgatccgcccgccttggcctcccaaagtgctgggattacaggtgtgagccaccgtgcccggctatttatttatttatttatttatttatttatttatttatttatgagacggagtctcacactggagtgcagtggcatgatctcggctcactgcaacctctgcctcctgcattcaagcgattctcctgcctcagcctcccgagtagctgggattacaggcatgtgccaccaaactcagctaatttttgtatttttagtagaaagatggggtttcaccatgttggccaggttggtagttctatatagaaatattagaaagagaatatgtaacatttgggtaagttaatagtcaatttataggccacgtaaatgggaaggattatttccttaaatcaagagattagacaatcattgcttgtcatgaatatttaataaaaatttgagaaagctcagtttcttttgggctgcaaacatagatctagggaaataaatactgcttaactattttgttgttgttgttgttgttgtcttttaagagacagagtctcactctgttgcccacgttagagtgcagtggtgcaatcgtgggtcactgtggcctcaaactcctggactcaaatgatcctcccacctcagcctcctgattagctgggactacaggcacacaccaccatgcccagctacttaggaggggttgaggagggaggatcctttgggcccaggagttcgagtctagcctgagcaacaggctagattctttaaaaaacagagatgaaaaagaaagaaaaaaaggatgtgaagggttaaatttgaacactttccaggtagttttcagcatcatgctttggtggaatcatggttttgaggctaagtggggttgctgcatgttacattcctgcctcttccttcccccagctttagtcgtcttcattacattcatgcctgggaagccttcccagtgacctgagttaggcattaagatcatgggaatccaagattttcccatgtcttctagcatatttgttcacaagaaaaggaaaatttcctccttgcagcaaggggtttttaaccactgtcagtaccatggaatctttcactaaaaatcctttgaatagaaatgtggtcaaggagaggaaaggtatcagcagtgataataccttacaatagtgtatttcatagcacttgaagtagcttcttatttgattatggtaagaaggtaggcagagaattagtgacttgcctattgtcatatacatgtggtaaatgccagagagggcattctggacttctgttagttggaattgcttttgactacaggtgacagaaaatgtggctataatggtttatacaataattattattattttctgagatgaagtctcactcttgtcacccaggctggagtgcaatggcgcaatctcagctcactgcaaccttcgcctcctgggttcaagtgattctcctgcctcagcctcccgagtagctgggattacaggcacctgccaccacacctggctaatttttatatttttattagagacagggtttcaccatgttggtgaggctggtctcgaactcctgacctcaggtgatccgcctgccttggccttccaaagtgttgggattacaggtgtgagctaccgtgcctggcctatttttttttagtataagaagtctttttagcaggtcatggaaaattgtaaaaaacaccagaagtctagaggtatatagtagctgatatttgatctttaatagtcattagctcattgatgttaagccctatgtttattgttctcttggccatctactcatgtataccagatgactgccatagctccagcttgccttcaaggcaagaagaaggataaagggaaagggcaggaataagggctatagctgttttcaggaaagaaaattttttcctaggaatccctcagcagattcttacttagttctcattggccagaactgtcccatggctaccccaagcttggaaagtggctatcaggaggtaacttccattttaatgtacttgctactgttttggtcatggtcaatgaaaaatatttaatcgtaccttgacttcagccatgttaatttctaattctctatacttagagttcatactgtataatttaaacaaactgtcttatttattgtgtatgataggaccttagcgtctatgtagatgttaagttcctttgtgttcaggactacatctacttttttttctttttttttgagacggagtctcgcactgttgcccaggctggatgcggtggcgtgatctcggctcactgcaagctctgcctcccgggttcacaccattctcctgccttagcctcctgagtagctaggactataggtgaccgccaccatgcctggctaattctttttgtatttttagtagagacggggtttcaccatgttagccaggatggtctcaatctcctcaccctgtgatccacctgtctcggcctcccaaagtgctgaggttacaggtgcgagccactgagcctggccgcttagatctactttttgtgtgaagatatagagtgtcatccttgaatgttactgagaaacattcaagggcacacagcttatggcccctagcaagtacacactattgtgaaccactgacaaaaagcttattgagttaagcttaataatgaaagtagaaatggaggagagaggaaaatttagactggggataccaaagaacccctattccagacagaagactatggagaatggatttacttggaaataaatacagtattcttttctatgcaaatagcttaacttcatgaacacccttctttaattcacaaggtaagagggcagaaggatgtagaaagaacattgtgctgaagtcacgagcctcaggtccagatctggctctgtttttacgtaactgtgtgatactgggcaagtcatttaatctttctgatcttcagcttctaggttgggaataattgctgctttacaggattgttttgcatatcagaaagaatacatatttagtatatcatggcacctggcatgtaatgaacacctctggtaactgtttttaccatgatccttaggatttttgttgtgtgatcttggagaacccctttttgctttaagttaatatcttatagactgcaaaggttaggtgttaatcaaagtttcctcccaattctaaaatatcatgtttctacactaagtacctcaattagagcattgttataaagatacttgtggaattctggctgcagtgagcataggagagaccatgggaagatgatgttctctggggtctagattgatgtcactgtataaatgaaatatttgttataacagatgtttctggccgggtgcggttgctcatgcctgtaatcccagcactttgggtggccgaggcaggcagatcacctgaggtcaggagttcaagaccagcctggccaacatggtgaaaccccatctctactaaaaatagaaaaattagccaggcgtggtggcgcacgcttgtaaccccagctacttgggaggctgagggaagagaatcgcttgaacccaggaggtggaggttgcagtgaaccaagatcatgccactgcactccagcctgggcgacagagcaagacaccatctcaaacaaaacaaaacaaaaacaacaacaataacagatgtttctgagacactataaggaccagaagtacattatttttatttattttattttttgagacagagtctcgctctgtctcccaggctggagtgcagtggtgcggtcttggctcactgcagcctcccgggttgaagtgattctcaccgagtagctggaactacaggtgcagccaccaccccaggctaatttttgtattttcagtagagatggagtttcaccatgttggccaggctgttctcgaattcctgacctcaagtgatcctcccgccgcgtcctcccaaagtgctgggattacaggcatgagccaccactctcagcccctagtccattttgaattgccctagtccactgagagaagctgtgaaatgctggccaaaccactgaacggctatgtaggttgggagtaactaatctcatgattcatctcagtggatagcttatgtggtatagtttagagaaaatgagtgctgcagtgcccagagttggggagagtttggggaactggcacactcctggtaatgtaagtgggtgtttttttcttctgagggacattttcacagtatgtgtcaagagcttttgacccagcagttccacctcttaagatttatcttaagggaagaattatggatgtgtacagaaatttagctacaaggatgatgctttagcagtatctttaaagtgaaaatattggaaaaaggctgaaaatcaaggataagtaattatggaacagatacagccattaattgatatgtctatatttattgacatacaagaatattcataatatgtgaagcagattcaaactgtcaatgattcatttaaaaaaataatagtttgtatatatatgagggagaagacatctggaatagtgtagcattataggtttatttatttatttatttttgagccggagtctcgctcttgtcacccaggctggagtagagtggcgtgatcttggctcactgcaacctccgctgcctgcgttcaagggattcttatgcctcagcctcctgagtagctgggattacaggtgcccaccactgcgcctggctaattttttgtatttttagtagagacagggtttcaccattttagccatgatggttttgatctcctgacctcgtgatccacccgccttggcctcccaaagtgctgggattacaggcgtgagccaccgtgcccggccgcttttttgtatttttagtagagatggggtttcaccatgttggccaggctggtctcaaactcctgacctcaggtgatccatccgccctggcctctcaaagtgctgggattacaggcatgagccactgcgccacactagaaaggtattaatttaaataaacatttattcaagtgattactggcatctacctcccttctaagatacagatacttttaagtacatgtcgttccctggataaaaacaaatggctggccgggcgcggtggctcacacttgggaggccgaggtgggtggatcacttgaggtcaggagtttgagaccagcctggccaacatggtgaaatcccgtctctactgaaaacaaaaaattagcaaggtgtggctgtgggcgcctgtaattccagctactagagactgaggcaggagaattgcttgaacccggaaggcagaggttgtggtgagctgggatcatgccactgcactccagcctgggggacagagtgagactccgtctcaaaaaaaaaaaaaagacaaatggctcattgggtttcattggcaaattattggccactgagtgtggcctttaggctatttatcagattactttcagctattttattaactagattaggcttgagtaggagctgactttaaaccttcacaggtttccacaagatagagtgcaaaacttcgtacgcaggagtagggaggggcctatttaacttgttcccttatccttgcttctgttcctatgctgcatgttgtgactcttacgtgtatttcaaagttgtcgtctttatactcagaaatagtattttttgagaatatttctaagaaaagacaacttatatttgacaaaactgtgttgaactcttactatgtataatgcactgtgttaagcaccttgatggttggatggatggatggatggatgaggtatacacaagtgagtaaaatctatctttgtttttaggaacttcgagtctactgggagagacatttacatagttaatataaaattggatgataagtgttacagtggagatataaacaaagcacaattggctttggagaggcaacaattttgtatgataggtggaaattgggaaagagttcatagagatttgacctggactttgaatgatggataagattttggttggtaggcataaaaattagtggtgtattttagaaattgggttattcagggcagagagagaataaattgggctagaggaggctagaaatgagaaaatggtaaattgagggaaaataatgacatggtgaatgtaaaacacctagcacagtgtagatacttatcaaactttgcctcttttaaaaaacatttagaaaatttatttatttattttatttttatttattattattttttttgagacagagttttgctcttcttgcccaggctggaatgcaatggcgcgatctcgactcactgcaactttcacctcccaggttcaagcgattctcctgcctcaccctcccgagtagctagaattacaggcgcctgccaccatgcccagctaattttttgtattttttaagtacagaagaggttttgccatgttggtcgggctgatcttgaactcctgacctcaggtgatccacccgcctcagcctctcgaagtgctgggattacaggcgtgagccactgctcctggcctaaaatttatttttaatttcaattttttctttttggtttttctttatatttgctgattacttaaagataatttttatttttttagagatagggtcaactacttacagataatttttatctttttagagacagggtcaactgttatacttagagataattttaatttatttagagacagggtctgtctatgttttgtaggctggacttggactcctggtctcatgtggtcctccctcctcccaaaatgctgggattacagacgtgagccactgtgtctggcccacttctttctaattccaaacatatctacctcaaggagtatctttaagttacctgaaaaactaatgtttaggttgattggacaaagtaaggctattttcagtaaattctaggtggtttgcaaaattacaaacgtggtagtaaaaccaaagtaatgatgggaatttacttagatttatgtgcaaccatttctttcctcagaaggtgacctgctgagaaaagtggtacaaatactgggaaaaacctgctcttctgcgttaagtgggagacaatgtcacaagttaaaagctcttattcctatgatgccccctcggatttcatcaatttttcatccttggatgatgaaggagatactcaaaacatagattcatggtttggtaagtgcctgctttctctggctattttaaggattagtggcttgctttgtgctgaagacctttcaataatagaaggggttgcaagaaaagaactaaaatatcaacttctttctgcaccaagacattctgtcatccatgatattatgggaataattgaaatgcccagtatttggggaatggattgtaagtacaaagcatatgttgttttgtagttcagaatggcagatttaagctttagggacctatgggaaagttcagatgaaccagtgttcaacaaaactccatgctcaaatatgtctgtagtgatggcagccacataaaaactttgtctactatcattagggatagattatatcacagctaggatattgacattcatacaatctaccagttttactcagatttctccagttttacttgtatgtgtattaagttctctgtggttttatcacctgtgttggtttatgtgtctaccatcacagtcaagatcttttataattaccctcacctccctcctgccacccctccctcaattcattttttttttttttttttttgaggctgtagtctcgctctgttgcccaggctggagtgcagtggtacaatctcagctcactgtaacctccgccactcttgttcaagcggttctgcctcagccgcccaagtagctgggattacaggcgcccaccagcatgcctaactaatttttgtatttttagtagagacagtgttttgccatgttggccaggctagtcttgaacccctgacctcaggtgatccacccacctcagcctcccaaagtgctgggattacaggcgtgagccactgcgcctggccctcaattcatttttaaatggaaggattatgctactaagaacccattcccagaaacagtattgcttggccaatggtaagtaagaatgtggttacatttttacattactttgaaataatatctgagactagttgttgaggcccctttgattctttctctcatgtctccatcctccttatcgggagaaatcactatgaatatgtggtggggaacagaagtgagtccattgcagctgtacttatccgtatagtgcactgtccaaatgtgttgacaggtgccattttttggaaaaggactttaatggcatctagtggggatcctgagaggagtcgtctgttggaagtggtgtgggaggaagggtaaataaatacaagggccagctgtcctgcggggatcttccccatgcccttgcttcactggaactgtaaggaaatggctgggctgtctgaggatttctttttctaagcttttctttaaaataaaaaagaaaagaaaagattagcctaagaatactgttaaatacaatttggaagaaaaaaaatgaccccactatttttccaaaactaccttagttttaaaacatttttatttttttttctttttgtttttgccagagttcttttggctaacaaaactacctcagttttaatatattactttccaatttctttcccaaataaatagtcacatctttctacacagttgcaatcagaatgtacatgcacagggtagttattgctgtgtctcactgcattcctgaaactatcagtaggctgttggtagaacagacccttcactgctttgtactgacttctgggcacagtagaatctaagataaaatttcttgagagaacctagctctgctctaccctcacacaccccttattcctcccaccaccccactgaggaggaaactctgtaagactatacagtatctcttgtaagccctacagtttttgatggttacagttttctttcgttttttttttttttttttttttgagatggagtcttgctctgtcgccaggctgtagtgcagtggtgcggtctcagcttactgcaaattccaccttccaggttcaagcgattcccctgcctcagcttctcaagtagctgggattaaaggcatgtgccaccacgcctggctaattttttgtattttagtagagacggggtttcaccatgttggccaagacagtctcgatctcctgacctcatgacccacccgcctcggcctcccaaagtgctgggattacaggtgtgagccatcgctcccggctggttacagttttctttaagaggaacatgatatatttagggagtagataaagccagttcatatttgtatgaccctaaatgtgtaccaaacaaagataaggagttattcacaatgcagaatctgtacttttccttttttataatacattgttcaatgttgccagtttttagtgattgttcttatagtctatctcggatgtgtaatgtgtactttttcttttgattgctagaactttgcttgtacttgccacatgagttggaagtgtactggtagggagctttagtttgcattttaaatgcgtgatagtgatttgttttgcttccttgctgatcagacaatgatgatcttcccttttcacagaggagaaggccaatttggagaataagttactggggaagaatggaactggagggctttttcagggcaaaactcctttgagaaaggctaatcttcagcaagctattgtcacacctttgaaaccaggtaagaaaacatcttagaaaaaagctccttgatagaatggtgggacagtgttttagaagcctgaggttctgggaaaattacctaaatgctctatctctttgtttattattggtgaaatgggctaattcatttcatgataaatgtaaaactaatgatgtgctacacttaaaaaaaaatctcttggagcttaagctaacatagaatttttttttttttttctttaagatggggtctggttctgtcacccaggctggtggagtacagtggcacagtcatagctcactgcagcctcaaactcctgagctcttagtaactgggactacaggtgctcaacaccatgcctgactgatttttaaaaaattttagtagaggagtctttgctagccaagctggtcttgacctccgggcttcaagtgatcttcctgcctcaggggcttcccaaagtgctgggattataggtgtgagctactgttcccgggggctaacatagaattttattgccagatacgtaactgttatctttttgtgacaagatttaatgtaacctaacctgggtctgggtgggaaataaaacagcaagaaagaagactgtactgcttgccattgtacaagaattctttgagttatgtatctgattttaaaagatgatggatcgcttctcggccttttggctaagatcaagtgtaaaagatgattgacatttaaactggtgggtactggatctgcagaatattgtctgtttggttagaacataagaagcattctttaagaggtcataaaatccttcttgaaattgattcttttgaaaaaaacagctgtatttagatttaactcacacatcatatgattcacttaagataaacatttcagtgtttttaagtatattcacagagttgtgcaaccatcatcctatcagtttagaacatttgaaaagtattatgtgggtaaatctgaaactggtctccatcacaccatatgactactctcacctccctcctgtcacccctccttcaattaatttttttttttttttttttttgagactggcgtctcaccctgttgtccaggcaggagtgcagtggtatagtctcggctcactgtaacctccaccacctgggttcaagtgattctcctgcctcagctgcccaagtagctgggattacaggcgcccaccagcatgcccggctaatttttgtatttttagtagagacagggtttcaccatattggccaggctggtctcaaactcctgaccttgtgatccgcccacctcggcctcccaaagtgctgggattacaggcgtgagccactgcacccggtcaatatttatctttctatgcctgacttacttcacttaacataatgtccttcaggttcatccatgttgccatgaatgacagaatttcattcttttttatggctaaatagtattccattgtatatatatatgccacattttatctgttcatctgttgatggatacttcagttgattccatatcttgactattgtgaatagtgctgtaataaacataggagtgcacatagatatctcttcgatgtactgatttccttctttttggatatatacccagtagggggattgctggatcatatggtaattatatttttaattttttgaggagcctccatactgttttccataatagctgtactaattgactttactactaacaatatataagagttctcctttctctgcatcctcagggatgcagagaaatttttaatatttttcatagtgtccattctaactgggatgaaaggatatctcattgtgatttttaatttgcatttccctgatgattagtgatgttgagcattttttcacatacctgtttgccatttgtatgtgttcttttgagagatgtctgttcagctcatttgtccggctgttgagttatttgagttccttgtgtattctggatattagtcccttcttgaatgaatagttagcacgtattttctcccattctttagttgtctcttcactctgttgattgtttcctctgctgtgcagaaagttttaaatttaatataatcccatttgtctacttttgcttttgttgcctatacttttgaggtcatgttcataggatctttgcccagaaccgtgtcctaaagtatttcacctatgtttttattttattactttatttatttatttttgagacagagtctcactctgttgcccaggctggagtgcagtagtacgatctcggctcactgcaacctccgcctcccgggttcaagtgatcctcctgccccaacctcccaagtagttgtgactacaggcgcgcaccaccacacccagctaatttttgtatttttagtagagatggggtttcgtgatgtcggtcaggctggtcttgaactcctgacttcaagtgatcctcccacctcggcctcccaaagtgctgggattagagtcatgaaccaccgccctcggcctcccctatgtttttagttgtttcatagtttaaggtcttacatattagtctttaatccattttgagttgatttttgtatatggtaagaaatagatgtctagtttcatttttctgcatttaaatatctagtttgatcagcaccattttttgatttttcaaatttaaattttattttagagatgaggtcttactctattgcctaggcttgtctcagaattcctgggcttaaacaatcctaccacttcagcctcccaaagctagcaccatttattgaaaagactgtccctccaccaaggaatgttcttggtgctgttgtcaaaaatcagttggctataaatacgtggattttttcctgggttctctatcctattccatttgtctgtgtgtctgtttttatgccagtaccatgctgttatggttactatagctttgtaatgtattttgaaggctggtaatttgatgccttcagctttgttctctttgcataggattggtttggctatatggggtcttttgtggttccatgtgaattttaggttttttttcttgagacagagtctcactcttgttgcccaggctggagtgcagtggtgcgatcttggcttactgcaacctccgccccccgggttcaagtgattctcctgcctcagcctctggagtagctgggattacaggcatctgccaccacccctagataatttttgtatttttaatagagatggagtttcaccattttggccaggctggtctcgaactcctgacctcaggtgatctacctgcctcggcctctgaaagtgctgggattacaggcgtgagctactgcgcctgtcctgcttatacattatttatggctgttgtattcttactaatttttctttccatttgttccatcaattagagagagaggtagtgaaatctcagactgtaattatggatttgtctctttatctttataatttttgcttcatatagtttgaagctactattagatgcataaatgtttaggattgttatgtcacgttgatgaattggccactttaatttaatttaaatttaatttaatttaaatttaattttttttttttttttggctggacgtgatacctcatgcctgtaatcccagcactttgggaggctgaggtgggcggatcacaaggtcaggagttcgagaccagcctggccaatatggtgaaaccctgtctctactgaaaaatacaaaaattagccgggtgtggtggtgcgcacctgtagtcccagctactcgggaggctgaggtaggagaatcgctgaaacctgggaggcggaggctgcagtgagccaagatcatgccactgtactccagcctgggcgatagagcaagactccatctcaaaaacaaaaaattatatacatatatatacacacacacatacacacatatatatacacacaagcatatatatatgtacatacatctaatatacatgtatgtgtgtatatatgtacatatacatgtatgtgtacatacatgtacacatacatgtatatgtatatatttttgagacagggtctcactctgtcacccaggctggactgcagtggagcaatcacgcctcactgcagcctctacctcctgggcacaggtgatcctcttacctcagcctcttgagtagctgggaccacagatgccactaccatgcctagctagtttttgtattttttgtagagacagaattttgccatgttgcctaggctggttttgaactcctgggctcaagtgctccacccacctcagccttccaaagttctgggattacaggttgagccactgtgcctggccccactttaacagtttgaaatgatcttctttatccccattgaaattctgtgctctgaaacctactttgcctgatattaatatagccactctagttttcttttgattggttttagcatggtatgtctatatttaaagtgcatttttttgtagacagcatataattgggtcttgctttattatttaatattattgttgctgcattttaattggaataaatgcatctattttagccttgacatgctatgctattattttgtgtgtgcgtgtgagtctctctgccccaaaaatatttctttaggagatgaaccaaatgattgttctctgaaatgaataatgcctaaactatgttttcatggcctatcttttcttccctgtcatcttgttgcagtttaattcctttatcaggagtcagttcatatgctatgtgattaagtgctgtttcttccatgaagcctttacttgtttcttattctgttttgtttttttgtttttgtttttttttttgcagacagggtctcagtgtgtcaccccatctatagagcagtggcatgatcacagctccctgcagccttgacctcctgggctcaagtgatcctcttgcctcagcctcctgagtaactgggactacaggcacattccaccatgtctggctaactttctcagtgttcccataacactttttttctatttcgttaaaaatgtttatcaaggctgggcttgtagttcatgcctgtaatcccagtactttgggaggccaaaatgagaggattgattgaggccaggagtttgagaccagcctgggcaatatactgagacccccatctctatttatataatattgaaaagcaaaaaaaaaaaaaaaaaacgtttatcaaaataaaacatggccatggtaacatggctaacaatacttagagtttatgttaaaataacccctttctcttcccatccctaccccctgtcctttttctcaaactcatattggttttgttgttgttgttgttgtttgtttttatattttgttttacaggtgggatctcactgtgttgcccaagctggtctcaaaatcctgggctcaagtgatcttcctgcctccgtcttcccagtagctgttttaactcactattttaacttgtgctgtggttacattcataatgcctgatagtatgattatatcagcagtatttacaatgttatgattatataaatattgttcaatgccagatcaataactgtgatgcagttgcatcccttcttggtactctttggctatctttggttgtattgtcacaacccctgagccacataaagatgattctgacatcaggagatcagtggatttgcttttctttaaactttatcaatttcttaaatttctgccacactttatcttgcttcatattggacaatgatccttggaagttattactacttttttgggagagcattattatttttactatctttgctgccttgtttcctggaccttataactttcttctggatatactccttcattatgtgggagtgcatcctcaggaaactttcttaaattagtgcaggagagaaaaactttgagttctcacatatttgaaaatggcattgtttcacttttatatacaattgaaagtttatcttaatacagcattatagattgcaaattattttttatcactactctaaagacattgttcctttatcttctatttttatgtattgctgatgaaaaattcagtgcttatctaattttccttactttgtaagtgattttttttcttctttatggaagctttcagaattttatctttaccagtgtcctgaaatgtcatgagattgtgtttgggatgctttttttaaaggtagtaccttaggctggcaaataggcaagccctggatacatcatttctgtttcaaccaaagtagcttttataaactggtcttctgtataagatttaactggaactaaggtttctgtggcttagacagggtgtgtgtgtgtgtgtgtgtgtgtgtgtgtgtgtgtgtgtgtctcatctccaattattttccttggcctttgagtgctgactagcttttggtcttccgcagttgacaacacttactacaaagaggcagaaaaagaaaatcttgtggaacaatccattccgtcaaatgcttgttcttccctggaagttgaggcagccatatcaagaaaaactccagcccagcctcagaggtaagactttggaatctcaaagtggtggttatgataataatgttcaaaggatagttactggacagaacatctattatgtgtctatactgtgtttatggacacctttatgttactttttttttttttttttttttgagacggagtgtttcgctcttttgcccaggctggagtgaagtggcatgatcttggctcactgcaacctctgccccaccgtgttcaagcaattctcctgcctcagcctcctgagtagctgggattataggcacctgccaccacacccggctaatttttgtatttttagtagagatagggttttgccatgttggccaggctggtctcaaactcctgacctcaggtgacccacccgcctcagcctcccaaactgctaggattacaggcgtgagctactgcgcccagctatgttacctttaaaaatcctcataatatgggtttgtgtggttggtataaattaaaaaaaatctgtataacatttatgagttgtaggtaatatgcttaattaatttatagataaggtctcagagatactaagttgcttgcttaaggcaagtttatttcagagccaagattcaaactcttatcaatctgtttccaaaggccttgtatggatataattgttacatcttcctgatgtcaaatatctttgttcttctgtattactttagctctctttttcttttttttctttgagacagggtcttgttctgtcacccaggctggagctggagtgcagtggcacatagttcactgcagactcgaactcctgggttcaagtgatcctcctgcctcagcctcccaaagtgctgagactatataggcataaaccaccgcatccagccaatagacaaatttttattttatttatttttgagacagagtcttgctcagttacccaggctggagtgcagtggcatgatcatggctcactgtagccacaacctcctgggctcaagcagtcttcccacctcaacctcctgcgtagctgggactacaggcacaagccactgtgctcagctaatatttttgtatttcttgtacagacaaggttttacgatgttgcctaggctggtcacaaactcgagctcaagcaatccacccacctatgcctcccaaagtgttaggattacaggcatgagccactgcacccaggccagagtagagtttataatcagagtttagtgtttaccctctctgtggttttcttgcttctgaaattttgcctcaaaaatttcatcttttttttttttttgagagagggtcttgctctgttgcccaggctggagtgcaatggcatgatcttggctcactgcagcctcgacctctcaggtgtaagcaatccttctgccttagcctcctgagtagtggagactacaggtgcagggcaccaggtggccagctaattttcgtattttttgtagagatagtgtctttccatgttgtccaggctggtcttgatctcctgagctcaagcgatctgcccacctatgcctcctagagtgctgagattacaggcgtgagccaccatgcccgacacatgccatccttttttttttttcagacgagtctcgctctgtcgcccaggctggagtgcagtgggcgatcttggctcactgcaacctccgcctcccgggttcaagtgattctcctgcctcagcctcctgagtagctgggactacaggcgcccgccactacgcgcggctaattttttttttttttttgtatttttagtagagacggggtttcaccgtgttagccaggatggtctcaatctcctgaccttgtaatccgcccaccgtggcctcctaaagtgctgggattacaggcgtgagccactgtgcccggccggaaagatttcttaaacaggacacacacagaaaagcactgaccataatgggggtggaagaggttgataaattcaggcacatttatctaattaaaagataaagagatgaaaagccaacccctagagtaggagaaactatttgtaacccatgaatcctacaaagggcttatatccagagtatacaaagaattacaaatcaattagtaaagaattgacaagccagtagaaaacaggcaaacgacttaaactagcacttacgaaaagggacaaccaaatggccgatacacatgtgaaaatgtactcagtttcactgatcatcagagaaaagcacattaatttcctatgacccagcaatcttattttttttagaatagttaaaatgaggagataacccatcaatagtagactgaataaatagttgcacatccctacaatgaatattatacagcaatgaaagtcagtgaattagagctgtgtgaattgtcgtggttgaatctcacatacataaagttgagtgagataagccagacagaaaagaatacttgtagtagtgtggttacattatacaaaatttttgggtgcagcacaccagcatggcacatgtatacatatgtaactaacctgcccattgtgcacatgtaccctaaaacttaaagtataataataaaaaaaaaaaaccacaaaattttttgtttttcttcgaaactaacataccatgtttacgtaatacgtgcttatttggtaaaacaataaggaaattatctaatgatcacgctttttttttttttttttcaaggcggagtctcgctctgttgcctaggctggagtgcagtggtgcgatctcggttcactgcaagctccgcctcccgggttcacgccattctcctgcctcagcctctcaagtagctgggactacaggcgcccgccgccacgcctggctaattttttttttctgtatttttagtagagacggggtttcaccatgttatccaggatggtctcgatctcctgacctggtgatccgcctgcctcggcctcccaaagtgctgggattacaggcgtgagccaccgcgcccagcctatctaatgatcactcttaaaatcaaggtagcagtggttgtcagtgttctgtattttggcctaggtggtgatttcataaggtcttccactttgtagtcatttaagtatttttgttttgtgcactttttggtatgtattagatctgtcattatgctctttgttttgtattcatcttattgatttatttatttttagacagagtcttactctgttgcccaggctggcatgcagtggcacgctcatggcttactgcagccttgacctcctgggctcatgtgattcttccgccccagcttcctaagtatctagcaccacagatgcgcaccagcacgtagggctaatttttaaaaaattttttgtagagacagggtcttgatatgttgcccatgctggtctgaactcctggcctcaagcagtcctcctgccgcagctttccaaagtgctaggatggcaagcatgagctaccaggcccagccaagtttttctttttaatcattttattgaggtcacatttatagacaccggtgtatttaagaactaaaatgttatggttgaatttcaaaaactatcaacaagagagattagatttttagagcagagataatagcactccattttattgccctttgtagtttgacatcctttcacatttctcaggaacatttggatatctgtagtatatatatttattatatattttgtcaatttctctaccatagaagatctcttaggctttctgctcagaaggatttggaacagaaagaaaagcatcatgtaaaaatgaaagccaagagatgtgccactcctgtaatcatcgatgaaattctaccctctaagaaaatgaaagtgtgagtagccacaacttcttactgccaagggcagacatattgtaccttgtataccacttgtaagtttcttttctgaatttacactttagattgaatagattaaaattaaaaatggtacatctgtaatatgtttggtgtacctcaagcttgagaaatgcctaaaactgtgaccatggtgaggtgaattgttacgtgtgtcctggagggcactcacatcttagttggcataggttttacctctttttgtttttacggctaataacaagctgcatacatgatgtttgtttatatttttattagttaagaatgtattttgctgcaagtaatagtcttcaactggagtggtttaaagaataatgaattatttgtttcacagaggtctaaaagtagtttgctgctggctttggttcagtggctgatttttagctttttttttttttttttcgtacttgttcttcaagatgctgctctgtgtttcttagattttttcttttgcttgttgtctcactggcacaagatggctggtgtatctctaggtgttatatttatgtttaagagaagaagaagagtacagtaaaggaaaaagggcagcatctatatcaggaaacttaagtctttcgcagcaacccttaaatttcatttcattcgcctagacttgtgtcacttggattccctagttgcagtagaggctgttgaggcaagtacaatacttacttgtagcttagtgcgttgctgctcctcccgaaattggggttttgttaatgagaaagagacagaatagatattgggatggcaattaactctgccatttgatcatttgatggtgagcagttagagtccctccttactcttccaaaccaccactagataactcttatcttgatagcggttggctttctcaaagtttactcattgaagccattaatatatatgatctaatgatactgttggaagaatcatgtggtcgaagcatgcttgttatcctatagaatgagaaaatttaatccatatgcagtagatttggggaggagggtacaggctatgcttcagggaattgaaaacatattttttgtccttttgaactcaagttctaacaacaaaaagaagccagaggaagaaggcagtgctcatcaagatactgctgaaaagaatgcatcttccccagagaaagccaagggtagacatactgtgccttgtatgccacctgcaaagtaagtttctttcctgaatttaaactttagaatgaatggtataaaattacagatttacatctacaacctgtttggtgtacctggaggttggcaaactcctgaagctttgaccatggtgaggtgaattgttacatgtgtcctgatgggtgctcagatttttaaatttttatttaattaattaattttaaagacagggcctcattctgttgcctaggttggtgtgcagtgatgcaatcatggctcactgcatccttgacctcctgggcttacgtgatcctcccacctcagcctcccaagtagctgggactataggcatgcactatcatgcctggctaactttttttttttttttttttgagacagaggctcactctgtttcccaggctggagtgcagtggcatgatcttggcttactgcaacctctgcctcccgagttcaaacaattctcctgcctcagcctcccgagtagcccggattacaggtgtgcaccaccacacccggctaatttttgtatttttagtagagatggggtttcaccatgttggccaggctggtctcgaattcctgactttaagttatctgcccaccttggcctcccacagtgctgggattacaggtgtgagccactgtgcccagcctacctggctaacttttacatgtttttgtagagatgggatttcactatgttgcccaggctctcaaactcctggcctcaagcagtcctcttgccttggtctcccaaagtgctgggattacagatttgagccacagtgctggctggtgctcagatcttgaacagtcagaaaaatatactgttgaagcaaatttaaaagaaatataaaaggaaaaagttagcaacagttcttaccacgtagattgaacattttttatttttccaacctccctgctggattttacccaagccagcatacatattttcacaatcagttaatacaaaaccttgggttctgctttattgacttgccatgagattatttcagattttgtttctgtgctgctacaaaattttcacatttatccttttttgatagattgttaatattctatcaaaatatatttaactattttctgttgaaaatgtagtttccagcttttcatgattataagtactcagtcaacaactttataggcagaaccatttctttgagtgatcttctcagaataaggaaggagaaattccccacagggtatgaccagttttgtcagtgttgatatttattgccaattttacttctgaaatggaagtaccaatttatagtgccatcggctttttttttttttttttttttttgagatggagtctcaccctgtcacccaggttggagtacagtggcgcaatcttggctcactgcaacctccgcctcctgggttcaagtgattctcctacctcagcctcctgagtagctgggattataggcatgcatcaccacacccggctaattttttttttttttttttttttttgtgagacggagtctcgctctgttgcccaggctggaatgcagtggcacgatttcggctcactgcaacctctgcctcccacgttcaagcaattcttctgcctcagtctcccatgtggctgggattacaggcacctgccaccacacctggctcattttttatttttagtagagatggagtttcaccatgttggccaggctggtcttgaattcctgacctcaagggatctgtctgcctcagcctcccaaagtgctgggattacaggtgtgagccaccatgcctggccccggctaatttttgtatttttagtagagatggggtttcatgatgttagccaggctggtctcgaactcctgacctcaagtgatctgcccgcctcagcctctcaaagtgctgggtataggtgtgagccaccatgcctggcctgaagtgccattggctttgaatgaatatttttattttcttattatctcatctgcattgtttattaacttataaaattgtttctttttttaaattcatatagatggcatgaaattattattttaaaaatttaattgtaaattgataatttatagttgtatatatttatacagtacaaagtgatgttatgattcatgactacaatttggaataattaaatctagctaattaacatatctgtcacctcaaatacttaccactttttgtagtgagaacatttggatttttttttttttttatcgagatggagtttctctcttgttgttcaggctggagtgcagtggtgagatctcagcttactgcaacctccgcttcccgtgttcaagtgattctcctccctcagcctcccgagtagctgggattactggcacttgccactatacccagctaatttttgtatgtttagtagagatggggttttaccacgttggccaggctggtctcaaactcctgacaggtgatccacctgcctcagcctcccaaagtgctgggattacaggcatgagccaccgcgcctggctggaatttattctcttagtgtattacgattactaatgatatcctccaccctgtgcagtagagcaaaagaaaaatctttttcctcttgtctgagatttgttgtactctttaatcgtcatctccccatttcccccaacccccagcatcaaattattttaatttttatgtatttgctgacaagattgtattactgctactattgtaaacatttttccatatttcctcttgggtgaattatctgtttcctttttattttttttcttattggtaaccttatttgcctataagtgtccttggtgatattttccttactaagaatggatactctgtgttgaacattaccatgtgtcaagcacttcagagacatcatctgattgaacagtcataaataggatgtgaacatgagtatttacactcccatttcacagtggggaaaactgaggctcagggaagttaaatagttttctcaagatcattataggcagcaaatgaaatgacagggttgggatttagtcggctttacttctgagtttcttccttctgttacatgtgttttatgtgtattaaccctaggttgtagatactttcctcattctactggtctttttttgtttttgtttttgagacagggccttgctgtgttgcctaggctggtcttgaactcttgggctcaagcaatatttttgcctcagccttccaagtagctgggattacaagggcatgccattgcactaggcttctactggtcttttagtttttcttgtggcttacaacctaatcttttttgttgttgttgctgttgttgtttttggagatggagtctcactctgttgcccaggctggagtacagtggcgtgatcttagctcactgcaacctccacctcccgggttctagcgattctcctgcctcagcctcccgagtagctaggattacaggtgcctgccactacatctggctaatttttgtatttttagtaagatggggtttcaccatgttggccaggttggtctcgaactcctgacctcaggtcatccacccgcctcggcctcccaaagtgctgggttacaggcatgagccactgcacccagtccaatctcatcgtttatgatcatatttatggatattttgtaatatattttaatctattttagttattttcttctgaaattttttcagtattttggtataaagtgtgcattttcttgtctttatttatttattttttttgagatggagtctcgctctgtggccaggctggagtgcagtggcgtgatcttggctccctgcaacctccccctcccaggttcaagcaattctcttgcctcagcctccccagtagctagaattacaggtgtgtgccatcacacctgcctaatttttgtatttgtagtagagacaggattttaccatgttggccaggatggtcttgaactcctgacctcaggtgatctgcccaccttggcctcccaaagtgctgggattatagacatgagccaccatgcctggccaaagtgtgcatttttatttattttcatggtgttatctaattaagttagcatctatttattagatgatattttttggttttgatgattatcttatcacaggttaaaaatattatataatgcctgtagattcttttgagtcactgggtgcctttctcctctcctctcttctcatttactgattttctctttaggcagaagtttctaaaaagtactgaggagcaagagctggagaagagtatgaaaatgcagcaagaggtggtggagatgcggaaaaagaatgaagaattcaagaaacttgctctggctggaataggtgagcttggctgtggttgagtctgattcatgaggggtggttcttaacactcttggtaggtgtttttttttttttttttttttttttttttttttttttttttgagacggagtctcgctctgtcgcccaggccggactgcggactgcagtggcgcaatctcggctcactgcaagctccgcttcccaggttcacgccattctcctgcctcagcctcccgagtagctgggactacaggcgcccgccaccgcgcccggctaattttttgtatttttagtagagacggggtttcaccttgttagccaggatggtctccatctcctgacctcatgatccacccgcctcggcctcccaaagtgctgggattacaggcgtgagccaccgcacccggccagtaggtgtttttgaagtctctgaagtaaataaaaaggctttctcatttagtagtcagcataaaaaagatgtgtttattccttagcactttctacatatattggtattttacatatattggtacttaaatatatcggtactttctttctttttttttttttctgagacagagttttgctcttgttgcccaggctggagtgcagtggcgtgatctccgctcaacacaacctctgcctcccgggttcaagcaattctcctgtttcagcctcctgagtagctgggattacaggggtccaccaccacgtctggctagttctttgtagttttagtagagatgggatttcatcatgttggccaggctggtctcgagctcctggcgtcaggtgatccgcccacctcagcctcccagagtgctgggattacaggcatgagccaccgtgcctggctcactggtactttcttaaaagtctgttcttggtcttagggaaaaaaaggaacttggattgagacagaagataaagtaattgggcagaccagtttgttgttttcctatttttttctaaaggcaaaggaaaagaaaacagtcaaatccaattcacctgtggaggaaaaatatgactgagagagctgaaggggtcacagttctgctttgctcgggcatagagttgttattggtggagtcataactataaagttctccttactggattgaaaaagcacccctggagtttataggattttcctcttagagatgctgagttaactgtgctttcaaagtcaatccatagcttttcttatcaaaagtattccagttattctttttctccatagctatgaccacacctaggagatgggattcttctaccctgtgctactacttttttttagtttgcatctgactgaaaggcctcaaacctaatagtactcagtgaatatgacacatatattagtgtccctgaggactacttcaagttttgggttacaggtagatagtaagcaaagttagatccatggtgacagaaatagcaaaaggactggagtaaaggggatttactggtgttccctatcttaatgttgtctgtatgttttactgtgttcatctctcagggcaacctgtgaagaaatcagtgagccaggtcaccaaatcagttgacttccacttccgcacagatgagcgaatcaaacaacatcctaagaaccaggaggaatataaggaagtgaactttacatctgaactacgaaagcatccttcatctcctgtaagttgatggactaaatgaacatttctgttactaatattcatttaggattttacgtgtagcatttgtggtcactgtttataatagtataattgagaaaaaaaaccttgtgtctataaagttgtgtaaaatataacagatctttttttttttttgagatggagtttcacttttgtcgcccaggctggagtgcaatggcacgatttcggctcactgtaacctccgcctcccgggttcaagtaattctcctgcctcagcctcccaagtagctgagattacaggcgcctgccaccactcccagctaatttttgtattttgtagagacagggtatccccatgttagccaggctggtctcaaactcctgacctcaggcgatccacctgcctcagcctcccaaagtgctgggattacaagtgtgagccatcatgcctggccaatataacagatcttataggaaaaatagggttggggcagaccagtcaaatctcatgcagttttgttaccagagcaccaacaaaatcagtaataatcgttaagtaaaaatgctagtactaataatctccacttgcatttgtagtcagtatcatcattttttgaaattagttatttgcattcttaaaccctgaggttatgcttctttctttgagatacaggtccttgaagggttttgcttccaattagagaccagttttatcaaaattactggtccaaggaataggaataggcttcttcatcagtctctttaggggatgtatggagagattccactgattcaggaagctgcctgacctgatgcatacccagaggcccaatcaatttttttttttaaagtggagttgagggtgagatttctttgcagtgctttttgtcttcaattctaagatagcttactctggattccttcaaaacattgacatggttggggggaaattacctatgtactattccagaacataagatttgttaagtgctagatcctttcttccatttttaattttttttaatgagaacagattagttataacccttgctcaaggactgacaaacttcagaataataatcttggttttacacaggccttttttattgatcctctgtgccgaatatgtggcttatggtagatgtgagctcttccgtgacatttcatttggggaacaacttttctctttacaggcccgagtgactaagggatgtaccattgttaagcctttcaacctgtcccaaggaaagaaaagaacatttgatgaaacagtttctacatatgtgccccttgcacagcaagttgaagacttccataaacgaacccctaacagatatcatttgaggagcaagaaggatgatattagtaagtttcctaccagtatcacagttggatggaacctctcctacattccctctgcttacatcttaggcacagatttgtctttagctgaaatcctagtttttcaattaaagtatggcgtgtgactatgcagacaacaaatgtatccttcagaatttttcaaaccacccagctgtctgtcttatacccatcaaccgtcttgatcctcctcatcaataattggccaaggggaatgagttaaggtaacctgagatgtcattacacatccttaacggacatttttttgccatgtgtcaaagtgtcacattgcatttagttacctatagaaaatgaaggcatttcattcattcaaggctatgtgctttttattcagtggtccaccaaaatttttactactactaaccaggcacactgtgttaggtatatagaggtaaataaaatagacttggtgctactcaacatcaggtttctaattcaagtttcaaaactcgacatcaagtttcaaaagcctttaccataatttgtagtgacctatttatctctgtcattagagatacactaattagttctttgcattcttaaactgtcattagataaacaggtcactacaaattatggcaggggattttgaggaggagggaggtgcaagagtcaaaggaggtgggagatagggagagcatgtctgaatgttgagaagtctcgtcagagataaagaagctgaaggtacgagagagaggagataactaatggattaagtccctgagcaggcaggtattggagggatacttagcacaggtggagtgagtgttctttaaaaggaggatggaagagtgggaggaatgggtgcaaatactgggggagtttgtagatttggtggtgagcagatgagcggattctaatgtaatagtttctatctttatggaaataatttctgcaagaaggaagatgaaatctgaagggtggaggtggtattaaatagttgttgggagtatagggatagtattctggataaagcagaatgtggttgttttacctttgaggatctctaaattttttatatccttgcataggcattttttttgagacagagtctcgttctgggtgtcatcacccaggctggagtgcagtggcgcgatctcgactcactgcaacgtccacctcttgggtgcaagagattctcgtgcctcagcttcccgagtagctgggattacaggtgtgtgccaccatgcccagctactttttggattttaagtagagaccaagttttgctctgttggccaggctggtcttgaactcctggcctcaagtgatccgcccgcctcaacctcccaaagtgctgtgattacaggtgtgagccactgcgcctggccaagtacagcattttttaatattattattatgttctagtggccaaaatgattttgttagattttatagtatgaaaataatgaaatattcttctttattctaatggaaatttaaatattaagcataacttttcaaataatatatgactcagagtctgatatgtcctgctttcagaatactagtcctggcaaaaggaaagagaaattatattatgcaatttttatttaaaactttgtacagttacagctaaataatggttacatgtatctttgaaacatggcttatttctaaaatagatttggttttgatctaccactgttatgtgacaagacctaaattgaaagattcattctatattagttatgaaaattgacaaggtttcactggccaggtaaattaatattttcaatgagtggtggtgatgtcttaatattgatgctttaacatagtttttaactttctccatttgattttctgtaagatgtggtcttgatgcttttatattgatttcataaaattgggagttttcacttggtcttcttttgttatttatttatttatttattttccttcttgttttgctttttagagacagggtcttgctccgtcacccaggctggagtgcagtggcgtgatcatggctcacttcagtgtccaactcctgggctcaagcaatcctcctgccttagccttccaagtaattgggactatatataggtgcatgccaccatgcttacctaatttttatattttcttaggagacagggtctcattatgttgcccaggctggtcttgagctcctggcctcaagcagttctcctgctttggccttctaaattgctagaattacaggtttgagccattctgttcaggctttacttggtctttaggaaggccttatatctttttttttttttttttttttgagacagagtctcgctctgtcgcctaggccagagtgcagtggcgctcatttggctcacttggctcactgcatgctccgccttccaggttcatgccattctcctgcctcagcctcccgagtagctgagactacaggcgcctgccaccacgcccggttaattttttgtatttttaatagagacgggatttcaccgtgttagccaggatggtctcgatctcctgacctcgtgatccccctgcctcggcctcccaaagtgctgggattacaggcgtgagccactgtgaccggccaggaaggccttatatcttaaagctggaataagcaaaaattttttgtgttaataacaagcaaaataattggcattgtcaatagaaagtataggcctggccaggcacagtggcttaacgcctataatcccagcactttgggaggctgaggtgggtggattgcttgagcccagtagttcaagaccagcctgggcaacatagtgaaaccctgtctctacaaagaatataaaaattagctgggcatggtggtgcatgcctgtaatcccagctgcttgggaggctgaggtgggaagatcacctgagtccagggaggttggatttgtagtgagcctttatgcccctgcactctagcctgggcaacagagtgagaccctgtctcaaaaaaaagaaagtcagtctaggcccgtgcagtgataaggaacctgtcagacatggatggattttcagttcagaagatgacagtagagtttacccaaaggctaccttagtcatacccctcaataaaagaggaataggggagaagtaactgaatgttggttggtttgaccaatgtaagctgagctgactgttgtgggcccaccactctgtggttggtttatccctctctgggctacataggtgaatcaccacttacaagtaaactgggtcttgcggatctagatgaacatctgtcatctctgtttacagacctgttaccctccaaatcttctgtgaccaagatttgcagagacccacagactcctgtactgcaaaccaaacaccgtgcacgggctgtgacctgcaaaagtacagcagagctggaggctgaggagctcgagaaattgcaacagtaagtcccactggcagtatctgaggaagagttccacgaacctgcctactttattttcagttctgttagggtgacagttgctatttttctttccgtaaaaatttatggcatttgagtagtaggctctgcaggctacgcccctgcctatatgatttaaggactatagtgggaatatggagatgttctggagtataaactggtaaaaattgaatccaggctgggtgtggtggttcacacctgtaatcccagtaccttgggaggccgaggcaagaggatcacttgagtccaggagtttgagaccagcctgggcaacatggtgaaaccccatctctacaacaaataccaaaaaaaaattagctgggcatggtggcatgcgtctgtagtcccacctactagggggcagcctgaacccaggaggtcaatgcttcagtgagccaagatcacgccaatatactccagcttgggtgacaaagcgagactgtcttgcacatacacacatacacacacacacacacacacacacacacacacacacacacacaaaatctaatccagaggttgcagtagaagaacttacttaggatttcaattaaggaatgccctctaaggttaagttaggtagatcccacccttttgtgactccccaagggattgttacagctattattagtggagggaaatggaaacttagtgtgattcgtagcattggagtttatttcctgtatccttcttccattcctttttgtgcttcttttgaggagggggagcttcttctgtgaagtgaagcctcaattcttaagtggtagggatgttaggactgtctgatttattctttcttcttttattcttttattattttttatttatttattttttttgagatggagtttcgctcttgttgctcaggctggagtgcagtggtgcctctaagctcactgcaacctccgcctcctgggttcaagagattctcctgcctcagcctccctagtagctgggattacaggtgtgcaccaccacgcccagctaatttttgtatttttagtagagatggggtttcactgtgttggccaggctggtcttgaactcctgacctcaaattatctgctcaccttggcttcccaaagtgctgggattacgggcatgagccaccgtgcctggcccattgtttttcgtttttatttattttattctgttgtccagtcaatgggagcataatcttaatgattactattctttgtggttggcttactttgtttgtgaagttttcattttattaaaattttttttgtggttatttaaattttcaccttacagatacaaattcaaagcacgtgaacttgatcccagaatacttgaaggtgggcccatcttgcccaagaaaccacctgtgaaaccacccaccgagcctattggctttgatttggaaattgagaaaagaatccaggagcgagaatcaaagaagaaaacagaggatgaacactttgaatttcattccagaccttgccctactaagattttggaagatgttgtggtaaggttgaggctatgtgtgctggcagaagtgtactgctcatgaccagatatccacccattcacacaaaagtttgggtagatattatgagcagggcatcatattaggaactgcaggtgataaagagacttatcggaagtggattttgcttttagttaactcaaagtctggtatgggagacaatatatgtgtgaataatagaaaatggacagaagtgttctgagagagatgacagttaaaataggaattcagaggagaaaatggtttcttccagatagaaagttcagggtgtgctttgtagagaggcacatttgacctgagccttgacgatgtactgtagtaatagttattgtgttgctattgttgtcataatagctgacaattttactgtgtgccaggactgctctaagcccttttcatatattagcccattagttttgacaacaacccctttaggtgggttattttatcacctgtttcagatgaggtaaccgaggcacacagaggttatgtagtattcctagagcactcagctagtacatggtggagcaagtaagagttcagacactctagctacagagtctgtgatcctaatacctcattatatgcctctccattacatgatagaattttgacttgcagaaatgcaaatggactggattggcagaacattccaggcagtaggaattacatgataaaaagcctgacggtgggaaacaagaagcttctactgggagctgttagtgggtcagttaagctggagaaaagtttatcaagagccactggaaactgtttcagagaagtgagttgtagtttgataataggctcacaaccacaagtttagagaaaatgtgcaatcaggaagcaaggctacagtcagagaataagcaatggagttaagcacctgcataaatgcgaaagcggcttttagttacatttcagtgcagatgaggacctcacccgccgccactggtttggattgcctggattgatgcaggtccgggataactctagaagcactctgttttcctatcttctttctttttgcttgctttagagtcaccatgcttttaggggaaactgcaccaatgtattacctttgactgagtacctagttttgtttattgtattttcttagcactaaatcagaagcaacttgaagttatattttccaggctttacaaaaatcatgattatgcttagaaatggttctcctccctgatacctacttttgattgagagctttttgcgtgacttctgttcacgatgcttttttttccctgccatgatgcatatgtactatatgccaagctctgttacaataaactgttaagaaatcttcccccacccaagtgattaatctccaagggctgtgccttctttgtctttacccattgaggaaacagtgttgtgaatacaacaagggaaaagtaggttatatgcaaacctcagagttgtagagccagaagggctcaacgtttagttttacatacaagataatggagccccagataagagaaattatttcttcagggtttctataacactcttttggcaccttgcttttggttttttgttttgttttttttttttgagttggagtttagctcttgttgcccaggctggagtgcaatggcgtgatctcggctcatggcaacctccgcctcccgggtttaagcgattctcccaccttagcctcccgagtagttgggattacaggcgcatgccaccacgcctggctaattttcgtatttatagtagagacggggtttcgccttgttagcccggctggtctcgaactcctgacctcaggtgatccacccgccttggcctcccagagtgctgggattacaggcgtgagccaccgtgcctggctggcaccttgcttttaataacatattttcctccaagcttttccccctacctaagtttttgtttttatttatgtaccactctctcaatttgtcctatatccttgtaccttacataccaatattattattttaaaaatcaactcactttgtaacctaacgtaaatttaaagggaacttttaaataaatatgtaaatggaaaaccagtaccttttgccacaaataacacagcaataatagctaatacttatataatgcttattacatgccaggtctttattctaagctttttacatttatataataatgcacttaattctcacaacaaccctatgaggtaagcactgtaggtacttaatccattttacagttaggaaacatagaggttaaataacttgcccaaaatcacaaactagtgagcggcagagctagcatacgaatcttaggtgatatgattccagggtccatgctgttatataaaaatagaggttaccttttaaaatagaaggttcttaggaagtatgtgcttatttaaaaaaaaaaaaaacaacagtctacacctcacctaagatcctttctcatagcatcagtcacacctgaactactgtttttttttttttttgagacaatctcactctgttgcccaggctagagtgcagaaatgtagtggtgtaatctcagctcactgcaacctctgcttcccaggttcaaccaattctcatgcctcagcctcctgagtagctgggaatacaggcacacaccaccatgcccagctaagttttgtatttttagtaatgactgggtttcgccatgttgcccaggctggtcttgagctcgtggtctcaagcaatccacctgccttggcctcccaaagtgctaggatagtaggcgtgagccactgcacccagctgaactacatttttgaaaacactgattaggaaattggtttgtcagttgtgtgtactctagaaatgctagggtgaagtagtaagtagggaagggtgaccagagttcattaggagttagttgagatcttagagtagttgggtaccaggttatacctgtgaaaattctgtgtaaacagatctgcaaagcactaggtaaggtgtgaccgaattgatacgatttgcggaatggaagtgtttgccaaatccagctggttctcagaatcctctggggctcttattacataaacagatttgttgggtacatcacagagggagcccagataaagcactgagtatggtgcctgacacgcagtaagcaggggtattattaatagtaattgtcattttattgagtgcttacattgtcctgagtactttatgtagattgtcttatttatgtctgattacacttctaagaggtggagtctatacttatccctatttttcagacaagggaataaacactgagaggtatctagtatgcagaaccagaatctgagcccatcatctccttaaacactgtattattgtaccctacaatgcttactgttatcatatttattttggcaaatgaggtttctgagtttgacactggctgtttgcaggtttccctactaaaatttccagtgatttgacttcaactcttggtttctagagaagcatagcataggaagagatgttagatgtgttttcttctacccgcttcacttttcagaaagggaggttttgaaaggggtgcaaaccaaaaagtatgagacaggtctcaatcaatttagaagtttattttgctaaggttaaggatgcatgcctgggagacaggtctgtacctttctccaaagatgattttgagggcttcatattttaaggggaaagggtggatagtggggaaaggggaagagattttgaaaaggtatgggtaggtaagaggcaaatggttgcattctttgttcacatgtgagagggggtagaggaatagttacttatgcattcatctagttcagtgaatctgcatttttacataagataattagggcagaggaagcaatcagatacgcatttctcaggtgagccaagggatgactttgagttctgtcctttgtcctgtacctgtgaagataagctatcaatttatattgtcagggtgaaattcaacagaactgttttagggtgaagaacttggggcccccaaggaattttcaagtgggcaaattgtgagggaggtatgtacctttttcatctttgaatgggaggcaggtttgcatgttgaagttcctagcttgacttttctccttggcttactgattttgggggtcccaagatttattttcctttcacaggggattatagcttgcctatggaaacatttaaaagaaacatttataagagagtaagtcggccaggcgcggtggctcacgcctgtaatcccaacactttgggaagccaaggtgggctgatcacctgaggtcaggagttggagaccagcctgcccaacatggtgaaaccctgtctctactaaatacaaaaaaaattagccgggcgtggtggcaggcacctgtactcctagctactcaggaggctgaggcaggagaattgcatgaacccaggaggtggaggttgcagtgagctgagattgcaccactgcactccatcctgggcaacagagcgagactctgtctcaaaaaaaaaaaaaaaaaaaaaagtctttgaacttctagtgttggacttttacagcagaatttaagagcccaccttccagagcctgatgcagcttgtctgtctgatgcttttgttccccatccacgtcccccccagtgctgaagctgtttcgtgtgtccttacagtgtttcctctgcacttccacttgtggttgataagtggcagggggacaataaatagagttgatgaaagatgggcttgggcagcagtgggcccaagtgaggcagaaatgagaaaaggactcctggggcagaggtggagtgacaaagccttgagcacgagggtgtgaaatgtgaacttggtgctgacctctattgggcagccggggcaccacggaggtggatgtggtgtcagtgagaccagtgagtaattttagcagagatactttagggatgacttggggagggcagcaggcttttttaaaatatatatacttcccaaaataacattgcttcagagtagtttcctaactgccctgggacaggcctgagatcctgtcccagggtacttggggggcacatcctgtcttagggagaggtattcacctccccattcccatccccagtcctggctgcttttcctaaatgcatcatttatccacccacattgccccattctaaccacatatcacctctttagagataccttccccttcattgagggagcatccctctaataaccattagctccatattctgctgggtttctttagagcacttgtgaaaatttggaagtatttaatttgttaaatcttcattgtctctttcctccattagaatgtgagctccctgagaacagggaccgtgtgtatctatattattcactctgtatccctagcccctagcatagtgaccaccacagcacaagcactctgatatcggataactgagtgagtaatagtagaagctgacatgcacctagacactaggaattcaaagatggtataagacacggcccttgtcctcaaagctttcatagtctggtagagcatatagatgtgtaaatgagtaaatatggtaatattaaccaacatatgttcattgaacagttactacggggtcttctagtaggtgatatgggaagacaaaagaatgcaaatgacaatattccagtcctcaaggagcttataatttaaaaaacttaaaatagcaaaaacaaaaaaaaacaaaaaaaaactttctttgtttctgtaaacccaattttcttttcattatttctaatcgagcccctagttaactttgatggaaggggggctggggtgtgagtggatagttgctgcaaagatgattttcataaatcatcttttcctctcccccaactaattaagagattgagctcactcatacatatctccttcatggcctacttattagaggtttcccttgcttctcttttaaaatgcagacatttctgttgggtgaatgcagagagagggaattatttcagaactaaatgaatcctcaattacttatttcaattactttattttattaaaaaaccccaaggcctagaaggatatctgatgtgtttaaggttatacagattggaagcagagctgggctggaacagacagacccgtggcttcttgctcactatttgtctctcttccacttgcccctggtgcattcaagcaagatgctagtgtccacatgtctatagaagagcagattttgttgttgttgctgttttatggtaaacatcatttgacaacccatttcttggagttttgtcactctgaatacaagatctgctatattggatttcactatgctaatgattctagcattctttagaaaacatataagaaatttcacagcagaatgagcattctcagtggtcaccttgagagactgtaaatcccttccaatgattgtgatactgcaaaaagcattttggaaaagccatgcatcttgaatcctgagatgagcctttgggatccctcccaggatgacaaatcttcacgtgtattttaaacattaatttgcttttaggatctagtctaaggttatttggaactaaaacttctgagtagtccaagataatagaggtgtaaactatttgttaaatgaatagtaaagattgagcaactgtcttgcatggtccagaaagtgcctttgaaagccactccaagaaagacattccaaacatgtttcgaacggttgcagcattgttgggattaaggagaaggctcccaaggtatcctcctagagtccaaggtataaattctgttactcatgtgttcattcattcttactgcattcattcaacaaacatttactgagtgctttatacttgccaaggtctatgttaggtacttgggtctgatggagtaaaatagtctccatcctcgaagcactcaggctagcagggggaaatgaacatctaaataaataagtgcaattaagttttgtatggactgtgataaaaccatatacaatgggataaaggggtcagttctgtaggtcctgggagtggagagatctattgaaaggctttataaaagaggaaaggctttataaaagtggaggcttgaaaagatgaattgggtgctttcaagcagccggggcatttcagacagagaaagcacaagcaaaggtaatgagataggaaccatttggggagcgatcagtagttcgttgtggttgcaacgtgatatgtaaggaggggtgagaggtaaggcgggagagtcaggagggtaccagattaatgctactactaaggaggccatgaaggcgatatttatgagtgagattcaagcaagtgccttgtgtttcacgaaaaggaatttgttatgctgttgtaggtaagcaataggagccattaaagaattaatttttttttctttgagacggagtcttgctctgtcgcccaggctggagtgcagtggtgcgatcttggctcactgcaagctccgcctcctgggttcacgccagtctcctgcctcagcctcccgagtagctgggactacaggcacccgccaccatgcccggctaatttttttgtatttttagtagagacggggtttcaccgtgttagccaggatagtctcgatctcctgacctcgtgatccacccacctctgcctcccaaagtgctgggattacagacatgagccactgcacctggcctaaagaattttaagtcaggaagtaatgtgatcaaatgtgttttagagtaataatgtggactacatgcagacaatgaattggaggaatgagttgtggagctgaaagactgttaggagactagcagaatggcacaggcaatagctgaagtaggtctggcaatgaaactttagggaagagcagaatagagagctgatgggggcaggatgtggacacgagtgtaacaagaaattactgaggttttgttttgttcttaatcgatctggccgtacacttcattcaaaacagcagccaagagataccattttgcagttaggattaattgccagatttgtgatagaatataaactctgtgtgaatcaaaaaatgctgtggaacaactctctaaaatgtgttagttttaaattatgtgcacaatatgatacatgtcatttattccacaacgatttgaaatgttagcagtgttttaaaatcattaaggaaaaatcttcagggtagttgaatgtgttggaattatgagatataaggctgggtacagtggttcacgtccgtaatcctcacactttgggaggccaaggcaggagattgcttgaggccaggaatttgagacccatctctacaaaaaatgattagctgggcaaagtggtgcgcgcttgtagtcccagctactcaggaggctgaggtgggaggatcacttgagcccaggaggcagaggttacagtgagccgagattgccccattgcactccagcctgggcaacagggtgagactctgtctcaaaacaaacaaacaaataaaaggattatgagatgtagaaaattaaatttctctcttaattcaccctcaaagagatatgagagttgacaatttggtgttctttcccttttatgttcttttattttctgtgcttagattaattatattttaaaaactcaaaaatatcattctaggccatgtgcagtggctcacacctgtaatcccagcactttgcgaggccaaggcaggaagattgcctgagcccaggagtttgagaccagctgggcaacatagtgagaccctgtctctacccaaaggggaaaaaaggatttaatcttctcatacagcttagtggagatcattttgtgatatctaattgagttgcttactcctttcagggtgttcctgaaaagaaggtacttccaatcaccgtccccaagtcaccagcctttgcattgaagaacagaattcgaatgcccaccaaagaagatgaggtgattccctgggagtaggggggttctttttccttctatatagtcagtcaatctaagccttatcatttattaatcttaatggagttcaaaggcaaccactcttttttggacttgtctttaagaatgggtatgaacatttgttcattttttttgttcctccaagaacaaagtaattggtaagggtatgaattttctgctcttagtgataactagttacaatttatggaaacagtaaggagcagttaagcattggaggcttgtctgctgtagcattgaaaatcagctgctctttgtaacatggatcaaaagttgcactttattttgccttagattgtcactattcagtgatggactttgaaaattcatactaagcaattacatccaccttgtcctatctccgttaacccagaggagttgcaaaggtgactgtggtgatcgtttatggaattgtaatatataaactgtcattggtcaggccagtttcttgttacatctcccattttatctataaatatccagagttagggtaattttatagcagattgcaagcataagcctttttataggttcatttgaaactaaaatacgcagtaatcttgtgttaccagcttgaacccaaacaacttgggtttggcaatcctattctgggtttggcaaccattaagtcccagtcacatgttttaatgaagtctagaggctgggtcaaagaagagactaaggtatatgcttggttgggaccgatcttctgatgttcattttattcataatgttagatcttatttagtttttacaacattcctgtggaaaactagatcttttaagagtaattgtgttagcccttggtggtagatgacttacctaagtcatcatccttcttggatagaaaaggaagctaagacttcctttaattttgttttaattaatgccacatattaatataatgtcttctgactccacattctggggaagttggagagagtgaggagtcttatttctaaactgcaattttttccctaggaagaggacgaaccggtagtgataaaagctcaacctgtgccacattatggggtgccttttaagccccaaatcccagaggcaagaactgtggaaatatgccctttctcgtttgattctcgagacaaagaacgtcagttacagaaggagaagaaaataaaagaactgcagaaaggggaggtaggtgtttccatttctgcaagtagtgtaatactattctttgatccctcaaagacagttttttctgtagcacttttaactataaaatcactgacttcttttgatctttctaagaaccctataaaatataaatgggacaagtaatttaaataatccttctggcacaaggaggttaagtgacttgcctctgatcacactgctggttataggcaatattaggaggaaagcctagatttccttttgaacccattattcattctttcatgctgctttgaaaggtttccttccttatttttcagattcttccagatattctggagcagctattgctttccagctagtctttatcttaaacctcatgttttcttttctgttaggtgcccaagttcaaggcacttcccttgcctcattttgacaccattaacctgccagagaagaaggtaaagaatgtgacccagattgaacctttctgcttggagactgacagaagaggtgctctgaaggcacagacttggaagcaccaggtaggggatggggagagcagccaaaatgttaattgcttggttggttgattgtacaggcagacccaccatactgaaatcacctgggttaacatgctacattgtttcaggggctctcactgtaaatcaggggtcagcacattatttctgtaaagggccagataagaaatattttaggttttgtaggttacatatggtctctgtcgcatagtgtgtgtgtgtgtgtgtgtgtgtgtgtgtgtgtgtatgtgtgtgtgtacgcacacattttgttgttgttgttgttgttttttgagacagagccttgctgtgttgcccaggctggagtgcagtggcacaatctcggctcactgcaagctccgcctcctgggttcacgccagtctcctgcctcagcctcctgagtagctgggactacagacgcccaccaccaagcctggctaatttttttatatttttagtagggatggggtttcaccgtgttagccaggatggtctcaatttcctgacctcgtgatctgtccgcctcggcttcccgaagtgctgggattacaggtgtgagccaccacacccagctacatgttttcaactctttttttgtttggtttgagacagagtgtcgctctgtcacccaggctggagtgcagtagtgcgatctcggctcactgcaacctccgtctcccaggttcaagtgattctcccacctcagcctcccgagtagctgggattacaggcgcgtgccaccacgcccagctaatttttgtgtttttagtagagacaaggttttgccatgttggccaggctggtctcaaactcctgatctcaagtgatctgcccaccgtggcctcccaaagtgctgggattacaagcatgagctgctgtgcccaatcaactctttaaaaatgtaaaaaccattcttagctcaagcgctgtcctaaaacaggttgcaagctggatttggcctgtaggccagagtttgctgacccctgctctaagtgatcacctgggaatgtcccctgctccaagtgatcacccggggaatgtgggaaccgacaggcttttctggagttgggagtttctttaagatcttatctattccatctattagactcattcattgtgtttattcctttctgttgatgcattggtaagaaacagtatgggagaatagattgaaatatacaatgctgttttctcagcatgatgtgctatttgctctttataaatgacaggtgatttaaaacaattaattggttatttgctgatttaattgggatctaattctacgtggctggaaaaaatttcccctgaatttctaagttttttggatttttatgtcatcattaatcttggattctttccaaaaggagctctaggctattgtttgtttgtaggaattacccctcctgaagcccgagagttgtaatggcttacatgactgaacgttggtcccctgttagtgtggttctctaagaaaccttaggactgttgccttggaaatagtgaattttcccctctcaatgaccaagacacagaatgtctgtgtagggcattttctgcaaagaacaacaacaaaaacaattgttttaaaaagcttttcagaaatataaaagtagggtgaatagtataatgaattttcatgaacccatcacctggttctatagtgatcaaaacatgaaaagtcttgtttcatcccaacttctacccacttatcttacactggatacttctacctgtgtaagattactttgaaacaaattctatgtaacatcccttttcatccaaaaatacttcagtgtatatatttaaaatataaagacttataaccacaataatattctcacacttaaaaagattaaaaataatcaaatatctgcacatttctcataattttttaaacagttgaattgttaaaatcaatatccatatatagtctacatagtgcctttgtttgctaaatctccgaatcttctttcaatctataggctcctctctttgcattttatttgttgaataaactggattgtttgtactgtagattttccacaatctggattttgctgattgcgttcccacacagttgtctaacatgttcctctgttgcttgtatttcctataaatgagtagtaagatctggaggcttgattcaattctggttagatttttttttttttttggaggtgggaagaatactttataggtgatactgtatagttcctaatgaatcatgtgtgaaggcagaaaatgtctagttgtttatttttatgatataaagataggtcttaaaagtacctttaaaattttttgttttttttaattgacaaataatagttgtacatattcttggggtacatagtgatgtttcaatatgtataatgtgtaatgatctgatcagggtaattagcatatccataatctcaaacatttatcatttctttgtgtttggaatctttttttttttaatttaaaagtaaactttagcacaccaacatggcacatgtatacatatgtaacaaacctgcacattgtgcacatgtaccctaaaacttaaagtataataataagaaaaataaatgtgaacataaactaaaaagaaaaaaaaaagtaaactttaatgtcgaaaatgcaaacttgggaatcttaaaagtatcttaaaaatgctttctagttctcagtgagttcaaatgttgtcagactgatctgttcattgtaaagtttgtgtgaaagatttttactagggtttatattaaatctgctatttttattgatgaagcagttcagacattagaacttaagttattgaggtagtggtcatagaaaggtgagacattgctcatctgactgactttctctctaatagctggaagaagaactgagacagcagaaagaagcagcttgtttcaaggctcgtccaaacaccgtcatctctcaggagccctttgttcccaagaaagagaagaaatcagttgctggtagtattatatgtactctgatgggactcgggcagaattgtcagacttcccagtgggatgctggaattcagtgtgtcagtacaatgctgtgtcaactagaagcatttgactttagcagatggtagcttttcttcccctagacccagttttttgcctttattgaacccagcagctatgttgagttgcaggatgtgttagggccagattcatttaacatgaaccttggcagaagcagctggcatttcaacaacaatgataggttttccccatccacagagaaacaagtaaatgagggagggagagccagtatggctttctggaattcaccctgaagcaaactttagatataaaacatttgattccttaaacactgggcagtgtgctagaatactgggattccaccgggtgtggtggctcatgcctgtagtcccagcactttgggaggcccggacaggaggatcacttgagcccagggatttgagaccagcatgggcaacatagcaagaccccatctctttttcaaaaaaatctttccaaaaagggaaaaaaagaatattgggatctttcttctatgtctgcctcaaaatcaatcactatatagttttgtgcaagctactttatgtctttgcctttttcccaattacaccagacgatttccaggggccctttgaactcttaaaattctaaaactttttgtatttagttggctctacctttctcccaatggggcttgtttagagcacagtcttcctgttagtgtgcatgtctgtgccacttgctcattccagggggcgtaggtttatgcaagtcctgcttgtgcaccaatattttttctgtttctgtacttagagggcctttctggttctctagttcaggaaccttttcagctggctactgagaagagagccaaagagcggcaggagctggagaagagaatggctgaggtagaagcccagaaagcccagcagttggaggaggccagactacaggaggaagagcagaaaaaagaggagctggccaggctacggagagaactggtaactgggagcatgagcactgacgaacacaaacatgcctctgttttattttacctgtaccttaccttgtaccagacaggatctaaggtagcccgcaaggctgtaccaaagacaatgagtgaaagggggaattgcacaaactgagggtggtgatgaagttgagttgtgaatgaagctaacgatgtgtacattgtgatctaagtaggagctgtaattttggccctttttaggaaccaacctgtcagttacaaaactcgcagtgttcatgagacataagacagttgttcaaaaaatacatttatccctttgatagtgaatttttagacagaatttcttccggaagttttcataaggaggacaacatgtggtataaccatgatgcctttcctaggactgttttttatttatttgtttattttatttatgtaacttattatttcctctggggttaagaagcaccactgagttttgtaattagacaagaatacatagcgaaggacatgggaattaaatggcaactgtatttttgttttaatactgagcccaaactccttggagttacagtgttcgtcgctccaggtaatcctctactaacataattatttagatgttggttatccaaaaagaaacctgaactccacattaaggaccaatctgctaggagggcagcaagttgtgttaactgtgttaatgaagaagcagacagttttagatggaacttcgtatgataaataaaaaaagaaagggtcatggggagatgttggtaaaaggttacttagttacagttagatgggaggagtaaatttcaagagatctatcatataacaaggtgactgtagttaatgatatattgtattcttgaaaactgtaaagaaagtggatgttatgtgctcacactacaataagtggatgttatgtgctcacactacaatgttaattagcatcttgctaattaacaaatgcattatctcacatagtaaccattccataatgtatgtctactttaaaacatcagcggtacacaataaaaatatacagtgttatctgtcaattaaaaagaaagaaggccaggaatggtggctcacacctgtaatcccagcactatgggaggcccaggtgggtggatcacttgaggtcaggagttggagaccagcctggccaaaatggcgaaactctgtctctactaaaaatacaaaaattagccgggcatggtggcacgcacctgtaatcccagctactcgggaggctgaggcaggagaattgcttgaacctgggaggcccaggttgcagtgagccgattgtgccactgcagtccagcctgggggtgacagagcgagactgtctcaaaaaaaaaaaaaaaaaaaaaaaagaagtgtaagttgttgaggttttgtctaaaagtgctatactacagctggatgtggcagctcacacctgtaatcctcacactttgggaggccaaggtgggaggattgcgtgagcccaggagttcaagaaaagcgtgggcaacatagcaaagtcccatctctattttaaataaataaataaaatgctagactagcagttgaaacagctattggcagctattggcataggtgattatgcccataggaaggttccacggacacactatttaggagaccagcctcttggtaaaatctagactaccatttgctgagtgaatgagaaaatagtataatccccactctatatacactcatacaatcagccttttttcccggcctcaactttgatttttctttagcatttggtacctgcctcttgtgtttgtccccattatagaactgcttcttgcagcaattctcaacataactgatggcaacattgtaaagcacaattcagtcaatgctggttaactctctactaatctggcttgatttaggattgattttagactaccctaaaggatggatgggaccatgccttctttagccacccttcctggtatggttgttgtgttttgtttttgctttttccccaggattcaggcttttggtgaatatttatagtcagtaaacttaagactgtactctgggaaattcttagcttgtaacttctctgctatacttgagtacagccctattataccctagtaaatcacacaggacataggtttggcattctttagtgaaagctgagggacttgaggagactgtggcctaaaggaaagctgggggacccaatagagacctgaatagaaacccttttgggctccaaagcacatacacttttccatcataccgtgttgccccccaggccccactccccacacctgaaactagtgactgggacctgtaaaactctacaaacattttctcaaaaagaaaaaaataaaagcaattataagcgtagttctctgacatccctctcactggtaacttttccttactttgcaggtgcataaggcaaatccaatacgcaagtaccagggtctggagataaagtcaagtgaccagcctctgactgtgcctgtatctcccaaattctccactcgattccactgctaaactcagctgtgagctgcggataccgcccggcaatgggacctgctcttaacctcaaacctaggaccgtcttgctttgtcattgggcatggagagaacccatttctccagacttttacctacccgtgcctgagaaagcatacttgacaactgtggactccagttttgttgagaattgttttcttacattactaaggctaataatgagatgtaactcatgaatgtctcgattagactccatgtagttacttcctttaaaccatcagccggccttttatatgggtcttcactctgactagaatttagtctctgtgtcagcacagtgtaatctctattgctattgccccttacgactctcaccctctccccactttttttaaaaattttaaccagaaaataaagatagttaaatcctaagatagagattaagtcatggtttaaatgaggaacaatcagtaaatcagattctgtcctcttctctgcataccgtgaatttatagttaaggatccctttgctgtgagggtagaaaacctcaccaactgcaccagtgaggaagaagactgcgtggattcatggggagcctcacagcagccacgcagcaggctctgggtggggctgccgttaaggcacgttctttccttactggtgctgataacaacagggaaccgtgcagtgtgcattttaagacctggcctggaataaatacgttttgtctttccctc

SEQ ID NO: 55 - DNA, 22907 bp, Homo sapiens
acaaggcagcctcgctcgagcgcaggccaatcggctttctagctagagggtttaactcctatttaaaaagaagaacctttgaattctaacggctgagctcttggaagacttgggtccttgggtcgcaggtgggagccgacgggtgggtagaccgtgggggatatctcagtggcggacgaggacggcggggacaaggggcggctggtcggagtggcggagcgtcaagtcccctgtcggttcctccgtccctgagtgtccttggcgctgccttgtgcccgcccagcgcctttgcatccgctcctgggcaccgaggcgccctgtaggatactgcttgttacttattacagctagaggtacaaggggtttgttgagtggtgttgacatgcgcgggaggggtgggtgggcttcagattggattttgtcctccgagatcacctgggtaagaaaagcacagaaggtctctgctgtgttggagttcacgttctagtgggtggggagacagacggtaagcgtacggagaacttgcagctggggtgggtgttacagaggaaaagcaggagtgcggtttaacgggggccgctttagatagaatagcctaagaaggcccttgtcctggctggatgagtgggtgaattgatgaatgagaacctccttgcagaggccttcccggtccgtacttctcagaccgtagaccttggagcagttgtaccgggataacttgcagtgcttgttaaacatatagctccaccgagagcccggtaaatcagaatctctgaggggtaggacccaggtgtctagttattaacaaactctccagatgattcttaggtttcattgagaactagggatgcagaccggtgcatacaaatcgtctggggacgttaaaatgcagaatctgtttttttagacctggggttaggcctcagagtctccatttctaagaaccatccggctgaggtagacgtagccactgtccttaactctcgtaatgtctcttcctcttccgtaaccttccttgtcccttgaattaaacgtttttcagcaacctactcagttcgtccttcccttcatctctgcagacatgcacaggtctgagggaggaaggaataaaccgtataaacctcctgcgctattagcctaacagcttttctattcaaaatagtaggacttctggtttgaactgaatggatcctgtgaaagtcatctggttcttcaatctggttgcagattagagtcacctgaagggcagtctccttggcgttgtctccagaattctggattagaatcttattccattctgcttgttattcaatttccctagaaagaaaggtagaataaattggagcaaatgcctgtagcttctgtcagaagaatgttgaataaatgttgttaggcctatgtgatctcattagactgctacttagaattgtaagggaagtaaagcattagagcatgtgtgaaattaaatatttgattaacacaagtgtgcatttccttgttgctgtttatcaacttttacttacccactgtttttttataagggctgcagcctgtagtctgggcctggcttcatcatggaattatttgcttaattgtaaaatggtaatcttaatttttttttttgagacagggtctcactccattgcccaggccagagtgcggggatatttgataagaaacttcagtgaaggccgggcgcggtggctcatgcccgtaatcccagcattttcggaggccgaggtgggtggatcacctgaggtcgggagttccagaccagccctaccaacatagagaaaccctgtctctactaaaaatacaaaatcagctgggcgtggtggtgcatgtctgtaatcccagctactctggaggctgaggcaggagaattgcttgaacccaggaggtggaggttgcgggtgagccgagattgcgccattgcactccagcctgggcaacaagagcaaactctatctcaaaaaaaaaaaaaaagaaacctcagtgaaatgaaagactgaactacacacctgggggaaaagcgtaataaagggagcaagaagtgcaaatgcttatggcaggggacttatttgcagaaagaaagccttgtgtggctggtacacggttgacaagaagaggagatgaagtcagagaggtagttagggtccatgttctgtgagacttcaataggcctgtctatgcaggttaggagtttgcattgttttgattgagttgggagccatgggggtcttctgaactgaggatcaacacatctgatttgttaatgagattgccggcctcagtgttaagaatggaccatgacagggtaagggtggaagtggggaggccattgggaggctgttggaaaaaactcaagggagagagaataatggtttgaccaggtggtagtagtagaggtggtgagcagtgatcttgaaggcagagcctacagaatatgctggtggattaaatgaagggtttgcgagagagaacctcgtaaagggttattatgccaaggcttttggcctgagcaactgacaggatgggtttgccatgcactgagatgaggatgtctagagactagatttggggaggtgagagtggggagagattaggacttctgtttgggacatgttagaatggagatgccgctcagataatcaggtgcagatgttgcatagaaagtagaaaatgtagatcaagagttcaggggagaggtctgggctgaagaatgaatatttgggagtcctcagcctgtagatggtactgaaagcaaagagactggatgtactcggctagggagtaattggagatggagaagtcattctaggcctgagctcagggcacacccatgaacagggaggtgagaagtggagaagggaagaggttcagttttggatatgttaggattgaggtgcctggcagacatttttgggagatcctgggcaaatccttggatatccaagtctgacagtccaaggagagactagggcagaagacgcactttgagtggtcctcatgaaggcatttagagctgaggcactgggtgatatggatccctggtgaaggtgtagatggagaagtggagggtccagggactcgttcttgagtcaccccagacccttgatctggcaaaaatgagactgacccagcaaggagggaaagacaggacgactaggtggtagataaacctggaagtgaagtgaagaaaaaagtgtaagatgtgatcaaccttgtcagattctgctgaggatgcaagtacggggaaggtggaattgacccttgggtttggcagcagtaggtgtcagccatgagcctgacaatgtggtggagacaaaaaagccaggtggggatgggctcaggggaggggagaggagcagtagaggtggcaagtgtggacggttcttctggagctttgctgttggagaggagggggtcattgttagcaacgataatagaataaagaggacttttattttattttattgttttgagacgaagtctcgctcttttcccataggctggagtgcaatggtgtgatctcagctcactgcaacctctgcttcctgggtttaagtgattctcctgcctcagcctcccgagtagctgggattacaggtgactgccaccacgctcagctaagttttgtatttttagtagagacggggtttcaccatgttggccaggctggtctcgaactcttgacctcaggtgatccgcccacctcggcctcccaaaatgctgggattacaggtgtaagccaccatgcccggcctaaagaggacttttttaaggtagcaggtatgccagtaggctgcacagggatggaagtgatccattagaggagagatgatggagcagcaagaccatcaggagtgaagactccgtgacagaggatgggacgcagtgcccaaggggaggttggccttgcagggaaagcacatgcctgtccctccctcattagcttcatttggacaaaacatgtaaaatccggtgtgttgtggaggccttttgattggggaactgtaacgctgcctatcgagcaacagcactttaagcaggtggctttgttcaaattaaaggttcttctttttcttttcaggcatcatggaccgatctaaagaaaactgcatttcaggacctgttaaggtaaattgaataatctgtaatctcattcacatttataaacccacatggaggttggtcttgtcgggaattctttccgcctttactttggatttaaatttagatcccttactgtgatcctggatatgaattagtcacttttctcgtgttcagtaacattttgctgcttcttagagtagcttttttgttctgctttgtcttataatcggctgcttaagtttctatatccctccactgtatgcaggataatagtaataatgcatctggcaggagttcaaaacttttaaaattggccataaatataaaataattagaaaaaggctaccttgaattactgtatttgattctaagttcctatgataacggccatttaaaaaattgctctatatttaaaatgtttctttttatttgtctttgtctgaatgcctgctgcgttgtggacagtgtgctaatttcaggagtaactgactttgtatttggaagtcttaacaccctctctttgtagagcactcataccgttgagctggggatggactttgaggctttcatttctagcacttgtccctcacttacaatgagctgttgaagctgaaggaaatctcatccctcctaccccttttagtttgattagctgagggtgttagagttaacttaacaatttaaggttgtaatacagtacttacaggcgtataaataatacatttcaaggctgggcgcggtggctcacgcctgtaatcccagcactttgggagaccaaggagagtggatcacaaggtcaggagttcaagaccggcctggccaagatggtgaaaccctgtttctactaaaaatacaaaaaattagccaggcgtggtggcaggcgcctgtcgtcccagctgcttgggaggctgaggcagagaattgcttgaacctgggaggcagaggttgcagtgagccgagatcatgccactgcactccagtctgggtgacagagcaagactccatctcaaaaataataataataatacattttagtagtaactttgtgaagtgtctacatttgtttcctctttgtcagttttttgctcaattccattttgtcaatacttggaaaatgaaacattggttaatcaatagtacagtaataagcttattgtggaaaatcttcgatatatgaaaacttagactcttctaaaacttcatgaagataataccactgttgaacgttttgacgtatttttttttggtctttttcttaaacgtatattatcaaagaaatttcaatggaactgagattttggcataaagtttttgtatcatagctttttgccaaatagcaatgtagtgtctatttccaaattattgagaaattttagaaagtgtctccttcattaatggatatttgttaataaagcatgatttttaggggtgaggaattggaggggatagaaggtatcattcaggtattcttagccacatactaactatcctctggaggtactgattaaaataccttttcaccttccatctcttatcagtgacattcattattttgctatactagagaacaaactttgtgaaattctcaatatattcatcttttgctttcatgaatgccagaaagtttattttctcttccattctaggctacagctccagttggaggtccaaaacgtgttctcgtgactcagcaatttccttgtcagaatccattacctgtaaatagtggccaggctcagcgggtcttgtgtccttcaaattcttcccagcgcattcctttgcaagcacaaaagcttgtctccagtcacaagccggttcagaatcagaagcagaagcaattgcaggcaaccagtgtacctcatcctgtctccaggccactgaataacacccaaaagagcaagcagcccctgccatcggcacctggtaaactagcttttgagactcattggatagtccttctttgtcgtcgttgctaaaaaagccagtgtatatacttgcacttattgtttggagccttagcttttatatctgttgaggatggggagaaaatatggtgtctgggttgaagtaacagtgtctgcccatgggccagacctatgctaaaaatacagacctgattctcaccctcttggaagagttgggcacccagggaggacacagcataaattggtgtccttttgattgcttgttactgagtctggatgtagggtgcttgcagtaagtgacttgaagggactgagatctaaagtgtgggggaaatccagagaagtgggtgaactgaggcaggctgcggtgaggtcaccatgggcattgctggccatgttaaggaatggggcctcatctctagggcatttggaagctactgaagcttttttgaactcagaagggaactctgccttttagaaagtttactgtggaaggccaggcgcagtggctcacgcctgtaatcccagcgctttgggagaccgaggcaggtggatcacctgaggtcaggagttggagaccagtctgaccaacatggagaaaccctgtctctactaaaaatacaaaattagccaggcgtggtggtgcacgcctgtaatcccagctactcaggaggctgaggcaggagaatggcttgaacccaggaggtggaggttgtggtgagccgagattgtgccattgcattctagcctgggcaacaagagcaaaattctatctcaaaaaaaaaaaaaaaatttactgtggaagtactgaataaattggagtagaacgctggatttaggagtaccagacaggaaggaggttgaggtcagagatggcaataacctgctctgtgtggagcagagtggatgcaattatttaccaactgttgagtgctcattccctgcaggctctgagataagtgcgtgcttcatccacgtcatctctttcaatcttcgtaaccacttcatgaaggtagccagttattaactcagttttacagaggaggaagctaagactcagaagcagttaacttatccaaagacaagccaggatggagaggtgcacacaaatttgagagctcatttacgatgcagactcattagaactgggcaataaattgtacctgaaagatgaataaagaggagttagggatggtgattagattgatattaattgagtgagtgtcctgggggttgaggggtgcacatgtgacaggggcatctggaggaagagtttggaccagcatccagatatctgagcagagcattgtgtgctgttcgagtttgctatgttggagacagaccagtggaaatgtttcatatgtccttgtggctgatgaaatagttaccccagtcctctgctgcacaactgttcattgtgcattttgctgaattggtggcttttatttttatatttccccttggcagctaatataaatggagggtggctggcttatgttttgctacatgttggtgataattcgtatgtagggtatggactgttggctggcccacctagtaaggggaaaaaggtgacgagttggcagctcgtcatgcatgggaagattggtacttctgccacaaaagctcttctttggaaactgaggcttcagaagagcctgcatagtctgcctttaatttatcagagaagggcctgtctatatatacgtctgctcatctttagaaattctataaaggcttcacatgatggaagtcagggtgtagtagtcctttttttctataaggaaaactttaaaaaaaaaaaacagatttatcattcttgacataccattaatattttggtgaccaattctttgattcacctctattcacagcttagcttatcctatatagttattctaaaaacaggtttttaacttattccatatagaaaataatcctgaggaggaactggcatcaaaacagaaaaatgaagaatcaaaaaagtaagctttcttatttacaaagttctgtactgttctactagaatatattatttcgttgcaaatttcgttgtgggaactctggggaaaaaaatgaggcctttatttgcatttagaggatataaatgtttccagatttccaatcttaaaaaaaatggaattttgtgtaatgaggtattttactaggaactcaagtgctttaaaaaatggctttcaaatttagaaaaagcttgtatgaatcttttatagaaatgtgtggaagttcctctctgtccttagaaataaccactacatatggtttatgcgtctgtacttttttattgtacaaaagtgcaagtttttaaaaaatagaatatgttgcagaactatatactcatatatgactgagggttttgacagtattatagttttagttctttattgtaaaggttggctgtaatgtcttccccagggcttttctaaaagcctcctctcagtctctgaactatctggactctagaatgtaccgggaggagcgaggaatgaacccacagactcttttgcttttagcggtctaacagaggctaagagtctaaatccactggttctcatgccccagctagcctgtgggctccatcccgcttccattagtaacagtggctctgtctccaccaccagagtggttctccacccagagagaattagcacctctgggactggagggagcagctggggttagtttgaaacatgcccccagatggtctggaagcattcctccctctctggtcacttatcctttttgtggtcttcagcgttgtcatggccctgttcctctgagcatagtacgggcttgggacatttcccatagagtgcttcaggtctaaaacccgagactgctccttgtcactgactctcacacctgacggcagctagggacgtcagggtttcatgtcgtggcagctctttgatagtggttattgccttggttcttgctgaggatgcatattgagtgaagttggaatacgaaattatttgtagaatgtgtctgctactcattgaaaatttgttagaaaagctttgttttcttcacattctaaagtgttcaaattcctcctaggaggcagtgggctttggaagactttgaaattggtcgccctctgggtaaaggaaagtttggtaatgtttatttggcaagagaaaagcaaagcaagtttattctggctcttaaagtgttatttaaagctcagctggagaaagccggagtggagcatcagctcagaagagaagtagaaatacagtcccaccttcggtgagttttcaggttcatgttcaaaagaatgttcaccaatgctgcacccctccccctcctgtaatgtcagcctcccactgcccaggtcccttcactccctcttacgaggcactgccttcaaatgcatggccccgttcctcacctccccctcccctatgaaaaagattagataagcttctgtactgcactgggttataagcattctcctgtgattctcccatgctctgcatgttaaaataaaattgtattcctttttttttttttaagtataaatttattttttagagggcctgcttttcatagtaccacaaaaaatgattaaatttgtcatctttcaaagagcacttaagtgctctgatcctggaaaaatcacttgaggatttaatgttttgttaatagaatagtttatatgggcaagtctttctggtggacagtgaaggggaatggcaccccttattctgaggtatgcaggaattgcgagcagctacctgcaggttgactacggctggtgggtttttgtttttcctttttttctttcagtgtttttcaaatttgaatcagatgctaatacttcaagtctggccacatcaggcctggtgtgtctctgcctggcaacacctggctggggctgggaggggcaggcatctcacatgggctgtgcttcccattgcctgcttcccgctggccacagtctgcacctgcccagtctgctcagcacccatctactgccattactgatcactgcttttatctgtcacagtgtctgggtgtcaaactactgtggcaatgccatgtcctttttttttttcctttttttttttgagatggagtctcgctctgttgcccagactggagtgcagtggcgcaatctcagctcactgcaacctctgcctcccaggttaaagcgattctcctgcctcagcctcctgagtagctaggattgcaggcatgcaccaacaagcctagctaatttttgtatttttagtagagacgaggtttcaccatgttggccaggctggtcttgaactcctgacctcgcgatcctcccgcctcggcctcccaaagtgctgggattacaggcgtgagccactgtgcccggccatgtcctttttttaatatgtagataattaatattcagctgaattttcctcctaagaataaaggtgcctaaaggaaggaaatagtcttaactaaaccagaggtccattaatactgtgaagtgcttttaaaatgatatgtgggtgtatgtatttttcttggagtgggtttatagtttcagattctaaagtggggtttggagtgtggtttcatgtgaaacaccactggttttacatgaagagtttgtttgacattttgtacatagtcttctgtgagctccaaaccaagtgttagaatgtttatcctttgttgcaggcatcctaatattcttagactgtatggttatttccatgatgctaccagagtctacctaattctggaatatgcaccacttggaacagtttatagagaacttcagaaactttcaaagtttgatgagcagagaactgctactgtaagtgttcatttattgtccaggctaattgtgtttcctttatacctgtcctccatagcaatgtacctttcatcatagtagagtgggttttgtcttgacgtaaggatagcttaatatcaaatatttgaagtggaaaaatcaaaatagcttagttgtaccatatgtacagataaagtctagaaccaggtagaatgttgtatctgcttttgtgcctagtttgcacagctgttttctatggaaatgtatataatgtatatagatagtcaccctcattttctttaatagatgttttattttagaataatttttattttattttattttttttaaagggacagggtcttgttatgttgcccaggctggactcaagtgattctccacctcagcctcccgagtagctgggactacaggtgcacaccattgtacctggctaggatagttttagatttacagaaattgtgaaggcagtacagagagttcccatataccccacactgaatttcctactaattctcctactaacatcttgcattaatatggcacatttgtcacattcaatgaaccaatattgatatataactattaactcaagtccacattttattcagattttcttagtttttctcatgattaaattgggcttatgggtttttgagagggagatcagaggtaaagtgcattcttatcacataccagggatgtaaactcttatgacttttaactgtggatgtcagcttgatcttctgactcagagagtgtttgtctggtttctccactgtaaagttactattttttcccctttccgtgctgtatttcttcaaaggaagttactatgaatagcccacacttaaggagtagagagtggatggagtattgccataaattatctggaattctgtgccagagataaggctgttctcccttatttatttaatcatttatttatttaaagatgtagactcctgggtatttattttatctcttgagctataatgcaatactttattttgtggttcagatcattgcaactttggccactgggaactttttttctttctttttttttttttttctttttgagacggagtctcactctgtcgcccaggctggagtgcagtggcgctatcttggctcactgcaacctcagcctcccaggttgaagcgattcttctgcctcagcctcccaagtagctggaagtacaggcacccaccaccacacctggctaatttttgtatttttagtagagacggggtttcaccatattggccaggctggtcttgaactcctgaccttgtgatccacccacctcagcctcccaaagtgctgggattacaggcatgagccaccgtgcccggcctgctctttttgttttaccaggttcctgggaaaatcattgcagttttgtcttgcgtgtgtgtggtttttttttggtttgtttttacacttcctttttttttttttctttttttgagatggaatctcactctgtcgcccaggctggagtgcagtggcataatcttggctcactgcagccttcacctcctgggttcaagcgattctcctgcctcagcctcctgagtagctaggattaacaggcatgcaccaccacacccggctcatttttgtatttttagtagagatggggttttgccatgttggccaggctggtctctaacccctgacctcaggtaatctgcccgcctcagcctcccaaagtgctaggattacaggtgtgagccaccacgcctggccttgtacttccttactttctgatacaagatgctcaggcctcatcgtgtatatttcctgctccagtcctagaatcgaaccacttctccaaggagccctgtttccttttcttggagaatgttattagaaaccaagctctgggcacttggtgtactcattgctactatggtgtcactacttttaggctttcagctgacacagcaagggaatatatgtggatagtaatctgtgtatagatttatccatctatctcttcattaagcataccatgaattcatactgatgtcttcaacttgaatccattaccacgtttcattctaacttcctcctgtttacctgtaaactcccactccaaaagtgtgaaacctggatttcaccgcccaccatccttttacttattcaattccaatatacatgtataatggtatcagaattgttaaccagctgccacgtgggaaccaactttatcaattagagtgcttatgtgcacttcctttggcctttgtcttatagattccactcatttccaaagctgcttggatcaacactttaccctcatgccctttagtaaggtggtttcctacatttgtaatgcaatgagatttttttgtcacaatctgcatgcccaggatggaatcatttacattttcatatcctgagattgatttttgtgtgtttgctgtaaagttctatgaatttcgacaaatacacaatgccatgtatccaccattatgatatagagaatagtttcgctgctcttaagaaaaaaaaaatcctgtgtctcaactactcatcccttccaacccttccatctctggcaaccactgatctgtttactgtctctattgccttttccagaatatcatgtaattggaatcataacagtatgtagcttttttaggtgggcttcttccacttagcaatatgcattgaagattcatctgtgtatttttggaggcatgagagcttgttcatttctgtttatcacaaaatcatattccattatttcattatatggaagtacctcagtttattcgtctactgaagggtatcttggctgcttctggtttttggcagttatcatgttttggctgtcaacatttgcatgcaggtttttgcgaaacaagtcttcaaattagttgggcacatatataggagtgctattgccagctcatacggtaagactatattttgctttgtgaggaactgtcagtcttccaaagtgatttttacattatattttacattgcattacaaatgtaggaaatcaccttactaaagggcatgagggtaaagtgttgatccaagcagctttggagatgagtggagtctataagacaaaggccaaaggaagtgcacataagcactctaattgataaagttggtttccgtggggcagctggttaacaattctgataccattatacaacggtaatgtggtatcggaaccaatgaattgaggtcctcttgcttctcatagttgccaacatttgatgtcagtgttttggatttttgtttgtttgttttgagacaaggtctcactgtcgcccagactggagtgcaatggcatgatcacccacctcaaactccctggctcaagcaatcctcccatctcagcctcccaagtagctaggactacaggcatgtgctctcgtgcctggctaatttttgtatttttttgtagagacaaggttttgccttgttgcccaggtcggtttcgaaatcctggtctcaagtaattcatgcctcccaaaatattgggattacaggagtgagccactatacctggcctcttgttttgcattttagttattctaatcggcatgtggtggtatctcattgttttgatttctagtttcctaatgacatttgatgttgaacgtctctttttttttttgagacggagtctcgctctgtcaccaggctagagtgtagtggtgcgattttggctcactgcaacctccgcctcttgggttcaagcgattctcctgcctcagactcctgagtagctgggactacaggcacgtgccaccatgcccagctaatttttgtacttttagtagagatggggtttcgccatgttggccaggatggtcttgatctcttgaccttgtgatccacctgcctcggcctcccaaagtgctgggattataggcgtgagccactgcgcccggccttgaacatctttttatgtgtttatttgccatctgtgtatcgtctttgaggcacctgttgaaatcttttgctctttttttttttgagttttgagttttaagagttctttgtatattttggatgcaggtcatctgtcacacatgttttgcaaatattttctcccaatccgtgccttgtatttttgttctcttatctgtgtctttcacaaggctgttttttatttatttttttgagaaagggtttcactctgtcagccaggctggggtgcagtggtgcgatctctgctcactgcagcctctgcctgttgagctcaagtgatcctcctgagtaggtgagactacaggtgggtaccaccacgcccagctaatttttgtattttttgtatagacacggtctcatcatgttgcccaggttgttttttttgaggcattcttgctttgtcacccaggctggagggcagtgacgtgatcttggttctcagctcactgcaacttctacctcctgtgttcaagcagttctcctgcctcagcctcctgagtagctgggattacaggcatgagccaccacgcccagctaatttttgtatttttagtagagacagggtttcatcatgttggccagtctggtcttgaactcctgacctcaggtgatttgcccacctcggcctcccagagtgttgggattgcaggcatgagccactgtacccggcctcccaggctgtatttttaataaaagtccaaatgtgtcagttttttctttcatgattgtgcttttttgcttctccttttttatgtgattaaaattacttgttttaagaagttgaagagtcttagtttgggccgtttcttattggattggcagcttgataaagcatgttgaatggtggttactttgatttttttctgtttcttggtggagatctccgggtagtgtggacattagttctctttttggcattgatgtaaatggcatttaaattcaagtaattttactttcagtatctgatgaaatcatgctactatggacaaatggctctttggtcttgtctctgcaacaatgacatgctgttttaaagacttaatcttaaatgtttgtgcttctcctaagtagaaatagatctctaatttgcttttttaaatattagctaaacaaatcagcttcttatttaattggcaattaatatttctttgagttcatcttttgggccaactttctcttacagatcaataagtaaatctatgctcattaatggtagtgactctacctcaggtactcacattttacccttggtttttttcctggtaatcttgcttatggtgggttgtagtttgttgtttcaggtcagttaatctttttcttcagtttctgatattgatatcctactttaaaagattcaccttataccaacactacaaaattacacattatactacttctctgttttctctccttacacccaaggcttcaatctagatggagttttggtgtaagcagatagctgtttgaaagaaaatgaaagatcatttctgtctagattccttagcagttagaatgaatacacatgtacctgttttccttttcagatgaattcaaataaaactaattgtagtgacatgtcagtgacctatccatatctgcaatctaacaacatgtgaggtgtggaggaagtggcagtgccagagggctatcatgaaactaatagcttcttgtctggaagtgatttgaggagtgaaatccattgccctctcaaactttaatgtgtgcaattaaagcatcagcaactcaaagttggtggtcagaagagcagctttctttgtatttgccttcagtttattgtggtctgaattttgatctccggttttgggctgaaagaatgaaaagtgtttattctgacagtgacatttggtttttactcatctgtttagtaaacctttttgatgtaaaataatgttcaatcctgtctagaaattgctgtagaaagcaaactcttctcaaactttaggcagagctaaatatattttttcaatattcaaacagttatctgtatgttaaaataaattctgggccaggcatggtagctcacgcttgtaatctcagcacttggagaggccaaggtgggaggatcacttgaggtcaggaattagcgaccagcgtaggcaacatggggagactgtctctacaaaaaaaaaaaaaaaaaaaagaaagattaaaaattagctgggcatggtggcacacacctgtagtcccagctactcggaaggaggctgaggtgggaggattgcttacggccaggagttcaaggctgcagtgaggtatgatcatgccatagcaatccaggctgggtgacagagtgagaccctgtctcttaaaaataaataagtaaatacatacatactggacttgtttgctaaatcttagcgatagggactgtaaaacttttctttttcttgcttttttttgagacggaattttactcttgttgcccaggctggagtgcaatggcatgatctcggctcactgcaacctctacctcctgggttcaaccaattctcctgcctcagcctcccgagtagctgcgattataggcatgcaccactacacttggctaatttttgtatttttagtaaagacagggtttcaccatgttggtcaggccggtctcgaactcctgacttcaggtgatccacctgtcttggcctcccaaagtgctgggattacaggtatgaaccactgcacctggccaggaaaacttttcttacaagatggtaattcggtcgggtgcagtggctcatgtctgtaatcctagcacgttgtgaggctgagatgggaggatcacttgaggccaggagtttgagaccagcctggtcaacatagtgagacccccatctctattaaaaaaaaaaaagatagtaacttaaggaaataaaattaacaaaaggactgatttcttatgtacttctatgctgacttagtgtaacccaaaatttaacatgctatttaatatgtcagtgcaactgctttttagtttctgtttattgttcaggataattttttctcctgatattcttgaagtaaatttttagctttaaacaaattcttctgtcacagaatgaccttggttttaaaaaagggaattgactatacttgcaaagttcattttttttttctaaaaaagaaaaaggcagtatttacacatctgaatccttaatttgtaccagttcttcagcactgtcttacttcctggctgcagggccatttgttgccgtatggtgttgtaactttaggttggtgcaaaagtaactgtgttttgcattgacatggcaccagcctaagagctagctctaactggctgaatgtcttttctgactttcaacatcacaccagctgtattagcagagatgactaagcattgggtaatttcacttcatgctaaccactataaattggttcagttgatgtgtgtgtgtgtgtgtgtgtgtgtgtgtgtgtgtagactcctatataatttctacaatccttgctttaaaacctgcaaaatgtattttttgttttgtcttttcctttttgagacagggtctccttctgtcacccaggctgaagtgtgatcatggctcactgcagctttgacctcctggtctcaagcaatcctcctgcctcagcctcccaagtagctgggactacaggcatgcaccatcacgctcagctaatttttaaatttttgtagagatggagtcttgctatgtttcccaggctggtcttgaacccctgggctcaagtgatcctcccacctcagtcccccaaagtgttgggattataggtgtgagccactgtgcctggccaaaacctgcaaaccatgttaaatctatgttgtgttcctttcggaagagatgtctaatattaacttgtgttatataaaatctaaaacataggctttcaatattgttttaacagtatataacagaattggcaaatgccctgtcttactgtcattcgaagagagttattcatagagacattaagccagagaacttacttcttggatcagctggagagcttaaaattgcagattttgggtggtcagtacatgctccatcttccaggtatgtaactttagaggtggaagttgtttggtttaccaaagccctgggagctaaccgtgagctaaatgtaaaatatttcagtgtagattttgtgctgtaagaggggtaggtggctaacccagaagtactttggagtaatttaggcttaataataaactagggtttgcaagaaagtgttattctgtggagatttggggctattagcagtgttctaggcctagggttgaagatgcttaatgtccttagaggctaatgaagggatgaatgagtcaacagataggacacgtatatgacagaggtgaagtgcccacatgttgagtgggaggaactcttcacctctgctgcttcctggatgaggagatggggagatggttcagaggacagcactgacaaagatctagagctcagagtgcaggccatatcagggaacttgaaacactaaattagtttggtggtgctttgagggcagtggtgagagattctcttcagtctgcctctgtcaatagtagggatagtcctttcttatcccctgtcacagctgaagcagagatgtcagtctcaaaacaattcaaatcttagctttccaagtgaactacaatatctttactgttttaaatttgagtttaaataagctttgaaacttcacatgaagtggggcattttaaaacatatatctaccgatgaagttttgtcaactttggaggaggactcaaattatagccaaatgacttaaaaatcaagctagttaaaaaaaaagtatagcctaaaatagaatatgagggagaaaacctttgcttttgttacagagcacttctaattgttccagcaatgcactgaatctgctattgcagtctttttttttttttttttttttaaactggttgtcattagtgggagctgttatctggtgagacaaaccagaataaagacttacaggcttcatggaatcgcagagttaaactgtatcttaaccggttgaattgtgatagaaaagatggcttcttgctttttgaaaagattacttacataaccgatagtcacttcactccaaatcccagatgttaatcatcatcatttcctggttattgcctcagtttgagaacccccgattcagtccgtcggtgctgatggaggggttagatgaccagagtggtagcttcttaatcctacgtcacaattcagtggtgagtgactgtttgtgtgctcagtgggtgccaggcctggctgaacacagcaccagggctgtgaccacgtaagcctccatggtgaagagcagctgataacaaagcaacacgaacccacacagactgttctggcttgctgtctgctgttcccagcttttttccaaccttcgttaaaaaaacctaaaccgataaaaatgcggaattggtagttgatggcatacctgtctatacagtgcctacgttcagcagtttttcccatttagtcagaagggctgcatctgcttttttagtgaacacttgaaaatacgttgcaaacatcatgatgcttcaaccttaagcactataatagaatgcatttcctaaataaggatattctcctatataactagaaccatgatcactcctaagaaaattaacagcattgtcagtatctaatatttagtccacattcagatttctcctattgtccatgacatcttatagctggtttgtaaaatcagaactcaaccaaagcccatgctttgtattggactgtctatgtggttggattgtctctgtggttggactgtctctgtggttggactgtctctgtggttggattgtctctgtggtctaaagccagaccagtctcccactttaaagaggacttttctgattgtgttgccacttaacttggacctttattccccgtatttgctgaaaactggaatgtaggtctcaggtcctgaagagattcaggttaagaaaatttttttttttttttgagacagagtctcgctctgtcacccaggctggagtgcagtggtgcgatcttggctcactacaagctcgcctcccgggttcacgccattcttctgcctcagcctcctgagtagctaggactacaggcgcacaccaccacacccggctaattttttgtatttttagtagatacggcgtttcaccatgttagccaggatggtctcgatctcctgacctcgtgatccgcctccctcggcctcccaaagtgctggcattacaggcatgagccactgcacccagccaggttaaatatttttggcaagagtacttcataggccaccctcaaaatttcagcatcactcgtaccaagtatctatcacaaggcagcatgtgtctacatctccaccccagtgctgttacagtgggacagtttctagtgtattgtcattgcgaccaggcttttaagattcttagcatatctgtaatatccacatgcagatgtagaatccaaatcgtatttacagagaactttgcatggcagcttttatatggtagtgatacattcagtttcttacattctagattattcagggaggttctggagttggacagatttggggttaagcctgatggctagctgtgtgaccttacacacctcgcttcatctgtttcctatgggaatttataatagtagctacttcctagggcacaggatctggcccaggggaagacctcagtgttagtggactctttaatgattgttagcagctgttgtgatcataaaacgagaagcacatcaacctgagcctccctccgttttcaggaggaccactctctgtggcaccctggactacctgccccctgaaatgattgaaggtcggatgcatgatgagaaggtggatctctggagccttggagttctttgctatgaatttttagttgggaagcctccttttgaggcaaacacataccaagagacctacaaaagaatatcacgggtaagacgcaactgaaaaggacccagcacatctgctggaattctttccttatcagcctgaactgcaggccaagatccgaacatctatactatttgatctctctaacctgtgttttgtgatattttatcatttgttgtactccaggttgaattcacattccctgactttgtaacagagggagccagggacctcatttcaagactgttgaagcataatcccagccagaggccaatgctcagagaagtacttgaacacccctggatcacagcaaattcatcaaaaccatcaaattgccaaaacaaagaatcagctagcaaacagtcttaggaatcgtgcagggggagaaatccttgagccagggctgccatataacctgacaggaacatgctactgaagtttattttaccattgactgctgccctcaatctagaacgctacacaagaaatatttgttttactcagcaggtgtgccttaacctccctattcagaaagctccacatcaataaacatgacactctgaagtgaaagtagccacgagaattgtgctacttatactggttcataatctggaggcaaggttcgactgcagccgccccgtcagcctgtgctaggcatggtgtcttcacaggaggcaaatccagagcctggctgtggggaaagtgaccactctgccctgaccccgatcagttaaggagctgtgcaataaccttcctagtacctgagtgagtgtgtaacttattgggttggcgaagcctggtaaagctgttggaatgagtatgtgattctttttaagtatgaaaataaagatatatgtacagacttgtattttttctctggtggcattcctttaggaatgctgtgtgtctgtccggcaccccggtaggcctgattgggtttctagtcctccttaaccacttatctcccatatgagagtgtgaaaaataggaacacgtgctctacctccatttagggatttgcttgggatacagaagaggccatgtgtctcagagctgttaagggcttatttttttaaaacattggagtcatagcatgtgtgtaaactttaaatatgcaaataaataagtatctatgtct

SEQ ID NO: 56 - DNA, 19331 bp, Homo sapiens
gagacgcgctgtgtgattgcctcggagagaggaaggcgctccagttccgggtcaggcccttctcccgcctccctcggccttagccatggcgagtagcagcggtgctggggcggcggcggcggccgcggcggcgaatctgaatgcggtgcgggagaccatggacggtgagtttccgttgcgctccctttaccttgcgtgccttcccagagccaaggcccccaggcgggaatgagcctggggaggacttcaggtccccttagtgccccaaacggcatcttccaagatctttggtagggacctgccagggccgcagggctgatggccctatcccttgagagttgtctccgccgctgcgtagtttgtcgcgcgcgctaggcgttgcggcccctagtcagccggttgcgcaccgcgtccctctcgcgcgaatgccgcgccccctctatcccgcatcccaggtccgccctacccgcccgatctcctgcggtgacagcgtcacgcccaccccacccagtacacccgttccctcctgcgtgccgcgtcccacccgattcccgcccggggcgcttcgggggtccccaaggttgggatcccggcggggacaggggccaggtgtttggtcaccgctatgcctcctgttcttcgcacttaagtaggcacctttaatatccggcgaatgaacaagttcccctttggtcataattatcctagtttcctcttgaagcgggtgacaccagtgcccaagtgctatggtgtcgcctgttttcggccccggaggcacgtgtgtgtgaagcctacacaagtgttgcagaacacgaaatttgtgtcttgcggttaccctctgtctaccctctaatgtcggttctgccactttatgcccctgtggtgagcttggactagatacttaaacatcattgagcctgtttagttttttttttttttttttctgtaaaataaaaccctacctccaggagttgtgaatatttaaataagacaaccatgtaaaaacatatcaaagatgatcaattatttttatattatttcagatggcctctctcttgtagtcttctttctttgtctcctttttactcacatccacctgtattatgagtgtttgatcgatgttgttatttgcagtgggcctagacgttttccagggtctactcacgtcagcttccgtctctgttaaaagataaccctatgaaattctcactgctgtatctctctctccttcaccgtaggctctttttttcttttttgagacacagtcttgctgtagttgcccagggtggagtgcaatggcgcaacctcggctcactgcaacctccgcctcccgggttcaggcgattctcctgcctcagcctctggagtagctgggattacaggtgcccgccagaacacccggctaattttttgtatttttagtagagacggagtttccccatgttggccaggttggtctcgaactcctgacttcaggtgatccacatgcctcggcctcccaaaatgctaggattacaggcgtgagccaccatgcccggcctcattttcttatgtagcacttgcagaggggctgctggctttttctgcactggtcctggttttcttttcaaagaattacacttttagagcctttgcatctaatttttcacttgttcagtatctaccttgctgtttttctgagaatgttactcttaatattcagcttatttttctatccttttcgatgtatcaacacttaatagttttattttgtaagtggatttatgtatgaatatatatatgtgtgtgtatataaatataaatttactgtcttgtatatttccttggaaaaaggtagagtataagacctcacttctagcctattttcttaggttagctgtacttaggttccttatgtatatggccacaggatcccatttgaacagaaaactcacattttctctggtggaatcactgatgtacaattgagaactgatggtttgtgttggctgcatcatcaagatctcttctgagaaaacttggtgtgaaatgaagattataaagagagtaagaacacaaaaaagtgaagtaaaacaaaaaatgaaggagaggggatgtggtgttacacagtatttaaatcaacccgtgagatcaaaaataaaattttcaaaactttttgaataccatttctcccctcaatggtagcatttgtgaacctccctttaagtcatgtgaattgcagaactcttggctacatttgcattttgatcatgaaatgaaaggattttgttaaagacatggaaggaagcaggctaactttctattaataaattatctgtgcacctcactctgaaaagaactatctctgccaatttagaataaggtctgcatgagatctctgctttcatccttatatccctaaaattctacacgcttaaaatagtcgtgccttttcaacaacacccccctcgcaacccactgtgtatggttgcctcttttgcttttcaactttttggtatgttaggtactctctattgattgctttttataccttaatttttattttcctctaaaatcgtcctgtgcatctgaattttaattttgataattattccttatgagaggctttatcatagcactattttttttttttttttgagaccgagtctggctggagtgcagtggcgcgaccttggctcactgcaacctccgcctcccaggttgaagctggggatgggaaccaattctcctgccttggcctctggagtaactaggattataggcgcccgccaccacgcccagctaatttttgtatttttagtagagacagggtttcaccatgttggccagtctggtctggaactcctgacctcaggtgatccacccgcctcagcctcccaaagtgctgggattataggcgtgagccactgtgcccggcctgtagcaccactttacatatatatatgtgtatatatatatatatatatatgtatatatatatatatatttagtagtaagtacgggtgcctgtaatcccagctacttgggaggctgaggcaggagaatcgcttgaacctgggaggcgaaggttgtcgtgagctgagattgcgccactgcactgcagactgggtgacagagctagactccatctcaaaaaaaaaaaaaaaaacacgttatagagaaaggagttaagagaatctatggtatatagattccatttgactagcactgcaaggcagtaccagcgaaacagtccatgctaccaccatcaatccagttgcacatttgagaaagaaatctagaagtcagtcttgctttctcacctcctctgcctcctgttcttcactaagccctttcaattcttgactcatttcaggttggctaaatatctcctgttcatcctacccaccagtcttttatcaaaattgtgatataactggactttttaaagattcatttgatactcagccaaaaagtccttaaaatgcaagtttgatttttttatgttcctattttatatcatccagtagctttccacagttctaagatcttcactaggacttacctcatattttatacccattcaccccgttaattacattgccttcacaatagcagttcaggtctgaatttaccaagttccctctagtgtagggaccatcacacaagctgttttctttgctctcaaccatcacccttcctcctgcctctgtattagtctggttgatttctactcacttttgatgtctaagtgtaattgtcacttcttcagacaagtctttgctaaacactgtgtccttccaaacttggtaagatgcccttgtaatttgtttcagaagtattccactctttatttattttacttatatctggaatcagttattactttaatatctatctctcctcctggactaatatctgtgaggagtgggaccatatataccttgttcataactgtatttgcagcagtagcataataggcacaaaatacatatagttagaggttgattatctctcatccaaaaaccttgggaccatgttttggatttcagatttttttttttgtaatattttcacatacataatgagatatcttggggatgggacccaagtccaaacacagaattcttgtatgttttatatataccttatacacatagcctgaaggtaattttggttttttccctcagggatgctgaatgaactgtgtattgtgcacctgcattttgactttgatccattatatgaggtgtggaattttccactacggtgttatgtcagtacttaataagttttggattttgcggcatttcacatttcagattttggaattaggagtgttcaacctgtactgatcatatggtaggcactaaagaaatagtttttgattacaggcgatttgtgaaaataggaagtaaaaataggtgtccatttgaaaagaaggcttaaagaagaaaccacaaatgagatggactaagaaaacagcattgagttatatgaagggaggataaaaggcagaggagaaaagcaagaacaaaggcatgaagtcaggaataagcatagcctttatacgtgggggggtctaccatgaagagaacaaactggaaactggagagagaagggagagaatcaactgaaaaactgttagaagcatcatagaattcatcaaggtgactggtgattaaaaagtttaatatgtagtgttccagtatactgatggtaaccacttagaatgtacaagggctaagtagaatccatttgtgaagacagtcaaaaataaagtgaagattcaatatggtagattgagcacttgctgaaactctaagcatataaaaaaataggaaatagtaagaaaatataattatcaggatagacctgttcaaaagcaagaagggaagtctccattgattaggaagagagaggtttccccccaaaagaaaggagcagatgggaaccacagcaggggattgtcgggaatagaatctgacaaagcatgctaccctgcctcactgaagttgggagtcagaaatgtgccatttgtcacagccagagattgagaagcaccatccatgtgttttttggatctggaccaaaaatactacaaggcctgatctagaggcctaaagctagggtacggcttcctatcttagaatgggccaccagtccaggacacctaaaataaatctatggaagatgagttttcagccaagaatgacaaagcacctaaggtagatgaaaaacatgagcaactaacatggaaaaggaaaaagagggaaagtggtagtaacagggaactcttttttattgagccctaccgtatgccaagcaccattccaaaggactgcaaggcagtgtcagcaaaacaaatggataccattctaagtgtatcctttaattctcacactaatcctttaaaacaggtactcttattatcctcactttcgagaatggtgaaataaggcacagagagagtaacttgcctactaaatactacagctagaatttgaacacaggtagtctggctctagagatcacactcctaaccactgtcttttgctgcttgcttatactccaagaaatagagataatagagcaatctcaaatacagtttaagaatatagccttaaatagacgaaggcaggaacaacagctgtgaaatttgtcactataaataagcatttagttataaaacaagtgtttatggtgagaaattagaaattagaaatcttgaaagctactgaaataaatttgaaataaattcagcagataatatgaataacaggctggatacagctgaagagcaaagtatcagtaaattggaatatcaaaactgaagaaatgaaaatgggaagagctgtcatcttccagccaagatggagtaacagagattagatttatgcttctacttgaaacaaccaagaaaactcaggtaaagcatacagaacaatggttttcaagacactggacatcaggcatcagagtacagtgatcccttagagacaggaaacaagcaaagtgatttcttgggttgccccagctcactgccttcagagagttccaggcctcagtatagcagggagaacccagtggacacactgaagtgagtaggaggagtttagaagacctgggagaccaaggcaggtagagtttgaataacagtacctgagaggggagaactgcacagaaagaatgctggagatctgtagaagtgtcccccttaagtattcagagcattgattagcagatgtgtgaggaaagtactcagaaagctgggagggaaccatctagaaggattagagtgaaccgtgcaccgtgcttacacagggctgaggatagtgcctgtaactaccagccagaatggaaatctttgtaattcataagacattggatacagtactcagaattcttacctcaatcataaggggaataattagccctatcctaaacagggctctggtcctgcctaacagatctaagaagtaatatccgaaaggatcaaaccatttccagataacggtatctcattataaagctcaagaattagaaatacaaaactatccggtacctaagtaaaattctaagtacatggcatccaatcaaagattaccagatatgcaaggcagaacagtatgacccatgatgtgaaaaattcagtcaattgtaacgaacacccccccgatcacacagatgttagaattagcagacaagggcatcagaactatactccatatctccaaaaagtttagtagaggcatgaaagacatttttttttttaagactcaaattgaactgctatttttgtttgtttgttttttcttttgagacagagttttgctcttgttgcccaggctggagtgcaatggcgcaatctcggctcaccgcaacctttacttcccgggttcaagcgattctcctgcctcagtcttccaagtagctgggattacaggcatgcgccaccttgcctggctaattttgtatttttagtagagacggggtttctccatgttggtcaggctggtctcgaactcccgacctcaggtgatctgtccaccttgctctcccaaagtgttgggattacaggcgtgagccactgcgcccggctcaaattgaacttctagggatgaaagtgaatatctgatatggaagaaatgggagggacctatctcatgaacatgataaatactataagaattttcagaaagacttagacttaaattaatgggtgactaaatattgataacttgtccattcttcccaaaataataatgtagtttttatacagttaatcagaatccagttggaatttgtttttagaattgatgaaaaatgttcagttcatccgaagaataaaatggcttatataaatgaaagatgacaacggaatgtttaccctactacatgcaatataaagttagaaattaaatggttgcccttacaaaagatagacatgtaacaaatttgtaagtatatgggaatttactatgaataaaggtggcatctcaactgggtggggaaaacttaggtcattcaataaattttactggggcaactggctcatttctgggaggaaaagttagatcctattttccacccaaactctagggagataaatacttatggggggttttgggaaataaacttcaaagtgctggaagagaatactggtggatataatcttttcatggggaataattttctaagcataatgccaaggggaaatgatataggaaacaatagataatatgttgacagttgacttaaaatattctaaatactctctgggaagcaatcttaaaacaaaattcagtggaaccggtgtacttacaacctgtaatggaagggattctgaaaatcactttggaaaccaagtttctctgtttgtgcttctcatgttaaagacaatgagttctatcaactacaataaaatgcagtactatacaaatgaagtttaaaaaatataaggtttcatttttattattagattcaacagacatgattacgctgtcaaattgttataaaagtttctaaacacttttaaagccttaaatatgtacattacctttttttgactattgtatgtcaattcagcaaattaaatatgtatattactgactgagcagttctacttctagaaatttatcctaatgaaataaaatttagtatgtacagattcttaccaatattattttaatgagagaaacatgagagcagcctaacttttaaagtaacagagtagttaagtatagtgtttccataaaatggaataatatgcgactagttaaactgcattttaaaagaatactaaaaaataagcaagtgttcagaattatcctaagtatggtggatacatgttagatattaaacaagtgctagaatatatagcaagatgtaaaaggcagttatgtgaagggaaggtgtaagtttatatttatatttaagtttctaaaactaagtaaaggcaagaaagtattacatgcagatttccaaaacctgggatgctatgctaattccttggtattgtgcagtgatatataaattaatgaaagtactatatgcatatttttaaatgctgtaagccttaagttttttttttttttgtatcttttttcagttctgcttgagatttcaagaattttgaatactggcttagatatggaaactctgtctatttgtgtacggctttgtgaacaaggaattaacccagaagctttatcatcggttattaaggagcttcgcaaggctactgaagcactgaaggttggagattcctattagttcattctaaataaagatgcttttatttagaaaaatgattaatgatgaagttatgggaaacatcctggttaaacaaggttaaactaacatgcaacaccactagaagaccaggagctcaatagtgtatgttcatatcataaaaattactactactaggccgggcgcagtggctcacacctgtaatcccagcactttgggaggctgagttgggcggatcatgaggtcaggagatcgaaaccatcctggctaacacagtaaagccccattctctactaaaaatacaaaaaaattagccaggcgtggtggtgggcacctgtagtcccagctacttgggaggctgaggcaggagaatggcgtgaacccaggaggcgcggagcttgcagtgagccaagttggcgacactgcactccagactgggtgacagagtgagactccgtctaaaaaaaaaaaaaagaaaaattactactaccatggaccatgttatgttttcccagaagtctgtttttagaattgtgctatttggtgagtaaaattgtgcctgctccagaagaggcatgttgaggtcctaacccctggtcccaatgaatatgaccttatttagaaataatgcctttgcagatataatcaaattaagatgaggtcatcctggattagggtagatcctaacccaataattggtggccttagaagagaaatttggacacaaatagccaaggaaagttaaggattttctgtggccataagaagctagaaagaggcaaggaaggatattcccctagagctgtcagagagcatgacccagctaacgccttggttaaatatgtatagtaggtatggatttctggccttcaaactgtaaatagatttttgttgttttaacccacctaatatgtggttactttattatggcagtcccagaaatctgatacagattttggtactgggaagtggggtgttgctgtaacaaatacttaaaagtgaggatgtggctttggaattgggtattggatagagactggaaagttttaaggtgcttgatagaaaaagactagatttccttgaagaggaactgttagtagaactgtgaatgttgaggcaattctggtgagggctcagaaagaagagaaaagaactgtagagaaagcttcagagttttttcgagactaacattaggatcagaatgttgctagaaatgtaaatgttaaaagcacttttagtgaagacccagatggaaatggggaacatttattggacactaaaagaaaggtggtctttgttagaaagtgacagaatgggccaggcacagtggcttaatgcctgtaatcccaacactatgggacaccaaggtgggtggatcacctgatgtcaggagttcaaaaccagcctgaccaacataatgaaactccatctctactaaaaatacaaaattagccaggcgtggtggcacatgcctgtaatcccagctacttgggtggctgaggcaggagaattgcttgaacccaggaggcagaggttgcagtgagccaagattgcgatattgcactccagcctgggcaacaggagcgaaactccatctaaaaaaaaaaaaaaaaaaaagaaagtgacagattgtggctgaattgtgttctattgttggaaggaaaatagaatatgtaagcaatgaacttggatatttcattgaggaaatttccaagcaaattgtggaaggtgtagcctgatttctttttgctgcttaataatgtgacacaaatgagcaatcgagtaaggacctgctaagagaaaaggaactagcatctgagaatttagaaaattctcagcctgtctgaataacatgttctggagacagggctaagagtgtggctacacttttgtgaagacattaggtatgtgatagagccagtcaaccatctcaacacaaacactgccagcttggacaggatgaagtgaaagaaggctatcagattagtgggattgtttagacaggaaactggctgatagagctgctcagctgagggcccatgtgttatccttcaagaaaaggaaaaagtgactccaagagcgcctcagagaccatgggactgctgctgccaccaggttcccagagggccaccttttttccaattcaaattaaccacgttttaattgctcagattggcaactaaaaacatgtcctattctgtcttccacagactttctgatttaaaagcttgtgattttatttccctttttatatagcactaactcactttgaatactgaaactttaagttagttcatcttaaaacttgtccaaaacatgggctcatagagacggtcaatggggggaaaaacaaacaaacaaataaaaccttctgatacctgatacaaagtgacttctcttttttcttacctttaagaaatcaactatttaaaacatgcaatttacatatctttcagattattttccaatgagttcttattctttaggtttgtttttgtgctttttaaaatctcttgattattaaatctaactaaaaagggtaaaccacatttgtagagctaaaatgtatcataaagagaatatccatgcaaccatcactgccagcaccagataatcccccttctgccctctccccagtcactaacccctctctcttgctctcctctccagtaactactatcctcacttttatggtagactctgtattagtccattcttgaattgatataaagaaatacctgccgggcatgatagcttaagccagtaatcccagtactttgggaggctgaggtgggcagagcacttgaagtcaggagttcaagaccagcctggccaacatagtgaaacccatctctactaaaaataaaaaaattagccaggcattatggcaggcactgtaatcccagctgctcgggaggctgaggcaagagaatcacttgaacccaagaggcggaggtggcagtgagccaagattcacaccactgtactctagcctgggcaacagaggaagacttcctcttaaaaaaaaacaaaaacaaaaaaaccggagaccagataatttgtaaagaaaagaggtttaattggctcatagttctgcaggctgtatagaaagcatagtggcatctgcttctggagaggccttaggaaggttacaatcattatggaaacaaagggggagaaggcatgtcacatggcaaaaacaggagcaagagagggagagagtgaggtgccacagttttatgtaaccataactcttaagaattcactcactttagcgagtacagcaccaagaggatggtgctaaaccattcatgagggatgaattcagtcaactcccaccaggccccacctccaacattggagattacaatggagattacaacattggaaattacatttcaaggtgaaatttgggtggggatgcacatccaaactatcattccctcgctggcccttcccagatctcatgtgttcttctcacattgcaacatacaatcatgccttcccaacagtccccaaaagtcttaactcattccagcaataactcaaaagtccaaagttctgagacaaggcaagtcccttccacctatgagcctgtaaaatctaaaacaagttatttacttccaagacacaatgggattatagacattgggtaaacattcccatcccaaaatgggtaaatcagccaaatgaaagaggctacaggccccatacaagttccaaacccagcagggtagtcattaaatcttaaagctccaaaaaaatctcctttgactctgtgtcccacatgcaggacacactggtgggaggggtatgctcccaaggccttgagcaactctgcccctgtggctttacagggttaagcccccatggctgctttcgtgggctggcattgttgagtgtctgcagcttttcaaggctcagggtacaagctgtcagtggatctaccattctggggttggagaacggtggccctcttctcacagctccattcggcagttccccagtgaggacattgtgtaggggctccaaccccatatttcccctctgcactactctagtagagattctccatgagggctccacccctgaagcaggcttctgcctagatacccaggcttttccatatatcctctgaaatctagatggaggctgccaagcctcagccattgtactctgtgcacccacaggcttgacaccacatgaaagtcaccaaggcttatgtcttggatcctctgaagccgtgtcccaagctatacctgggccactttgagtcatggctggagccagagtggctgggatgcaagaagcaatgtcccaaggctgtggagggctgcggggccctgagcctggcccataaaaccattctatcctagttctcagggcctgtaatgggaagggctgcctcttagatctctgaaatgttgtctaggccttttacccattatcttggctatcagcacttgccttctatttagattcagaaatttctctagcaagtggttgctttgcagcccccttgaattctcctgaaaatgggcttttcttttctaccacatggacaggttgcacattttctaaacttttatgctctgcctcccctttaagtataagttccagccttaggttatttctttgctcatgcatctgagcatatgctgttagaaggagccatgcaacatgttgaacacttggctgcttagaaatttcttccaccagataccctaaatcactctcaagtccaaacttccacagatccctaggacatgggcacaatgcagccaaattttttgctaaagcataacatgcatgacctttgctccaggtcctgatcctgggcctcggagactgtcatgggaagggccgtgtcttagatctctgaaatgctgtctaggccttttacccattatcttggctatcagcacttgtctcctatttagatagggaagtttcttttttacctcaaacctttggctttcatatggcagaaagaaaaataactgaataacaagaatagctaatatttatatgaatacttttctcatgccagaccgtatgttctacaggctttactggcattatttcctctatcattataacagtgataactactacagtttgagcattccaaatctgaaaatccaacatgctccaaaatctgaaatactttgagtaccaacatgacactcaaaggaaatcctcactggaacatttcagattttctaattagggatgctcagtcagcaagtacagtcagtcctctgtatttgtgggttctgcatccatggattcaaccagctgtggatcaaaaatatttggggaacagggggaaggatggttatgtctgtactaagaatgtacagactttttttcttctcatgattccctaaacaatacaggataacaactatttacatagcgtttacatcgtgttaggtatcacaacgaatccagagatgatgtaaagtatgtgggaggatacatgtaggttatatgcaaatactatacccttttatataaggcatttgagcatctgtggaccttcgtatctgtgaggtggggaagatggggagtcctggaactaacaattcaccatggataccaagggacaacttcaatgcaaattttccaaaattttaggacatctgaaatcagaaacagttctggtcccaagcatttccgacaagggatacttatcctatgctactattagtagtttactgctaaggaaactgaagcttatggtgactaatttacttaccttaagaactttacagttagtgattgacctgagatttgaacttgggctctctgacttcagagttgtttacttaactactaagttttctcctccagtaaaatctcaagaattcctgagccagcagtttaggaaaagatgaagtcgttattagaaacaagagtccttgggctttagcatgggcacattccctgacttaatattatctaataacttttaataaaaataaaaatgagtattatagtattttatcagtgtatttctgaaatttttgagggaaagatttatttagtacacatctgccacaactgcaagagtttttgttttactgtgcttgaatttgaaagggaattaacataataggaagatatttttgttttgtactacagtttgagtgcatataagagaaccagagtcaaataaacctagctgaggcaggtgactgacaagtgctttggcatagcattttcttaggcaaaatataagctacgatattaggataggcagttcagaaatgccaatttaacatagctttttcagcttttagcatactagttattctgcatccagtgggccatagtgagatgtgggaggtaaaatcagtaattaagatacactgaatcagaaagtgttgactatttgaatggaaaatctgtctctcacatacacaaagcctcttaaaatgcatttctcctatgatctagaaacagtatactagcatcacattaaaactagggtgtttcagctaggcgtgctggctcacgcctgtaataccagcactttgggaggccaaagcagaaggatcacttcaggccaggagtttaagactgccttgggcaacatagtgagaccccatctctacaaaatatttattttagttagctgggtatggtggtacacacctgtagttctggttattcaggaggatggcctgagctcaggcatttgaggctgcagtaagctgtgattgtgccactgcactccagcctgggcaacagagtgaaaacaacaacagcaacaactagggagtttctagcaaacaagtatttattacaacttgtttttttgaagtaattgacataatctctataatttttatgaaagtaatgcatccttatacttttaagatatttaattcagaaaatacaaaaaatttaaaaaaaaatcactcaagattaccaaagagattgcctgcaataatgtttggtgaacatcattccagatagtatcatgctattttaaaaataaaagtgttatacttgatttcagtgaattgaaaaagaataactcatcggtttgcttctccctggattaaagtcttgttctctcttattgccatttgggacagagttggggagctggtgggtttagagatacactgagccacacctgcctttccttgaccacccttttattggctttacaagcataaggttcttctccctgccttgtgtggttgctgctcatgaatttttttctcattttttttttttgttaatttctttcagttttaaaattaaggtaaagagaaattgttcctgctgtgttctatctttatctagaattcctggtatttagaatttaactgtatggtatttattgtctctttttttggaatatgtaggataacaaatcaagggtatcttgaaatgttgcaaaaaactgttggtctgagacattccttttttcttttgctctttggttgactatttagaaaacagtaactattttttgtgaatttttttgctttttactttcacagatttgtatattgatgtggtctaagtcatttatagtaaaagtagctagctatgtatctccctaattacataagttactcaacagccataaataggccactttatacatatctcccacagcataaataggattgttaattaagtgcatttgattagtgattctttattgacattgaatttttatattatctccttagttctaggatttatgtgtaagcagtcatctacatattgtaatttgagaagttctgagcaaaacctactttcctgtatcttctattttagtaccccagtgtcttaagttataccattatggtggagtcctgtggactaaggcttgccctttctcttacagatgtcctgtactgttactaatactttagtgtaaatctgcgatgtgtccctgtgtaggtaggtcttataaaaaggagttagaaaggtaaatgaattaaaatactaacacatatttctaaaattaaacttatttaaaattatatctttttatattgatgttaagaaattttttaggtaggataatagtatggtgatttgtttaagtctctagaaataatgtatcaaagtatttattgatgatatggtatcttggaatttcttcagaatcacctgggaaagagtagtagttagggatgtagatgagacaggattagataagatgttcattattcatcttttgctcttgttctctctgccttgtagcatgaaaggtctttttcatttttaatccctattactagaataaaacacagaaacagacaaactaatgaagtctgtggcaacaggtctgccataggttaatgtttcaagtagcagtatgttttttgtgctcttaactattattttaggtgatataactattttccactgttagcctgtggactgttaactgtacattcaaaaggtagtcctgatgtatagcaaaacatgaaaagcactgcattactgtgataaaagtggttctgttttatggggaatagttgtttgttaatgacagtgcagtattgacaaatttatcttcatgatgcctctttttccatggttttattgtaatgaatcttactttcttgttctaggctgctgaaaatatgacaagctgactttctggagaaattctgatgagatatgtcaagctctgcaagagggtttgaagattgcattgtagttgagaatgtacaatgaaattactgcatgcagcagtgtagaaaaattttactttttaaaagaattataaaaccatagctttataaatcagtggaaagtggcttacagagagaactatcagatgtgtttacatcacatcttattcactttttttaacagctctaatgctttggcattgctatgttcatatttatgtattccttatttatagctctgatagctttaattttctaagcagtctgtctatcagatgtgcacatctgctgtgccaggttgaagtatagtggaacccatcagtagtaatgtgtagtagttatgacttgttgacatttccattataaactttaattttgaattgtttatgcattataactgtggatttatattgtattgggctgaaagttgacaggatttcagccaccacttgtgaatttttatttagattcattatgtatatcagaatcttgttttttgaaataagagcatggaaaacatttcttgtaatctactcttgaacaaagaatatttagtttttcaaacagtttgttgggcagctaatagtgtgaaccaggtcatttttgtattgagtaaaaaaatcaaactttgagaaacttggattttaaaagtaatgacaatgcttaggttagtattatttgtaatttgaatcatttacatctaatgagaatgttagttgagaatgttttcttaaagttttatatcctataaataacggaataaaaaaatttgtaaaatgaaacaacaaacatgcaaaattcctatttacttttattacataaaagtaattttagtgcttacctaataaatcttgaatggttatttaataaattattagatgggtgatgtgtttcaaaagatacttgctattttttgaagaaataaggatttccagtcattaaacaaaactaaacaatcttattagatgggtgatgtgtttcaaaggatacttgctattttttgaagaaataaggatttccagtcattaaacaaaactaaacaatcaaatgttctatattaggaatctcaagtatggctttttttaaaaaacctttttaacatcttgatgtcaaggattataagtatggcttttcagaattgttttgtttgtcattattcttgcctttaaaattttaactcatcaaagtgaagattagaaataaattttagaaaatgtagaatagtattgattctgttcctgtaatagaatctcagtggagtttttttgcaaaactaatatggatttcatctgattttattatttcttaaattttagattttattgagtaccatttatatgattgtacaagcattcactctttactagcattttttgtttttcagacaagctgaagtggttttattaagatttggtaatatttaaatagcaaccttctctgcctttttttttttttaatatagaattttgaccattttgactttttaaatgcctggcatctttaccaaccaagtaaactggaagatctgttactggtagaacaggttgaggagacagtaggaatttgtaaaaagtcatttgatttataatcaacactacaaatactatgtgttatttataaaatcataaagaacacttttgtcagactccaaaatttgtatatacttccaggccataagagttgatagtattatttatgactttgtagattaagttatttatgtatgaaacaaagcaggaaaatatattgagaagggatcgtgtttacagaggacttctttaaagtgtcacatttttaaaatgtaaacatatttttaatgcatacttaagtaatatttaagaaactaaacaaaataatgatacaattgcagtgttgtgcttgttgtcaatgacaaaaataaaaccattttggtggtattggcctgta

SEQ ID NO: 57 - DNA, 21145 bp, Homo sapiens
acatgcgcagtagctgtaggagggggtgggcgctccattgggcgtttctcttggtttttcctttccgcgcggcttgggcggacgtctcgtgagacgtgggacttctcgcgggaactgcattcaaatatcccaggcgcttactcgagagctagctgagcgaatgggccggcgactgtggagttagcgtcctcaatgtggacgccctgagctcccattaggagccgctggctgcggcagcaggggactagcgtgagaggtaggggcaaggggcctggtgggaggtgggtgtggagagcggcagtggggagagtcgaacaggccctaaagaaagctaggggccggggtctcggccgaggcctttagctgaaacatctccttccccggaaccctggggtcttatacactgggttccgagccggtcttatcttccgctggaccacctcgccgccctcagggattctggacaaatatggaacgttgggtcggttgccgggtcctcaaaattataaccgccactggatctgcgctgtgcggtacggtagcctctagcccgaactaagaaatggtgcagatgggagatacatattgggtttcagagatagcgcataaggagtaatatctcattaataatttttataatgattacatgttgaaatgatgttttgagtgtatttgtttaaatatgtaaattaatttttcatctttgtttactttttaaatcatgatggctcctagaacatttaaaatcacgtacatgactcgcgttatatttctgctggacagcactgccccagccgtgtgtcagattctaccctaattgcttttcattcgttatctcatttaatcctttcagtaaccgattaggtgggtgttattgtgcttgtttttatagatgattaaaccagaaattaaataacttgtccaagttcatgcagccagtgagtagtggaggcggggtaagaactcaggcagtttgattcccagagtttcctgtgtcccaaatgctttgtgtgtgctatatttttgagaagcaggacaggaaaaatggttgcagcaccatggtttctaggtagattctagttcccatcacacttcgcgtcttaacttgcgggtaaccctaagcaagttacttaaaactttctatgcctcagcttgcatgtgtaaaatgagggaaataccttcaacctcttgaagttgttgagaagattgaataagaatgtgtataaagcggccgggtgcggtggctcacgcctgtaatcccagctactcgggaggctgaggcaggagaatggcgtgaacccgggaagcggagcttgcagtgagccgagattgcgccactgcagtccgcagtctggcctgggcgacagagcgagactccgtctcaaaaaaaaaaaaaagaatgtgtataaagcaccaagcacaatgtctgtcacacattagtagtttttaatcaaccacggctatctctctttgtagattgataggttaactctttctcatccattagacctctgctgaaaagttacttcctcaggaaaatttttttgtccatgttcccttctacgcgctgccccccagattaggacagctcccccttgttacaggctcaggtagcatacatctgtctctcttgcacttatcatacttgtaacttgatagttcaattacttgatttaatgtcttttactaatagactaggattcaagaagacaggaatattgttttaggttgccattgtgttgtcaacactagcacaatgtctcacacaataagaattccagcaaattttttgaataaactaaagcaaattttttttggcttctctggatatgcctggctggaatgtcttgaggttaaccctatttttattttggtagttgagatgacagtatttacttaactcaagctcatcaagataattagatgagataatatatttgaagcagttagcatggcaaatggtaaatcctcaacgaatgtaagttattgtgaacagtacaacatttagttggctggccgtatcatgtacaggctttgaaaaggtcttgcattttagagcagtgactgccaagctgggattacctagaacacctttttttctctcttaaaccctgtatctcttcccttgtcttcattctcagttaaagaccttgcttcctaattcattgataaattgaagcagttaaaaggttacttacacagacttccaccactgtacctgcttatcagcatctaaactcatatactttgcttaaatgaaatatccatgcttctattaaaaccagtctctacattaaacttcatcctgtttattcagggacatcactagcaattctccagtgtcttctagatcatcagtttttcttctctcctggatttatcccatgacctacaaacactgttatttttttccatcttaaaaataaaaaaacttgtccctacttcctctccaactgctgctccgtttatccgttatcctttgcagcaaacctgtgcttgctatctttatctcctaccattctctcttgaaggcattctagttaggctttcacccccacctggatatcaaaactgttcttgtcaccagagacctccaggaattcaagttcaatggccagttctctgctctcaccttaattgccttagcagcagcatctggcatgattgattactcccacctccttaatacactgtttattgccttccaggacaacacatactcctggttttccttctacctcactggtcactcctgattctccgctgtcttcttccctacctcataacagggttcagtcgttggtccatttctctttaaatacttttatcctctatagactgataattctcaaatttgcatatccagccaagattcctcttctcatatatccaattgcctacttgacatagttcatgttcaaaactcaaattcctgattttatttccaaaacattatttacatcagtgcttcagctgatggcaattccattttactaggtgctcaggccagaagacttggaggcattttttacttttccctttttcacacatcccaaattatatctttcagaaaatcatattgaccttaccttcaaaaccttcaaaatctggccatttctcacagcctcctatgctgccaccctagtctgagccatttcacatggtctctgcttccagccttgttccccttctaaactagtcaacatagcagccaaaatgattcttttaaattatatcagatcctctactccagactttggaatgacttcccatgtcacccaaagtaggagccaaagtccttataatggcctgatttgcccactctctactatctcttagccaaatttcactccctgggcttcttcctgccttaaggattcccctcttgctggaacattcttcttctaaatagctgcctggctgattctctcatcttctgcctcctggttacatcacctgtcccttcttcccagattcttattctgttctattttttctcatctcccctttctaatttattaatattctgttacttactgtttatcttcccctcctggaatgtaagtttcatgagggaggagcttttttttcgtccattttgttccctaatgaatctgaactgcccagaatggaacctagtatataaggcattcaagaaatactcgttcagtgaatgactacattgacttgagacatgggggaacatcttgcaatgacctggtgccctttgaaggcaaaggtgagtttgagtctcgcttaggaggctgggaccaaatagtaaaggataattagtaaggttgattaaagtggaatgtttctatatataatgtttaagtctttgtttataaatctagaatgaaagcaacatcctttaattcttatggatatggtttctatttttgcatacttttatgaataactagaaaaatactagtgaatctctttccaggaaagcagatttaatatattcaggaagttaacactgttgtgaaaaattacagacatgatatttcttactttaccttatgagccttattcacagctgcctttttatattttatgtgtttatagtacccagaccttccttttctggtggtattattgttattatcattattatttctcaagacagtgtcttgctctgtcagtgccatgatcataactcactgaagcctctaactccatcaattttccttccttagcctcccaagtagctaggactacgggggcttgccaccatccccaccttatttctattgattgattgattgagatggagtcttgctatgttgttcaggctggtctcgaattcctggcctcaagtaatcctccccagttgctgggattacaagcatgagccaccatacctgctactatgaggtttcttgattacttttttgttattcccttaattttgattatatggatagtggtccaattatgagaccaaacttaccttaacatattggaagcttagcatacaacaactgaacagttttctgatggtgaactgtttagaagcaaaattaaatgtattctattccactctttaatttttgatcccaaatcagtaacagaattgtcagaacagttcttgctcttggaacaagaatgcaaatttgactacttattagtcaggaagaaaattttaatgtttttatacgacagtagtattgagtagatatgtttcttctgttattgatattattgcatggagttttttgtataagcttaagtagttttatttcctctatttacagttggctaaaaaaaagaaaagaacatggaggcagatataatcacaaatcttcgatgcaggctcaaagaggctgaagaagagcgactaaaagctgcacagtatggtttacaactagtagagagtcaaaatgaattacagaatcaattggataaatgtcgtaatgaaatgatgaccatgactgaggtaggactctggactcctctgtctgcaagagtgtgcttagctattgaagatttgtcctgtttagcaattaatagtagtagtagtttattcttttctgaagattttagatctagttcccgccctgccccgtccctgttaaaaaagaatgaactaaatgaattcctgttattctttccaccctagtgtattcagagtttgaaagatcaagttatcattactctctttgccacatttactaccagattttgctttgtctgcacacttcctagaagacctcacttgttttagacctctaaacatctaagtgccccatgacactacaccaagcccttagttcccccatgaaatctaggtttgtgttcaactgcccactaatagacttctcaaacttaacacagacagaagagtggattccctgtccgttaaccaaatattcttttacgattttttttagcttatttagtaaatataatagcattcagtttcttgaacaccaaaaatctttatataccaaagatttttggtatatttttggtttctttatataccaaaaatctagaacttttagtcaatatcttccctttatttctcacatttcactcattaataagttctaagaactagactacaaagcatgtatctttgctactggcactgtagtccagatcaccatcatcactcctagacaagtattgtagccttctggccgggttgcctgcttccattgttgccattcatgccattcattcttcactcagcgtctaagtggtcgtggaataacacaccaaaggtcatgccacagccctgctaaaaaccatacaacagcttctgattttatttacaacaaaatctgagctccatccttgggtttgtagatccctatgtgacctgacccctgccaagcttctgacctcacctcaaactgctttgccttgttcttgactatactggtcctcccttatgggctttacaccagctattgccttttttttttttttgagttgtttacccctcactgctcttgggttgagtcctcagatttcagctttcatttaaatgtcacttcagcggagaggtcagcccttactatgtaatgtaaagttgccctgattcactttttttttcttttttcttttttttttttgaaacagggtctcactctgtcgcccaggctggagtgcagtggcgcaatcttggctcactgcatcctccacctcctgggttcaagagattctcctacctcagccttccgagtagctcggggttacagatgtgtgccaccacatccggctaatttttgtgtttttagtagagatggggtttcaccatgttgaccaggctggtcttgaactcctggcttcacgtaatctgcctgccgaagtgctgggattacaggcatgagccgttgtgcccggccctgattccactcttaattatctgcattgctaattatctctagattataaactccatgagagagggaattttgtatgccttgttcactatcctgaatgcctgccacacgattatttcttaaaagaatgaatgaataaatctgggtaatttagcaaatgctcagtaacatatttaaacttgaatctcaacattgtaaatatggcaggtaaaaaatatctgtagcaggtaaaaataactagtgatggcaacctttgtgtttctacatagtactgttgtaaaccaagaactgagtgcaaagtcataaaggcaaagtaaagattacaaatatcactaatagaaaataaaactgttatacttaatcattttgagtcataacttgtcaaatttcagtgtttaacagttaatactctttgtcttcctttaaaataaaatggtttttgaggggaatattttatcattttttaaagcctcttgaaggagttcgtacttgtaacatttttaatgtctaaacttccctgtgagtaagcaaaagcccttttaattactccttttgtctcagctctgcattcattctgatagaccttttgtgacatttctcagatgactacattctgaaagtaaaggctaattcagtatttcttttttttcaactattattactactacattgtgttcagagctacaagtagagcatctcattatcaaactaataattctcatgaggaaagcttaagtgctgttaaatctttttttgttgttagcagagattacttgacttgacgtgttgacataccatggagcacattttacttccttgacaaggcacagaagcagtaaggtatcccttgcatgggtttaacatagtttcgaaatacacctcaggggtttattaagactgattaactacaaagttattccaggtttaacatgtcttcgttatttggaaagcagcaaatgcttgaaataagaatgaaacaattgaagttgaaaactgattgtatgtaatggctttaggctatttttatgtaattgaattgtaattgaatctgttttcagagttatgaacaagaaaaatatacccttcaaagagaagttgaactcaagagtcgaatgttagaaagtttgagctgcgaatgtgaagctattaaacaacaacaaaaaatgcacctggagaaattggaagaacaactaagcagaagccatggacaggaagtgaatgaactaaaaactaaggttgggatatctgcgtatttcagcacaaaatattccatatttatgcagccatctgtaaactttagatgataaagattttcttaagtgtcagctttgcaaaatagccaagatctaagtcttcattatcttaatattgggggtgggaacactgagatacaagagtttgtctaagggacttgtataaattatatcctattaattaaatacaattatttaattttggttgctggatatttgtgaaggtttagtttagtgactagcatggcctccttgctgatagtgggtacagcagccccttgcagaaagcctcgtctcctagccttccctgcagtcagtggtatgctttgtaattctgtaaaacagaccagtagtttcttactagttaatgtgcattacaaatgacactttatagtttgtttactgaggataaactaatacatgtgctccagttcttacaataatattgtggaaaggtaccattatcatttccatataccagatgaaagagccagtgtttagacagactgagtaaattggacacaattcaagaactagaaattctccatctaggtttgaactgaggctgtctgactccaaaggctgtgttactgaatcactacatagtctaacagcatgttacactggctccatttcaaacataaacgcaagataaatgattggtcagtggttttcccttttcccagctagccagtgctttcaggttgcttctgaggaatccagaactttttatcatggatctgctttgtgtatagtctatactctgacttttccagacactgtctaccaaaacttgcctgacttttgtcctcctttctcagaagtctgttacccaattttcagcttcttgtatagcagcctctaagatttttctttttctgtataccacctatactattacttaatttctcattgactctcttttaatgtttactgattttaagaaacatcaatgaaagtatttttttttccttttttttttttttttttttgaggcagagtctcacactgtcgcccaggctggagtgcagtggcatgatctcggctcacctgcaacctctgcctcccgggttcaaacgattctcctgcctcaggctcctaagtggctgggattacaggtgtgcgccaccacgcccagctaatttttgtattttaatagagacagggtttcaccatgttggtcaggctggtctctaactcctgacctcgtgatccgcccacttcagcctcgcaaagtgctgggattacaggcctgagccactgcgcctggccaaaattacatatttaagcttgcttattttttcccagtatacactaaaacaaacatagctatctaaatataccttcatgtaatatataatcatcttgcataccactctgacagataatatcatccagcttgtctgaaactagtcggatttgaggccctaatgactgataatgatgtgctttcttccccctctggttgttatttttatttttgcaatagttttcatcacctaaacaaaaaagagtaataaagggagtattcaggactgaggtaaggctaattatagagatggcttttttttttttttttttttttggtggagcaaagagtacattagtgaaatattttgttttactgattttctcaaatcacttatgccaaaatttggatttttttaataccttttcttctcttatttttcacatttaattcatcaagttctaagaacttgacctacaaaacatctatgacgctactgccactccaatccagaccttcatcatctctttcctggactactgctgtagccttctgaccaggttgcttgcttccattgtttctcttcatgccagtcattcttcacacagtagccaagtggtccgcatcatagtgcctccagattgcttctgaggcatccagacccaccccgattactcatggattatttctatgtttattaaacaaggtgtgtcactagctgttaaaagatgcctaaccttgggcaaataggaaactccaatagtatcatcattcagtaagtttggttcaatcagttcaatcagtgattgtttttagaaagaaaataactttcaatttatgacttttttttttttggctttagatagaaaaactgaaagtggaattagatgaagccaggcttagtgaaaagcagctgaagcaccaagtagatcatcagaaggaactcctctcttgtaaatcagaggaactgcgcgtaatgtctgaacgtgtgcaggaaagcatgtcttcagagatgctggctcttcaaattgagctgacagaaatggagagtatgaaggtaatttttatggcatgtgtttctcagggttttctctttttttttctggcatatttttacatgttttggtaataattcttaagagctagtttgaaggctgaaacattttttgacctaacttgcatctaactaattaaaaaatgggttttttttaggtggatgacttcattcataatatagctttagactatatgattatgtaaggcagcctttctcttagattaatgaaacgtctggaagaatttagaggcatatactctgatcccagattttatcgtaagagcccagtgtaaaacgttggctcagtggaagttgaaatgcatgtgaacttggttttttcattgaaagctaaggttaattaaaaattaaagcctgaaattgatagaggaaaaagggcagtctctaaagccatttgtttccttgttgaaaaatttaacagtaatagtaatttctattattttagaatgtacctgacaacttttgactggttctttagttttaattttggatgtgaaccacaactgagataaactgagcagctgccaaatgaaagattattcaagagaatttcctccttttcaattcctgttaaatagaccaccctcaaagaagaagtgaatgaactacaatacagacaagaacagctagaacttcttattactaacctaatgcgccaggtagaccggcttaaagaggaaaaagaggagcgagagaaagaagcagtttcttactataatgccctagaggtactatgattacagtaacatcatgttttccaatttatcataacttattttcttgctaatgtaatctctgttgcctaaattgttttcttttgaatttagaaagctcgtgtagcaaatcaagatcttcaggtacagttggaccaggcactccagcaagccttggatcccaatagtaaaggcaactctttgtttgcagaggtacttataagtatcctaactactaaattggtattttcatttactaccagaacaattaagcatgttaatattttgtaggtggaagatcgaagggcagcaatggaacgtcagctcatcagtatgaaagtcaagtatcagtcactaaagaagcaaaatgtatttaacagagaacagatgcagagaatgaaggtatagaactttcactatcaaaggtttattaaacaaattttgtgtcagcattacatgtatgaatacatcaaagaaactagctttttctgcaaggagtgtacttatatagttgtttctagaactgcatgatttcaaaaaatcaattttgaaattaaaagattcatttatagtttaaaaatcttggaataaatatttagtaatagtatatttagcaatgattattgtttgttttaatggttactcactagctttgacttaaatctttctttgtggagtagaagaaagaaaagtatttatttcttattcttggcctgatgtctttccaagcatagccctagggttcctacttcagctgaaactcgctgcctcaccattcctctgctctttcaccaaggcttattatggagtgaaatttggattattcagggttccctttccttgtagctcctcaagtcaagcacatagacccttttaattttacgggttttgttggttgtcattctagccaaataagaggtagcagaaaaacatgtgggaattagaaagatttcagtattgtaacagtccttagaatcctgatccctcatccattgtgcctcactctactgaggtagtaattggaatctggaaaggcttccttccttttattcagaatcatgggctttgccaaagaaatgggaaaggttaatgattaaatttgggagttaggtggatttgggtttgaatcatagttttgtcacttgctagctctgtgaccttggacaagtattttaactttgaaagcaacagtacctcatctattaagtgaagatgatagaaccccctcttagaattgtcctacagttaaatgaaagtgtagtaaaatacttaacctgctacttggcaaatgagtgtttaatgaacaacagctgtgaattttatttctaagggtttccagactgtgctgcctcatttcctgagactctcccctgtctgggaagtatttctttataaattttctcacgtttactttagttttcttacagtatttgttggggttacttttaatctaccaatgttgcatatgtcccaaactatctttagagactagaagcattctgagtcttaggctaagtgggcctagcctccaatctgaaacaggaacaaaaaggatatcctttaaaatgttaaaagtcatctgcaacctcatatcattgattgttttactcaaaactatatttaaactaataggcactcttttcaactccagaaatttccaaaggcagaaagaaatgctagatttagagtctacttaatttccctctggtagcttcacaactccagatttggggtgggggaggtataatgaggtaagttgagtgctgctctaaaaaaattaaaacatggtatattgaagattaccccagtatactaagatagccttttatctttgcttttaacgtcatttgtgaatctaacatttgtggctgtcagtagcttagttttcctcacttaattaaagttaattaaaaattttgagaaacccatcagaaccttaataagagcgagtgcttatgataagcagtctgcagcgtttggccaggcttacttaccagttcagtggtgtgctttcagaccacagccatgcaagtcagttttatgtttcacaaaagtacaaataattacattacagacttcagttatcattcataagtagtcaaaataagtattcaaatgttatgtctacaaaaaaatttattattagattagaaatagctaatttagtttccaaaatgagttcaaagtaatatagtacaaattatgaattgtatcaaaaaagtagttatcagaatctttctctcacttaattttattagagggggtaattttatttttctagttacaaattgccacgttgctacagatgaaagggtctcaaactgaatttgagcagcaggaacggttgcttgccatgttggagcagaagaatggtgaaataaaacatcttttaggtgaaattagaaatctggagaaatttaaggtatgtataacagttaaaaaaacacacatccaaattttgatttgaatatcttaaaatttggtttgttttttaagtttaaattattaataaatatcttgtgggagatactttgagactaagtaaatggctgtttctccttatacttaaacatccattggtgattcttgcctgaaacataattctgtgatgattgctaaatgggtaattccatcacttcttctatatttattagttggaattttagtaaagggacagaaaagaaaaatctttttcctcacttactcattcatttatatcagtatagcctcatggattcttattttatcctatgagttataatccattgcttgctttatttactctgatactcaaattgtcccagatttgatagtcgaagtgctcttacttgaatatttccttactctatggcacaacaagggtttcctagctcacctggcccacttctgggattagcatttcttcaaggaacattggtttattttagttgagaatggtatttgtgtaagcatttgtgtgtgtgtgtgtgtgtgtgtgtgtgtgtgtgtaagaattcacccatgttttctaaataagtaggcagttgtcccagagtcatttgttaaaaaatcaatcttgatcccagtgatttgagttgacacctttatcatacatcaagtttccatatatacttgagtctgtttctaaattttctgtctacgccattggtctgcttctctgtgtgtctgtaccacactgttttattaattataaaggcttttaagtatgtttatctggtaggactatttcctcactatactttttatttttcagtattttcctgtctatttttgaatgttagctttcatttacaaacatcttgtctagcaccaaaaaaagcttgttggctttctattaaaattgcatgcaatttaagattttataaattgacttagggaacattgatatcttcattaacctcctaatgaactaaagttctaaatgacaaatttttgtaaatgttaataacctcttaggcattctaaattgtagccattagtatgtcataaaatcttaattaagtttacataactttatttctgtgtcttataaaaactgttgaaagaactacaaatttggttaagttggcagccttatgtttccatcagtgggctcagaactatactctgaaaattatggccttaaatcaggggaattttatttataacctgaaattgtttcaagtttttaagcagatttaccttttctatcccactagagaaatgtatagtttccatcagtctcagaagagcttgcactacattcttgcctggggtggggggaagaatctcagaagagggggacaccagatataaatgtaaggctctcatcttcctttcatatttttccagtttatggttttgttacaaaggccagaatttaatccagcaggcatttgtttttctattttcaaagccaggagagagaaggcagagcatgtaggtaaggctagaagcctaggccttgtagtcagatttgggttcaggttctctcttcttggtttactttcatctgtattcggagcctgtttccttatctgtaagagaggaatgttaattatttacctacttcagaaggcagataaattaaatgggtagttcttagcgtagtacgccaagggatataaattcaggaagtgatggtgctattattaataaacatacactaaccttatttgttatttattttaagtaatacaaacttttgcttttttaagaatttatatgacagtatggaatctaagccttcagtcgactctggtactctggaagataacacctattatacagatttacttcagatgaagctggataacttaaagtaagtgtctgggttggtggatggaaagatgaacatgtcacttgcttactatggtagtgtcagtgactacaaagtttttttgaaattgccaaaggaaattttccgaaaagaaaggtaacaaaaatatctttgtgcagatattcatgtgtgaatacatttgaaagactatttcctcctttgtccatttcctttcaagaatgcatgagtattttttaaatttaacactactattgttaaggattatttaaattgtttattgtttctttgttactaaaaaccccagaaaaatgtatttttaactaagaattcaaatatgcgatgaaatatttataccactacacttattatatgctgtcttaatactcgttggttctccttttttattatcatagcaaagaaattgaaagcactaaaggtgaattgtccatacagcgaatgaaagcattatttgagagccagcgggctctagatattgagcgaaaactttttgcaaatgaaagatgcctccagctttcagaaagtgaaaatatgaaactgagagctaaactagatgaattgaaactaaaatatgaacctgaaggtatatatgtctcatatatttttgtcttttaaattatgagtaacctgaaattatatcaaattattttcttactgtagttttatgcaactctattacaaactcatttgtagttatatacctatagttaataaagcaaatttattgtgtaaaataggtaggaaaattcagggagaactggatactgggtgtgcctgaatataacatgtatcctttttggatatctaatttcatcatactgtatagtagaaacttgagatttgagactttcccattttaagattacagtattttatgtcatacctaatagtttaattatgttgaagcagctgatgtttggaagctatacgaggtaggactgtttatagaaaatctaaagtaatggagactttaaaaaggtgggtctttatctctgcctctgatggaagtctggaggaggccttccaggactgggaaagcactccacggtatcaagattcaggcttcttgtgtttgttggtctgctgccatcctgtggagcagaatttagtcatgcagcctcacctgctgacaggaagggctgagaaatgcagtcttgattctcaggggccatgttcctaactaaatattgggaattcttttattaaggaagaacagtgagccaggcgtggtggctcgtgcctgtaatcccagctcttggggaggcagagggaggaggatagctgtgcccaggaatttgagatttgcttgggcaatatagcaagaccccattctccaccaaaatgggggggaaaggaaagaacaatgaaacatattagggaatatctagcaagtctaatgactgagctggaaagtagcctaaccatacagtctctgcatcttatatactacagagagtgaagtttactgtatgtaaattcaaaaacaaaaggccaagtgtgaaggagtctaagaatgtgatggttctacaacaccccttccctaaaagagtgttacatgttttaggttaaggattctcaacaagtttttgtccccgcactctgcacatgcctcagtctctcttcgtattgtctcagtgaactgctatgattctcaacaatagtggggaggttgccaaaaataggaaggtttttacacaattttaaaaggcttctcttgctcttaactctttttgtttcttccatgattctaataggctcccctgattaagaattatccattatgaatttcaaacatctgttgaactgaacacagcaaatagacaggaggcagggtagtgaatcctgataatgtgggtttcaaaggagcagtgccagaaaaaggggaaatcatggtctaaaagcaacaatgtagagcaaaaacagcaaccccttgtgctaccagtgttcctcagactccactaacattttgattttgaaaatgaaacacatcgataatgggcatagggaaaagatattagagcagttaattcagtggctgtgtttatgacctgtttagatagaatgatattaggccatgaggatagaaggcattgcagtagtctttgatgagacatgataggattggactagggaagtatccatcataaaagtagtctgattctgcttatattttgtaggtagagctaacaggcatatattaccaatattcagaaagtttggcctattcttgtcatttaatccttctaatacacaataccaagtgaagtgggtgcttttaatccccattttacagataaaatgaagctcagagaggttaaataattccccaaagacatggctgtcacatacgaggattaggattcgaacctggactctgccgctgtctcttcatctccacactgagatcttatgaaccacctttttcaaaacaccaagagagaacagtgaagcattcatgcctaaagtcaaaatattgaattcccaaggaaaaatatatagccaaataaactttaaaatatatagtttatatagattccatgataaagaataaaaggtagaaacaaaggatgcatttcagtgaggagatggttgcattttaaaagaatggaaaaaggtatacatataactagttctggcttcttgtgttgattgtgtctttgttttcttagattttttcttttccccactcgtttttattctcagagacagttgaagtgcctgtactgaaaaagaggcgtgaggtgctccctgtggatataaccaccgctaaagatgcatgtgtcaacaacagtgctctcgggggagaagtttatcgattaccgcctcagaaagaggagacacagtcctgccctaacagtttagaagataacaacttgcaattagaaaaatcagtttctatatacacaccagtagtcagtctctctcctcacaaaaatctgcccgtggatatgcagctgaagaaggaaaagaaatgtgtgaaactcataggagttcccgctgacgctgaggccttaagtgaaagaagtggaaacacccctaactctcccaggtcagtgtcctcttttcctccaggcagccagcagacctctccatctctcctctctcgctgcatgaactgtgctgtctgtttctttatctactttcttacaattgcatgcagtataattcctcagtttcatctacctaccttcaacttttccagaactttaagaaagactaaactgattgcaaagggaaaggactcttgaataaggcaatcacattaaaaagttacacgtttctgtttcatgaaagggaatatcacagtttaacacatctctgaatgttttatcagtttgaatacatgtactgttatttttctcctggttcaagcatggccatgaaagaaaaattaacttactttctcaaagggctttccagtagtctaagaaatttcagccttctaggaaacttaggtgaattttttatgtcttttgaattgcttatcctaggcattcaaaaatgggcttcaatacttattttgacatttttacatatcaaagctaactcattttcattgtttccaaaacttgaaagcctctagtttctgcataattgagtttgtgactaaaagaaatagcgtcagatatgtgtgtctgaaggaattaatgtcccaagggctttgtcttaataaaaataattgaggtcagaaggtaagagaaagtgaatggaagggaaaggtaagtagcagtggctgaggctcgagttctggatgtgcgcagcaggagaagtgaatgaggaaattgaagaaagtaaaagaaagatgaaggatgtctgcatgcaatgggattgttagaggcatttaaaacaaatatctagacattcaaaaagatgtgccaataactagcctagattatctcctatgaaatgagatgttgaaggtgctactagggctaccttagtcttagagagtggagacagattaataagacattttactaatgtgcatttgagtagagagagtaagacagccctgtttaaaagggcttatatgttttatctgatttctctccaagtcttcagtgctactaaatgtaatattcaacagtaaaagcactttaacaatgttagctgctattattataaggcatagtaattttattactccctccttggatttttatagaatgttataacctctgagtcacataaaataaaagcttaccattcttaaggaaaaagtaacttcaaatgagtatctgccacatacccatggtttcaaagagttctgaaatgaatccagcagattatgcctgtttatatgtgatgcattgtataaacatccttgaccagtgtatatttctggaggtggatttccagaattgataagtgccagccttgctatctgtattgtcttcattcctttttctgcctttttttgcttgataaaaaatcacttaagcaaatgtatgtggctaattgactcaagtagcacgttggaaactttttgtcttgttcgttaaacaaaaaataaaataccacaaaacatttgtgtgtgtgtgtgtgtgtgtgagtccatctgctaacttaaaatgtttccgactctttgttttctgcctgtttaacttagatacacaatcctaagataattttggaacaataaatatggcttttattgggaacttcactattgcatgctttacaaaactaattggtgttcttgttaccgagaatctttacaggcctttaagaatctctctactgtttatcttttctttattctactagttgaaactcaattttttaatatgaaacaaatagacatctattcatgcagcccaagattccatgttatttttgtcttgccttttgtatgtcatgttaacattaaaatattgctgtaacatttcagtttttgtgttaggtgtgcttatcatgataggtgccctgtcatattttctttaatttagggcttgccatgactttttaaagatattctttagacttaaaaaataattggcccagcgtggtgcctcacacctgtaatcccggcactttgggaggctgaggcaggtggatcacgaggtcaagagatcaagaccatcctgaccaacgtggtgaaaccctgtctctactaaaaatacgaaaattagctgcatgtgggggtgcgcacctatagtcccagctactccggtggctgaggcaggagaatcgcttgaacccgggaggcggaggttgcagtgagccgagatcatgccactgcgctccagcctggtgacagagtgagactctgtctcaaaaagtaataataacaataattgagcctattgatataaaaagacttttagacagccagtgacttaatattcttacagtattagagtcaactatattttttttccttgaataccatgccttattggaggcccattatactgggggtttgtttcttcaatccttcataaccacatttgaattcagagtggatgctttaatgcctgtaggttagctgctgaatcaaagcttcaaacagaagttaaagaaggaaaagaaacttcaagcaaattggaaaaagaaacttgtaagaaattacaccctattctatatgtgtcttctaaatctactccagagacccagtgccctcaacagtaaagacttgtctttaataagagtacggtgccacttgcctcaaaagttactatggtgcttaagattgtcttgatctgacatatatcaccttctgggttatttactcattgtgccaggacctggcattttcatgtgcctttgaccaagtgttcagaatttgcttgactctaacctggagagcttcttaagtgatgccccttcatggagcttctatgacagtgaataaactattaattgaaggaaaatgttataattaatgtatctatttgctgcattgtatatggattaaatgataaaaaacaagtaatctaccctcagagccatgtatttgagaatgcttcaatcatattttcctatgtacttttttttataaacttagttttagactatgttgtaaaaatgggaaggttgtaaactatgttgtaaaaataggaaatgtggcttaaaatatatacattatattgtttcaggattttgtcagtgtttaaagaaccaatgttcatctttgtatttatatacatgatttaaattttgtctaaaattttaaataaaactgcagtgatttatccttaaa

SEQ ID NO: 58 - DNA, 4509 bp, Homo sapiens
gagcgatcatgtcgcacaaacaaatttactattcggacaaatacgacgacgaggagtttgagtatcggttagtgctggcgcgggagcaatagcgagggtcgtgagctttggccgctgagggcacaaggaattagtaacaggaactgaggcgatagaattggcgcatgcgtacgaggtgcgaacgggcaatggtgtgatattgtggaaggcgtaaggcgcatgcgcggaggtgggaggcgctcgtaaaacaaagtggttgcgaatttggagtcgcctctcagtagagaggagagaggggtgggcgtggttagggtactgaccaccctcacccatgaggctttctggatcattctctgaactttatcgggcaaacttaacttgccttgtagagactgtttcacagtaatcttgtcgaatccagtgggagaacgtagcaaaagcggagctggaagtttcctggcgtccctaacaggagagtagcgctgagagagttgaatattgcttattaactcgtgaaaaagacaaggggcgtggttgtctggcttgtgtaaggaaggggatcgcttgggactgcaatggaataaaactggctaggagcattgagaaaatacttaatatgggtctaatagatgccctttaaatatcaaagggaacagttacggaatacttaacaggtttcaggtgttctgctaaagtgcaaggataacacatggtctctgctgttcacaaatttaaaaatctgtgggtggtaccgacagacaccagaaaggtgacacacgctatgcaaggagccattacagggtgtgatgggagcacacaagacttgctaaggagagggaactggcgacccgaaggctgcggcttcctagctgtgagcgggggttgaggtggggctagaaagtcagtcccctacttttgctaactccaggacgctcccccatcccacgcttcgagaacgccccccgccccgccaccgccttggaggctgacctcttactttcggtcggtcttcttccctgggcttggtttgggggcgggggagtgtcctaagggccaattcagcgtgatgtctctttcaccaccattgaaaacgaaaccagtagtaaactacgcgtgttttcatttatatgtcggagataaaaacacagggacagaaagaggggaacaacagacattggggcctgcttgagggaggagggtgggaggaggtagaggttcaggaaaaaaaaaaactgtcgggtactatgcttagtacctgggtgatgaaataacctgtacaccgaacccccgagtcaggattttacctatataacaaacctgcacatgtacccttgaacatgaaacttaaaatactgagaggaaaaacggaagagggaatgttggggaaagcttcctagagggcagagcctgagatgagactctaagaaaaaggtatgtgggaggaagcacctcttgactgaaattgtttagaagacactggatagccatctgccaaggatggtgatgatggaatcctggcactggatgtggcattcgggcttgataaattttaagtgcataatctagattgggaataagggaagacacaggattccacaaatgttggcattatgctaatctgtattaattgtaataattaagaccacttcctggtttgtatcttgtctcctcagttggagaacataaaatgaaaacttgcttttcttgtgtctcttcacccagcctagttcagggctttgggtcttccagagaactcgatgtgcattgacaaatacataatcatctttatgccaagacggctccagaccctcctttaattaactttcttttcctcagctgttttcctctacatctgaactaaactaacttaaaactgtatgtgcttataagagatttgtggagctgggaaggaatcaccatttcatcccctggaagatgaaactcttggcagtggcactttggtttaagaggggttttttggtgtatgtattgaagccaaatttcgtgccagggtggtgttagaatgtgagctattttcattatatttggactagaattttttcttttaggagaatggtggggaatcactgttactagcacagagggagaacttagtacattttcattgagcatgacgaagactatgtggattagtttgattcacatcagggtaataatttttttgctatgaagggagacttatccttggttagaaaagcacggaatttacccagaaagtctcaaggtacatccctccagagttaggaaaataagattcaggatagatttaattttttttttaagagacaaggtcttgctttgttgcccagactggagtgcagtggctattcacaggcacaaccattgtgcattgcagccctttcttttttcttattttttttctctttttttgagacggaatctcactctatcgcccagatctcagctcactgcaacctccgcctcctggattcaagggattctctcctgcctcaacctcccaaatagctgggattacaggtgcatgccaccacacccggctaatttttgtatttttagtagagacggggtttcacgttgttggtcaggctggtctccaactcctgacctcaagtgatccacccacctcagcctcccaaagtgctgggattacaggcatgagccaccgcccctggcctatttcttctgtattttaatcagatttcaaacttcatactgtatctttttcaaactcctgggttcaaatgaccctcctgcctcagcctcccaagtagctgggactgtaggtttgtgccaccatgcctggcttagattttaaaggacaagatagttcatttcatcctttgtaataacttgtccacacagtacttcataaaaggcctttcctcgccacaaaataacttctcttccttccttctaattattaacactgtgtgctccgtggggctcccattatgttgtagataatcaactagaagactataaggtccatgaaggcggagaaaatgtgccttgaacttaagtgctcattcactggaattattcactaatttgtatttttaatatactctcggaatttatataacatagcctgtatttctagctgctgctaccccacaataaaattatataaactctgacatcaaaaaccagtttttctttcctttcttggccttgtaaacaggcatttgtctaagagactgtatctggtactaacataaattccccacttccccgtttctgttacagacatgtcatgctgcccaaggacatagccaagctggtccctaaaacccatctgatgtctgaatctgaatggaggaatcttggcgttcagcagagtcagggatgggtccattatatgatccatgaaccaggtcagtgcactggctaaaaacaaccatatagaactgctacactgagagaatgaaagaataagattgtataacccaaatagggagataggaaatggtttactggttccttccccctccagtcgtgggggatttttttaaaaaaaaactagtgaccaaaaataagactaaaatatctgggaagttcagagacaacctgtcactgaaaaacctcctgtaatctttcattcaatcagagggtattctttttaaggccacatatagcctgatcatagcccctgcctcattctccatcgaaaacattcttggatgtgttctaaataagcaaaggaaagtatatttattgataagacaccagacacccagctgccaggcaaaactaataagggacaccctggggctgtataaacatagcaaaagaactgatattaacaattctgtacttggcagacagtccagacttctgggtctgcttctaaggccatatgcttaagtctttatttagttataaagatctgagtgggtgatagctggggaggtggtagtggaatacactataggttgtacatagaatggtgtgagcttgtctcttagatttccctcactctttcagaacctcacatcttgctgttccggcgcccactacccaagaaaccaaagaaatgaagctggcaagctacttttcagcctcaagctttacacagctgtccttacttcctaacatctttctgataacattattatgttgccttcttgtttctcactttgatatttaaaagatgttcaatacactgtttgaatgtgctggtaactgctttgcttcttgagtagagccaccaccaccatagcccagccagatgagtgctctgtggacccacagcctaagctgagtgtgaccccagaagccacgatgtgctctgtatccagaacacacttggcagatggaggaagcatctgagtttgagaccatggctgttacagggatcatgtaaacttgctgtttttgttttttcctgccgggtgttgtatgtgtggtgacttgcggatttatgtttcagtgtactggaaactttccattttattcaagaaatctgttcatgttaaaagccttgattaaagaggaagtttttataat

SEQ ID NO: 59 - DNA, 36785 bp, Homo sapiens
atcgtctgccgctttgggtaaggtggggtcagggtcgggggcgaggcttgcccggtgggcccggtgcggcgcggtgcccgccgttttcgggacggggaggggccgcgccccgccaggagccgggcctgggctcgagcaggggtcactgaggcccctcgcgccgtggtcggggatgccgggaggtctagggctgccccccaggcaaacagagcccccaacactctggcccagaagccgagaattccgttatctcgtctgatggcgttcgggctgactcccggcctggcggcactcgggccctggggtcccctgggatgcgatcatttcagagcggcccccgcgccgcctctcccagacctggccgcggccttcagctctctctgcctctgtgagccgagggctgaaggaagccggagccctgggccctgacacgtactcactttctggccccgttccaccctgcagtgacttctgacagctctctccatggaaggaggcggcggccgcgatgagccttcagcctgccgggcaggggacgtgaacatggatgaccctaagaaggaaggcaagtccttgctgctgcggcgctgttgttgttcaggatgttcagtagagatggagggtgatttaatgtttccctgagaaattctttctcaagtgctcgacttgtactctgcacctgtgaaacacatgacatctgccttcgttttctggttttctttcacctcctccccattttaagtttcatcacagccaggattctcatccgttttatttaccgcagtgctcccatgccctgaacagcacctaacactttgtgggctctcaaatatttattgtattgaattcgatgttttcttttttgtttgtcgctggtttctgtttgctaagacttatttaggatctttgagaccatgttaatgagtaagcctggccccaaacccctttcttcttgtgtctttgactggtttgggtatcaaggtgagggtacagcttcacagaatgagttacaggccacaccctctttttctctcaaagcgtttttatttatttatttatttatttattgacggagtctcgctctctcacccaggctggagtgcaaaggcgtgatctgtactcactgcaacctctctctcctgagttgaagggattctcctgcctcagcctccctagtaactgggattacaggcacccgctgccacacctggctcatttttgtatttttaacagagacggggttttgccatgttgcccaggctggtctcgaactcctgagctcaggcaatctgcctgcctcggcctcccaaagtgctaggattataggtgtgagccacctcacccagcctcacaaagcattttgacatcccttgggtagttttctcacactacccaaggatcctttctttttgagaccaagtctcactctgtctcccaggctggagtgcagtggcatgatcttggctcactgcaacctctgcctttcgggttcaagcgattctcctgcctcagcctcccgagtagctgggattacaggcacccgccaccacacctggctgatttttgtatttttagtagagatggggttttaccatgttggccaggctggtctcaaactcctgacctcaggtgatccacctgcctaggcctcccaaagtactgggattacaggtgtgaaccaccgcgcctggccccaagcatcctcaatgcctccattttgcaggaactgtcctggagactttacaaatcaatgttgcatcttcatatctagcaaggcgcttgcctctgcacccctctcctccttcctgtcatgtccttcctttcaaatatgtcctttccacgtgcatactgcaccccctgctccttcttgaggccttccccacttccgttgacctgacttcatttccttacttttcccctgtccactactggatcatgcgcatccacatacagataatgttcccttgtctcacttgtcgccacgtctcctccgttgcctctccattgctgtgtttctccttccaagccaaactttgagagctttctcacttgttatgccatttttttccgcctctcaatccctcccattccggcttctgtccttaccactccattcaagctgctttcatcagtcgttgacgacttccacattgctgaatctcttttcacttttctatcgccagtcagcttttcagtaacattcgtccttctggaaacttcccttgcttggagtccaagacgctcttggttttttcctcctgcctctctggctggtgtatcttttctctgtcgggggctccccctctgctgtcttctgaggctgatttccccaagacctgctctgggaccgctttgtgctttcgccctcagggcggtcagcattccaatagctgtgcagcgtatctgctctctgcggcacccacgttttgtcttgagcgcagcctctcctccgagctctgggcttgtatattcacctgcctatttggcgtcttcacatgcacgtctcatctcaaacttggcataccccctctgcatctgcataccctgttctttttgtctttctcatcacccattttatttctccatttcacccagctgtgcaagctgagaacctcctacattcatgccatcaccagctaacgtcttctccaccttcagaagatatcctgaatccatctacagactctccatctccatccacatgctgctgtctgggtctcagccacgctgtctcaccggcttctacttcccgttggctaatatgtgcatttgtaatgtcaggggatattatctgcttcctttcggatacactttctacacagtaacgtcaccttttaaaaacacaagttagattataaagctcttttcttttcttttttctttttcttttttttttttgagacagagtctcactgttggccaggctggagtgcagtggcgtgatctcggcttactgcaacctccgcctcttgggttcaagcaattctcctgcctcagcctcctgagtatctgggactacaggcgcccgccaccacgcccagctaatttttttttttttttttttttttttagtagagatggggtttcactgtgttagccaggatggtctcaatctcctgacctcgtgatctgcccgcctgggcctccggaagtgctgggattacaggcatgagccactgtgctcagccttttttttctttttgagatggagtctcgttctgtcaccaggctggagtgcagtggcgacatcttggctcactgcaacctccgtctcctgggttcaagtgattcccctgcctcagcctcctgagtagctgggattaaaggcatgagccaccgtgcccagctaagttttgtattttcagtagagacggggtttcaccatgttggtcaggacggtctcgaactcgacctcaagtgatccgcctgcctcagcctaccactgtgctgggattacaggcatgagctaccacgccaggcctaaaattcttttcttaaagcccggtaatagtttcctatcccactttggagaaaataaaagctccttgccatggcttgcaaaccctctgtgatctgacccaacttgtgttttcacctcttccagccactctgacttctgacccgttcctctcacacacgctttgatattttctcagaggtgttcccacctctacatgtctctcaccgcactgcctgaggcaccctccagggtgggctgcatgtaccccaagcctgcctggcacctagcgaaggatgtggtctgttgtgggtgctcatgtgtttgcaggatgagcaagtcagccagcccgggacccctcggagccagtcacagagcctggagcagaagactgcttccctgagttctggtcctggattctttttccacgccagaccattagaagtttctgaaattgacttcctaatttagaggtgtaaaaagtgaaatgtctgcctctctatatctctaagtcacctacttgcccttccaagggccatcgatgtcatcagtctcttgggtatccttccagacataatttgtgcaggtgcaagccaacacgcatagagtgttgcatccccctttccatatagcatggagagccctgtcctgaatcttgtttttcaggcttaatttatcttgatgaatattgtgtatcaacacatgaagagcattactagcttttgtacctatatagggttccaccttggggatatgtcattcatctcatctgctgtgggtgaacatttagtttgtgcctagagtcttgctgttaccaatgatgctgcagtaaataactgtggacaccgtgtaactgcacaacacattgctttccacacctgtgagtgtctgtaggatacacttgcagaagtagacttgctgggtcgaagagggtgtgtgtttcttacttcgataggtactgccaggccctctagagagctgtgataatttacaccttccccagcagtgtagaaattgtctctttccccacaaccttgcctatagttcatacatctttgagttttgccagtcatataggcgaaaactgcattctcagagcaagtttatttttaatactttttttttttttttttaagacagagtttcccttttgtcccctaggctggagtgcaatggtgcgatctcggctcactgcaaactccccctctcaggttccagcaattctcctgcctcagcctcccaagtagctgggattacaggcacctgccaccaggcctggctaattttttgtatttttagtaaagatgaggtttcaccatgttggccaggctggtctcgaactcctgacctcaggtgatccacccgcctcgaccttccaaagtgctgggattataggtgggagccacagcgcccagcctcattactcttatttttgagtgaggctgaacttcttgccatctatttaagaatgtttcggccaggtgcggtggcttgcgcctgtcatcccaacactttgggaggccagggtgggcggatcacctgagatcgggagttccagaccagcctgaccaacatgcagaaaccccgtctctactaaaaatacaaaattagccagacatgctggttcatactgatcccagctacttgggaggctagggcaggagaatcgcttgaacccaggaggcagaggttgcggtgagccaagatcgcgccattgcactccagcctgagcaacaagagtgaaactccgtctcaaaaaaagtaaataaagaaaaataaaaaagaatgttttgttttattttctgtgaactttatctgtttgtatcctttttctatctttattagattattaattttttattactttatagatatgcttcatgaattagccctttatgaactgagttgcaaatattcttttccccatttcttgtttaacttattgtgatttttgccacacagagatgttaaaattttaatgtttgaaggtcaatcttttattttttatttatttattttctgagacatgttcttgttctgttgcctgggcctgagtgtagtggcgagattgtggctcactgcagctttgacctcccaggctcatgcgatcctccttcctaagcctccctggtagctgagactaccacgcctagctaatttttgtattttttgtacagacaaggtctccctatgttgtctaggctggtctcaaactcctaggctcaagcgttcctcccacctcagcctcccaaagtgctgggattacagatgtgagccactgggcccagccgaccaatctttggtagcttccagtttagtgtcatagttagaagtccacactcccaagttacaaaagtttcctcatagctgattcttgtttgtttagggctttgttttttttccattaagtccttgatttgtttggaattaggcctgatgtggtgtgaggcatggaccaaacttagttggcatttttccagatgattatgtagtttattttaataccattttttcactttccctcttttttttttttttttttctttgagttggagtcttgctctgtcacccaggctggagtgcagtggcgtgatcttggctcactgcaagctccgcctcccaggttcatgccattcttctgcatcagcctcccaagtagctgggactacaggcacctgccaccacacccggctaattttttgtattttttagtagagatggggtttcaccgtgttagccaggatggtctcgatctcctgaccttgtgatccaccctcctcggcctcccaaagtgctgggattacagatgtgagccaccctgcccggtctactttccctctttatttgatatgttacttttatgatatgccaagtcttctttatatccattttgcatatttcttgttaggtttgtttatcgttattttgcatctttcgttgctgctagaaacgaagtattttcttccatgttatcttctcactgttctttgtagatatgaaagctgttgattgctctgtaatgattttgtccttagccatgttcttttatccttttactacttatagtagtttccagttgatcttcttgatttgtttctcgtgtctataatcatggcatctgtgcagtgtgatcatgttacctccacattccttcctttgcctgactgtgttgctttatgtgtccagaacagtgttaagaattgtgcttggagatgtcattgccacgtgcctggctttaatggaattgcttctgtggtttttcattaagtccgatactgggttatgggttaatttccaagtaaatggtagtcgtaggtgtgctattcatgagcatttctatgtgtttgtcttctgggcatgtaatagaattgtactccctgttcacttgaaattcagttggctctggtgactcacttggccagtgaaatgggaatgttgtcgtgtgtgtcatttctgggtggaaatcttcaagaaccagtgtggaattggttcttttccttcctgccatggagacgagcggtgttcctgatggtggaggctccatcagttggggtcctggagtgaggaggccagggagcagggccccagcctacccctctgcagacatatagtttgagtgagaaatatacctttgtggtttttggtttgttttgagacagtgtctcttgctctattgcccaggatggagtgcagtggcttgatcatagctcactgcagccgcaagctcctgggctcagcatcctgagtagctgggactacaggtatatggcaccataccccgctcatttttttttttctttttgtagagctggggtctcgctatgttgcgagggctggccttgaacccctgggcctcaagtgatcctccttggcctcccatagtgctgggattacaggcacaggccaccatacctggcctacctttgttgttttaagggttgttacttcagcatgttagcctatcctaactggtaagatcaatttgttcctgtctttagaaggaatacttctgacgttatcccactgaacctaatgctggctttgggttgagatggggatttccttatatatctattactttttattaagagcctctaaaatcaagaatgtatgttgtattttatcatatgcccgttcaacatatgtgcagacgatcatggttttctctttagctctagtaataaaatgattatatgagtagattgtatgaaatgaaaccatctcacagtcatgaaatgcagggagcttggttgtgttatgttattaccactttaatgtttgcaggattctttttgctggtattcttgttaaagagtttgatgttaggccaggtgtggtagctcatacctgtaatcccagcactttgggaggccaaggtaggaggaatgcttgttcccagcagtttgagaccagcctgggcaacatgaggagatcccatctctacaaaaaatacaaatattagccagggatggttgtgcgtgcctgtagtcccagctactcgggaagccgagacaggaggatccctcgagtccaggagttcgaggctgcagtgagctatgattgtaccactgtactccagcctgggtgacagagcgagaccctgtctcaaaaaaagaaaaaggattattatgctgatgtaagtaaggctggtctttactttctttattgatcactttctaggttttttggtaacatacttacttgcctcgtggaagtaagttggaaagttttttttcttttaatcctctggagtgatgtaaatagtattggaattatttgttctttaatgttttgatacaattatcctatgaatctagttgggacgcttttttgaagaggatagctctttaataaatttcaccagttattttatgattattgaagtattaagattttccctgtcttctggagtcagttttataaataagtacatttagacaatttaaataaaaaatagactggatgcggtggctcacgcctgtaatcccagcactttggaaggccgagatggagggatcacgaggtcaggagatcgagaccatcctggctaacattgtgaaaccccgtctctactagaaatacaaaaaattagctgggcgtggtagcacgtgcctgtaatcccagctactcgggaggctgaggcaggaaaatcgctggaacctgggaagcagaggttgtagtgagccaagatcacaccactgcactccagcctgagtgacagagtgagactccatctcaaaaaaataaaaagaatataccaagtgcagtggctcacgcctgtaatcccagcactttgggaggctgaggcaggtggaacacaaggtcaggaatttgagaccagcctggccaacatggtgaaaccgcatctctactaaaaatacgaaaattagcccggtgtggtggcgcgcgcctgtaatcccagctactcaggaggctgaggcagaagaatctcttgaacctgggaggcggaggttgcagtgagccaagatcaccccactgcactccagcctgggcaacagagtgagactccatctcaaaaaaaaaagaataaataaaattatattttcctagaaaattatctctttcagccaagttcttaggtttatgtgcatgaagttgacagatgtgcttatggatcttttcattccctctctgtgtggttatttctcttttctttcttttgtgcatttgttctgacttctccttgattaggtaattaagaataattgattaatcaggaccaaattaggatattagtatattttcaaattttatgatttttgagaagcatgctgtgttgttatttttatttatttatttatttttttgagacagagtctcactcagtcacccaggctggagtgcagtggcgcgatctctgctcactgcaagctccgcctcccaggttcacgccattctcctgcctcagcctcccgagtagctgggactacaggcacctgccaccacgcccggctaattttttgcattttttgtagagacagggtttcaccatgttagccaggatggtcttgatctcctgacctcgtgatccgcccgcctcggcctcccaaagtgctgggattacaggcgtgagccattgcgcccagcctgttttgttttgttttctgagacagagtcttgctgtgtcacccaggctggagtgcagtggcgcaatcttggttcattgcaacatctacctccgaggttcaagcaattctcctgcctcagcctccccagtagctgggattacaggtgcacaccaccacgctcggctaatttttttattctttatttttggtagagatgggattttgccacgttggccaggctgatctcgaactcctgaccacaaatcatctgcctgcctcagcctcccaaagtgctgggattacaggtgtgagccaccttgcccggccttcattgtttattaagataaaaacatttatgggagagctttataagctttacagtattgagcaaatactgtatttcagtgcattttgataaatatttgctaagtgtccaggcccttagctggacatttgggaatttgggttagtgttagacactgttatcttggaggagcttatagtctagttggggccatagaagggtcaagaggcactcacagaggctagtgcagtggtagaagtgaggtccaggcactgcgggagccttgcggggagctggaggagggagcaggtgcccctgcagagggacccactaacctggaacttgtgatctgttttagagggacctgggcagacagggccatgccagctgtgatagaattatggatggggtggggtacagagtaatttcatctgaggattcaggaaggactccaagaagcaatggcggtcaacgaattcttatagagtccctactccgtgcatttgagtaatattaaattcattgttgaactatgaatagatgttttgtagcttgtaagaggggaatttaattctaggggagctgaggaaggtggtcttttgaaaatgttctatacctggaaaatgacttatctcttcttgaaaagctagttgaatgagtcagtgaatgcattttagattatatcttaaaagtaaggacctaagcttttgggtggcttagtgaacatagaatggctgatgtaatttcttttttttttgagacagagtgtctttctgtcacccaggctggagtgcagtggtgccatcttggctcactgcaacttccacctcctgggttcaagcgattctcctgcctcagcctccgagtagctgggactacaggtgtgcgctaccatgcctagccaatttttgtatttttagtagagacggggtttcaccatgttgactaggctggtcttgatctcttgacctcatgatctgcccgcctagacctcccaaagtgttggagttacaggcataagccaccgcccccagccggctgatgcaattaaaaaaaaaaaaaactggccaggcatggtggctcacgcctgtaaccccaacactttgggaggccacgccaggaggatcacttgaggccaggagttcgagaccagcctggtcaacatagcgagacttcgtcactagaaaaaatttaaaaaattttttaaaaaggaaaaaatataacttagagccccctatgaaaaactaaattagcatcatgacaggatacactttggggagtgaaatttcacagtacctttatttaattccaagccatagagcctggtaatatttttctctttatcagctgtggcactaaaataacagtggattttttccctctagacattcttcttttggccgatgaaaaatttgacttcgatctttcattgtcttcttcgaggtaaacaaatgagttttcttcccttgccttgggcataaccacattcagtaaagtctttcctttaaatgccagtgttatgagttattaatcattctttttttaaacaaatagtgcaaatgaagatgatgaagtcttcttcggaccctttggacataaagaaagatgtattgctgccagcttggaattaaataatccggttcccgaacagcctccgttgcccacatctgagagtccctttgcctggagccctctggccggggagaagttcgtggaggtgtacaaagaagctcacttactggctttacacattgagagcagcagccggaaccaggcagcccaagctgccaagcctgaagaccctcggagccagggcgtggaaagattcatacaggagtcaaaattaaaaataaacctctttgagaaagaaaaggaaatgaagaaaagccccacgtctcttaaaagggagacatactacctgtcagacagccccttgctggggccccctgtgggtgagcctcggctcttggcctcctccccggccctgcccagctctggtgcccaggcccgcctcacccgggcgccggggcctccgcactctgctcatgctttgcccagggaatcatgcactgctcatgctgcaagtcaggcagcgactcagaggaagcccgggaccaaattgctgctgcctcgagcggcctctgttagaggaagaagcatccctggggctgcggagaaggtaaatgccacagcagagcgcctgcctggggagcccccactccttgcccctcagccctctcacagaagccacatgcggaaagcctcagaggtggcgagtctctgaggcctacaaaacacaggaatgcggagtccaggaaaagcagttgccaatagggagctgatgtgggggtggcttggataagttgggttgacctaatatttcctcctaaattctgtctgaagttgttccttttgttttgttacaatgctggatataccacacagtagggatttcatttgctttaataagcaacctcttccaaaaactcccctcctctgcaatggctgctagtcagcctccttgaccgtgcctcagtttacactgcattcctcctgggcactgagtgaggtgagctttcctgggaggtggcagttgacaggggtgcctttgggtgcagtctgcctactctgggacactgagggtcctggaggtctgggggaaagctgggtgtgagcacaggacttgctgccagggctgcccgatctggctcttgctcgggagaggccacagagaggaagacggggcgggtgggagccccggggcccaccctgcagcccgttcccagctctgccccctcccctgggcagcacgtacagaggaatgaccctgggtggggctgataggaggtgcaggcaaatgcagaatgctcagcaagggcccagaaattcctttacccccaccaagcccatctcctgagccacatgactccctgtggtgagagccaaggatggaaggcagccgaggtgcagccgccacgccacacactgcccttgacaaggaggtatgcccggcactgccacccccaacagctggggcctgcaaactcctttatttggagcccgtttgggatgtagattcctaccgtgatgtttctagaatgagagtgggatgggtcctgctgtgtggagcacacgtggactcgggacagggattgtgcatgtagcacgcgtggactcggggagagaggtggtgtgatttgggctgctccagacccatcgaagtatctcttttgatctcctggtcctgggtggtgagctggggtccagagagcttgttcccagtggacagggcactgtccgcacagctgagatgcactcatgcacacgtgggagccccaccatgtcctgcatgtttctctgggagaagtcacttctagagtggctcatggcacatgctcactcctgtgaggagtcattagcaatgggtggaccacttgagtgtaacacctacttacaagtgtgcttgacagagaactgctaggatgcctaaaggaagaagaaaaagaaaataacaggtgttattttgaggatgaggatgttgtggaggatgaggagaaggctgaggatgtggagaagctggaagctcacgcattgctggtgggactgtgaaatggggcagctgttgtggaaacagtttggcagctcctcaaaaaaataaatgtagagggtcccatgggacccagcaattccactccttagtacacagacctgagagaattgaaaccatatccacagaaaaatccacatgcagatgttcgaagcagcattattcataacagccaaaaaagtaggaccaacccaggcatccagcaaatgatgattgggtaacgaaaatgcagtctatccaaacaatggtttatttttggcaataaaaagaaacactactgggcgtggtagctcacacctgtgatcacagcactttgggaagccaaggtgggcgaatcacctgaggtcaggagtttgagcccagcccggccaacatggtgaaaccccgtctctacaaaaaaatacaaaaattagccaagtatggtggtgcacacctgtaatcccagctacttgggaggctgaggcaggagaatcgcctgaacccaggaggtggaggttgcagtgagccaagatggcaccactgaaaacattttgctcagtgagagaggccataacaaaaggtcccatgtcgtatggttccatttatatgaaatgactatgacaggccaatgacagaggcgtggttgagtgcttccctaggtggggctggggaggatgagggaaaggggagaaccgctaatgggtacaggttgtttttttttttgttttgttttgttttgtttctgagacagagttttgctcttgttgccgaggcaggagtgcaatggtgcaatctcggctcactgcatcctctgcctctcgggttcaagcagtcctcctgtctcagcctcccgagtagctgggattacaggcgcccgccaccacgcccggctaatttttgtatttttagtagagacagggtttcatcatattagtcaggctggtctcaaactcctggcctcaggtgatctgcccgcctcggcctcacaaagtgctgggattacaggcgtgagccactgcacccggccgagtacaggttcttttttgggacaccactatattttaagattagcttgtgctggttgtacaacataacagatctactaaaaaccactgaagtatactgtttaaaatagtgaattttatgttatgagaagtatctcagtttttagaaatgctataaagggaaaaagttactgctgcgtctttaccactctgagcttctattgctgttaccttattaactctcctgttataagggggctatttatgtaagtataaattagttccatgaatgcccttgtccctaaatatgtcaagaacttattttttgactctgctggccaaagaaaatggctttcagtactagaccaagaagatttattgcaattgagcagcttctctggtagagatgaccatttaatggatgagtcctttctgtacagcattttaaaatttgtgtaactagaccagctttctcattatcattcttaaataaggatcctgactggggaatggctttagagaacctctctcctattaatgatctgtgtaggtatcatttgatgctgtttttaatgaggaagcaaaatccatcatcacttatgtccatagtgatttggtggaggatgcgaactgcttgccctgttcccttcaatctggctgatgaatggaggggcatgtgtagcactggggaagatggggcctaggctcgctctgaatggaagcctgagtatctctgtacattgttaagcactagacagttctcacagttcaaattaaaattttcagcccaagaaagagattccagctagtccttccaggacaaaaatcccagctgagaaggaatcccaccgggatgttctccctgacaaacctgccccgggtgctgtcaatgtgccggccgccggaagccacttgggccagggcaagcgggcgatccctgttccaaacaaggtgagttggctgctggggcccaaacttgtggttgctgggaatgaggtggcagctgtgtgtacaagtgctttggattaaaatcccagcattttgggaggccaaggtgggaggatcacttgagcccaggagttcaagaccagcctgagcaacatgatgaaacccatctctacaaaaaatacaaaaattagctgggcatggtggtgagcaacggcagtcccagctactcaggaggctgaggtgggatgattgcttgagcccaggaggtcgaggctgcagtgagtcataatcacgccactgcactccaggttgggtgacagaatgagaccctgtctcaaaaaaaaaaaaaaaaaagaggtggaaaagttgaaaatacacccacaagaggcagcctgcaaaatacatgcaaagaatactggcttcgcagtgtgcactgatggctagcctctgccctgggagctgtgtgggttgggaaaagtcagcgtctcggagccccagtttgtaggtggggatattccgtttccctcatgtagagttcttgaacagatgacatgagatgttgatgttttgaaaacagcagctgggtgcagtggctcacacatgtaatctcagcactttgggaggctgaggcgggaggatcacttgagcccaggagtttgagaccagcctgggcaacatagtgaggcccccatctccattaaaaaataaaaatcagccaggcatggtggtgcatgcctgtggtcccagctatttgggaggttgaggtgggaggattgcttgagcccaggaggtcaaggctgcagtgagctgtgatcatgccactgcattccattccagcctgggcaacagagtgagaccctgtctaaaaaaaaaaaaaaaaaaaaggaaaagaaagaaaattgcggttcctcacaggcatggagactaccagccacatctttgccacttattttctggcattggcggtaaaccaagctgtgtgtactggcagttcttgttagaactgcccaaagctgggccctgcagctgctgactcatggggtctgggttggggccccaaatctgcatttctgctagctccctaatgtggtcctcatgcaggggtttgaagactacactttgagaagtgctgcttgacttttttcttctttaaattcaagatgataattattagattattttaaaatagtaaaaacaccaacttttgttgttgttgttgttgttgagacggagtctcactctgtcgcccaggctggagtgcaatggcacgagctcagctcactacaacctccacctcccgggttcaagcaattctcctacctcagcctcccgagtagctgggactacaggtgcctgccaccatgcccagctagtttttatatttttagtagagacaaggtttcaccatattggccaggctggtctcaaactcctgaccttgtgatcctccggcctcagcctcccaaagtgctgggattacaggcgtgagccaccgtgcccagccaaaaaccccttacttttgcagacacaagtaataggtaaataacgagatctttgctgattctgttttttcacattttgccccagttggggctgaagaagaccctgttaaaagcacccggctctaccagcaatctcgcaaggaagtcctcctcggggcctgtttggagcggggcatccagtgcgtgcacatccccagcagtgggcaaaggtgaggcagccggcatcatgcttggacccacatctggccaggtgaggcctggagtgctgctcaggccttggagactgtttctgcagaaccacttaggcttggcaggacgtcccggagggcgtgctgtgtgcggtggaccaggctgtggactgagttgctgtacctgccctcagtgcctctgtcccatgaggagggcacactcagatgggtggcttcagtctacggggtacacatggccagaaagcatgtatgataccccgtgcctgagaacatggacactggaatcaccctcatgtccatgtcatgagacaccagttttaaaataggactattccagataatgtagggcatatggccccataactcctgggtgcctgtttaaatccatgctcccacacctgtttgaggtcaagccacatttcaaccttgccaagccacagctgccatctagtggtaagggaaagccttcgcctttctgctcttcagagcgaaatcctcttcgaggtgcattggccatgtggcgtctcggggtcgttcagggcagcatggtgtggattgtgttcacaaaatgtaaaaagtgggccgggcgcaggggctcacgcctgtgatcccagcactttggcaggccaagatgggtggatcgcttgacccctggagtttgagaccagcctggccaacatggtgaaaccctgtctctactaaaaacacaaaaactagccgggcatggtggcgggtgcctgtagtcccagctactcgggagactgggccacgagaatggcttgaacgcgggaggcagaggttaccatgagccgagattgcatcactgcactccgtctcaaaaaaaaaaaaaaaaatgataagtgtgaactctctaatcagattgatctgatctggaattctgactctgccattctgtgattaagagaggtttgtgtccttatctttatagactgaggtgatgacctcctgagatcaagcaatcctcccacctcagcctcctgagtagctgggactacaggcacatgccaccacacccggctaatttttgtgggttttttttttttgagatggagtctcactctattgccaggttggagtgcagtggcgcaatcttggctcactacaacctctgcctcccgggttcgagtgattctcctgcctcagcctcccaagtagctgggactacaggcacctgccaccacgcccggctaatttttgtatttttagtagtgacggggtttcaccatgttggctaggatggtctcgatctcttgacctcgtgatccgcccgccttggcctcccaaagtgctaggattacaggcacgagccactgcgcctggcccacatttttgtgttttttgtagagaggatggtctcactatattagccaggctggtctcgaactcctggccttgagtgatctcttgccttggcctcccaaagtgtttggattacaggcgtgagccaccactcctgggctaaagtttttctttaagaatcctttaccagatcgtctgcgtatattggtagctcagtatgtattaccctagtttatctggtcttctattttaaatagtgcttatggttaatatgacgcagcctccttgtaattttaaaggaatcaaccagtaacaattgcgtcttttttccttgttccctgcccacctctgtgaccagacaggtgagacatgtgactagactatccccttccatctgctcaactaatgtagatttctcctgccaacataatcaacgaagataggagagcttgaatttatgcatgcttatgtacatgttagtaattattttgagaataagtaccttagaatacactcagctaagctaaaagctgcctgagccatcctgtgtttgatgatgttgcctgaagggcttatagaatattgttaatgtgtcttatgtttaaggtagatatgctaaagacagcataacttctgtgtgtttgttaaatagcttcatacttttataataatgtgatttttgtgtgtataccttctagctaaatcaagtgaatttgcaagtattcctgcaaatagctcccggcctctgtcaaacatcagcaagtcaggcagaatgggacccgccatgctgcggccagctctgcctgcaggccctgtgggggcatcctcctggcaggccaagcgggtcgatgtttctgagctggcagcggagcagctcacggcacccccctcagcatcccccacccaaccccagactccggaaggtggcggccagtggctgaactccagttgcgcttggtcagaatcttctcaattgaataagactagaagtatcagacggcgagattcctgtctaaattccaagacaaaggttatgcctactcctacaaatcaatttaaaattcctaagttttctattggtgagtaatagatacattttaatgtgtctttaaaaaatactgaagaaattgcatttaaagttttaaacaattattgatggcattgatggtgtttttagttctttcctccaacagtgctttcaggtgtgacccgctgtcttctcgcccacgttgttttggggggtcactggaggctccctgaatgtcttacgttcgttcctgtgtgtgtgacaccccaatgctcgtaggctgcttgtaaggttttctctttagtgttactgtcgggaatttgattattatgtgctttgaggtggctttctttgcctttatcccgctgagggtttcttaagcttctttgatctgtgggttggtttttttcagcaaatttggaaaacgttggccattatttcttcagctatcttttcctctttccactttatttcctaggactctaatcacatctatttcaggcctcttgacgttgtctcacaggacaccgaagctctgttcttttttttatttcagccttttttctttttcttatcttttttcttttctttctttctttttttttgttttttgttttttgagacggagtctcgctctgtcacccagggtggaatgcagtggcgcgatctcagcgcactgtaacctccacctaccgagttcaagcaattctcctgcctcagcctcccgagtagctgggattacaggtgcccaccaccacacccggctaattttttttttgtatttttggtagagacggggtttcgccatgttggccaggctggtctggaactcctgacctcaagtgacccacccatctcggcctctcaaactgctgggattataggtgtgagccaccgtgcccggcccagcctttttccttgagctacagtttgggtagtttctgttgtcagatatcatttcttctgcagtgcctaacagctgtgaagcccatccagttaactttgtttctaacataatagtttccccttatttcttctcatggtacttgggttttcttttacatcctcgtgagcaaattgataatggttttagggtctacgattcttctcataccatcttccccatcattttggggtctgtttcgactgactaattttgtttccgggttttggcctcattttcctgcctctacatttttcacaagtttttcttggttgttggatattgtcaggtgtacacttttgaatgtctggattttgttgtctttctctgaggagttgggttgggcttggcaggcagttaaggtgcagatcatccttccgaggctttttatgctttgaagtggtgggtctagcatagcctttccgcctcccgccaccggcgtccttcccaaggcctctgctgcacacccgtgtgtcccgcaaggcccgcgagacccctgcactcctgctgctgcaagatgacaccttctcggccctgtgagctccgctcgttgctccctggtaagacggcggtttctcggccctgtgagctccgctcgttgctccctggtagttgctcttctcttgaccttgaggactcctgccctgcacctgtgcactgcctggtgctcagccagagactcgagattcccttgggttcctagagctcgttctgtcggagtagccccctcctctctagtttctggccctcagattgcagccacctcagcctcctgagctccagccactgccttctccagtcagtgaggccactggccccagcaggtgtctggccattagtgggtgggtgtttgtaaagttttcatgaatttcttgaacaattgtgtgcaatgcagaaagttctcagagctgacttaaggtgagaggagcgtcctggcctcctctgtcaggcagatctgccctctgggtgcttgaggattttaagttctggcagtgccggccagcacaggcagcctgcaactcccagaaactgcattctgagtcctgctgtaggaacaagctgttctgctgagtgtcttctctgtgctggaatgctttgggggacaagggacatcatgataagacagacctactctcacagaatttctgtttaataggaaaagatacgaaatgttatcagatgagcaggcctgcagatcctagcacaacaaagggactaagggaagatggtgtcctggagctggcatgtttggggaggaatttgcatcgggtggttctttggcaaagatggtcaggaggtgacacgggactgagatctgaaccaggagactgaggcagccggtaggaaagtgcaagggggagcactccaggcagaggcaacggcaggagtgcagaggtcctggggcaggaaggcgtgggacgtgctctgggagcagcatgggggccggagggtgggagtgcagccgctgcggtcgggattctgcgtagacgtgcgacagctggtcagtactccttggtgtcagggacccaggcttactccatcctgtgctgccgtgatgagcttctcatcctcatggtctagtgtggctgcaccggctctggccctcatacctcccggcaggaagccttcttctaggtgaagaagagcaaatccccacctttcaaggaccctcactgcaagttgtccctgtgactccgtttgtgtcccattgagtacgacgcttccctgcacaggatgctaggacacgttgtctttattccgcacacagctgaaatttcttactgagaagaggaaagttgctgttgaacaaaaactagcaacctcagccagtcagtgaccgaggggcagggtaagaagagatgaagatggaggggcagcccgaggccggctcccagagcgccgcgtgaccagagcggaccctggagtaccgtcagtgcaggaggacgtgcataggagagatcagagcagagcgacttgaccttcagaaggtccctccacagagggaagagcagagtctctgggccgaagagtggtggggagggtaatgcggacctggccctcactgtgttggggaggaagctagtgctggggaaggaggctggagcgctgcggtctgcctgacgttctggtagcttagggctcatgtggcagtgcagagagggactcgagtgtccctgaggttctggcggaacctgggtgctgccactcatgtgacaggagggctggaagaggcagcgggcagagtccacggccccattttggaagtagtgagggtgagaggccacttaggctgcagctgaggggtggagcaggctgagagctcagaggagaagccacagctggagacctcagtgtaggtttcaacagcagagagctgagtttgtagagatgggagctgtgagctgggcacggtggctaactcctgtaatcctagcactttgggaggccgaggtgagcagatcacctgaggtcaggagttcgagagcagcctggtcaacatggtgaaaccctgtctctactaaaaatagaaaaattagccaggcatggtggcgcatgcctgtaatcccagctacttgggaagctgaggcaggagaatcacttgagccaggaggcagaggttgtagtgagccgagatggtgtcactgcactccagcctgggcgacagaacgagactgtctcaaaaaaaaaaaaaagaaagaaagaaagaaaagaaatgcgagctgtgattgggtgggttctgcagggacaccctacggcccaggtcatgtggaggtgtgttcagtagtgtttgcttcccttctgcctgaatgcctggagccaggacatgcgtctgccatgtctctcctgaccacgttggcacaagtgttggctggtctcctggctgtcgggctgcttgatgccacaggacttctgctaatcccaaatccctgttggctttgccctgtttcccagagcgtgtccctgcggtctccttacgcacctctcagatgtgcatttcaccttcggcaggcggttcctcctctctccacaatgctgggaacaggactgtctcttgcacgcctttggtcattcatcagggtcaaaactggtcccacaaactcagcactggccggaagagaggccccaggggagcagccacgctgttgggaacacacagctctgggaggcacgtggtggtgtgcactttttggctgagagcactggtggtgttgctcattggctgtgacaccagctgtcaccgtggaggagaggtgagggctgagggcactcacagcgtgggaccacatgaacggtgccctgtagtggaggctttcatatgtgcactttctcaaaatactcgaggcaagcagcattctttgtaaaacagtccagttacaaatgttgctatttactatgagtccatgctgccgggtcacccagaggattgagacttggaattctggctgtgggctttgcctccccggtactgggagctgcagtggagacgcgccgtccaggtttagggaagagctgatgtgggcctgggaggcgtgcgtgctcaggcagccctagggcagtcgtgagggtgtcaggagatggcttgttcgtgttctgtttcataagaatgaccttcccgtgccaccatggaagctgctgaagagtgcgctccacccagctgagggagaggacaaccgagaggaaggggtctcgggagagagggagccaacacgggaggcggcaagggagagggaggcggcgagggagagagaggtgggcttgcctccacacccgccaggagtgaccaacttgggtctcacagagacctctgtgaatggtgcggggtcagtgacccaagaatgttcccaaaagacagggattatgggatgacttagtcacagaccaccccactccatacaagaaaacaaacaccagcctgggcgacacagtgagaccccgattctacaaaaacatttagctgggcatggtgctgggcacctgtagtcccagctacttgggagactgaggcaggaagattacttgaacccaggagttcaaggctgcagtgagcagtgatcaagccactgcactccagcctgggtgacagagcaagaccttgtttcttgtaagaaagaaaagaaacaaacaaactgaaaacggaggtggagagagggtgggagcatgtttgactcagctgtgtgcgagctgcgcgcctctccagtgctggggtgaacatggaggcctggtgaacgcacaggtgggggcggtggggaggtgtgaggggcagattcttaactcttgtaacaaacggagtttctgaagaatgcggaggtagcaatgtgggtgcgtgatttagaaatgagtgaagggagacatcgcaagaagcttccagcacgctggaagcagagctgggtgtggtgggagacttgtttgtctcataaaattttaaccttcatttttaaaaactgtgcatgagtcactttgatagaggtgatttttaaaagaataggagaggctggggcagtggctcacgcctgtaatcccagcactttgggaggccgaggcgggcaatcacttgaggtcaggagttcaagaccagcctggccaacatggcaaaaccctgtctctactaacaatacaaaaattatccgggcgtggtggcgggcacctataattccagctactcaggaggctgaggcaaaagaatcacttgaacccaggaggcggaggttgcggtaagccgagatcatgccactgcactccagcctgggcgacagagagagactctgtctcaaaaaaaaaaaaaaaaaaaaaaaaagagcaggagagaggaaatgtaagtgcaggcagcctttctgaggagatctggtttaaagcggggcagggacgtgggacaggagcttgggtgcaggcgcaggagggcgggcataggcttgttaagatggagggcccagcagcagctgtgctgttgccagagagaggggctgtctgtgggggcagcagcctggaccctcgcctggcctcctggaagcacctgtggagaagaggcctcagctccaggccccacccttccctcttggtgctggggtaaggggctctgagggacagcctcttttcccatggcttcccagacatagcaaggtgttccaagggggtcctggtgcctgaggctttggaggccccagagcacatgtgctgatactcaagtgcacactgggattttcaaggagccagtatagaggaggaggaaccatggagccagtgtctgggggcgtggtggcgggactggacctctggggcctgtgttgggccttagctcggtaactggtgacccctttgccctctgagcctgcttttcatcctgttgtgaatatcagatgagatcatacacatggaaatgcttgtcaactaaaacagcacaaacacagtgtaatgaattattattatcccagtaaagtcatggttcgggaaaatgagggaatgtgggctctgttgcgcgtgcctgggaagctaaacccctgcggtgttgttcctgtgggcaagtgtctagcgcatgcaggtgccgtctgacaagtcgacttcgctctgtgaaggtcgtgctcggccctgatgggatatacagccagggtggggcggcgcagtgaagatggctcttctctttctcccccgtgtccatccatcagaccacagcctttgcctgggcaggggtccccgtgtaggggtgaatgcctctcatgtggctgcctgcagcagggtggccctttgtgtacttgtctgagccagtgccacctacactcaagttgggacagtggagatactcggagaattgcccattcggtgacgatcccccaacagtaggtctccccctgatcactttacctgaccgcacacttcctttcttggacttaggtgactccccggacagctcaacaccaaagctttcgcgggcacagcggccgcagtcgtgcacgtcagttggcaggtgagtgacgttggtccgcttcctctctttattgctgtagaatgactcacgcatctgcttacctcaaccatttggtaaccctgcagcctggcctgcgcatctggcttccacgccagtctcttgggtgcaggccgagctcctgatgtgtaccagccccttttagatctactgcagacttaagacatctgagacttccgcgatgcagtacggcagctcccagccctggactggtgtggttgccatgccaggctgcacagcagaagtccctccagcgctcttaggactgcccgtgcccagcccaccccaggggttctgatttggttcatctaggctgaggcccagcagctggatttcctaaagctcctgggtgactgtgacttgtaccgcagttgaagagcactggcgtggcaccttgattctgacttggctttttttttctttttgagatggagtcttgctctgtcgcccaggctggagtgcagtggcacgatctcggctcactgcaaactccacctcccgggttcacgccattctcctgcctcagcctccctagtagctgggactacaggcacccgccaccacacccggctaattatttttgtattttttttagtagagatggggtttcaccgtgttagccaggatggtctcgatctcctggcctcgtgatccgcccgcctctgcctcccaaagtgctgggattataggcgtgagccaccgtgtccggcctgacttggctttgaatcccagctccaccacttcctggtctttgatccagtttaagttcccgaatgttgctgacctttttcctcacgtcaagtagggatggcccaagctcagctggggccacttgcaagtcttttggtgactctgggctttagtttcctcctgtgtgagcttgagacacgcttcgcgaggtcgaactagccagtccctcacgtgctgcgcatggtgccatgctaagctgccgtccctcccatgcatggtggtgaagagcaaagaccagagccaggcagccactggccacctcacttgcctctctgtgcctcagtttcctcacctcacccagggttactttgagaattacatttattggaatttttcttttcttttctttttttttgagacagagtctcactctgtcacccaggctggagggcagtggcacgatctcagctcatggtaagctccgcctcctggattcacgccattctcctgcctcagcctcccaagtagctgggactacaggcgcccgccaccacgcccggctaagtttttgtatttttagtagagacggggtttcaccgtgttagccaggatggtctcgatctcctggcctcgtgatccaccagccttggcctcgcaaagtgctgggattacaggtgtgagccaccgcgcctggccggaatttttattttcactggaatttgtggtggggctgccagaacttagcaataaagggaggagggtggggaatcctagaacttcgcggagagcagcagctggggttgacagcagttgctctctggagtgattctgtttctctcttgatttcagcctcgttgcttttcttccatttaaataggctagagtcagtctgttttcaggctccttttgaagaacgtaacaattgcccagaatagagcaatagacaggtctccctggcctcccgaggggccatggtggtgggatgtccttgactcattttattttaaaataatgtctttgtcctttttgggctactataacaaacgttctatcgactatgtagcttgaacaacaaacatttgtttctcacaattctggaggctagaaatccaagatcaaggcacctgcagatttggtgtctggtgagggcctgtttcccgattcacagctgccgccttctctgtcctcactgggttaggggtgaacaagtttcttttatgctgatttatttatttatttattttgagatggagactcgctctgtcacctaggctggagtgcagtggcgcgatcttggctcactgcaacctccgcttcctacgttcaagcaattctcctgcctcagcctcacgagcggctgggaccacaggcacatgccaccacacccggctcattttttgtatttttagtagagatggggtttcaccgtgttagccaggatggtcttgatctcctgacctcgtgatccacccgcctcggcctcccaaagtgctgggattacaggcgtgagccacccgcccggcctatgtttgtttatttttttgagacagggtcttgctctgttgcccaggctggagtgcagtagtgcaatcatggctcactgtaacctctacctcctgggttcaagtgatcctcacactccagcctcctgagtagctgggaccacaggtatgcaccaatgtgccctcttttataagggcacagatcccattcctgaggctttggctccatgacctgatctcctcctaaaggccccaccttctaatgccatcaccttgggggctaggatttcagcacatgaatctggggacacagacattcagtccacagcaaatgccagttgactcagcctcttcttcatcaacagcaacacaagaaagcaacagttaggcaagacccatgggtagcccgaaccacaggtattgccagggacgtgaggggtgtgaggaccaagtgcccagcttcctcttcactcatttgtgttcacatctgattcaggcgaccttaagcctgggtatgagtgggcgtgcagggagacctgctcccccattcgctggcccaccagacaggctgcggctctgacttccttatggcaatatctatgacaccaactgaaagatgatttgctcagtctcttctgaacctcgtgtgaagtgacatttaatggtagcatccgtaaagtgtaatcacatttgatcaattttcttttgagttgcctgtgaggaagggcagtgaagccattcccactgggagcccgaagcccacgccaggatgggttggtagcagctcggagccttgcccgccttggggcctgtcccaggagagcggagctcacacgggctccctggcttggctcttctgggctgaaaccaaagccctcagcactgcattagcacaggctgaatgatgagatcttactttttctatgtcatctcagctcacgacactgatgttgtgtttgccagggtcactgtccacagcaccccggttagacgctcatctgggccagcaccacaaagcctgctgagcgcatggcgtgtgtcagccttgcccacacccgccagccggcgctgctctggccttccaccgatgacccccaaaacgatgcccagggccgtgggctctcccctgtgtgtgccagctcggagacgttcctctgagccccgcaagaactctgcaatgaggtaagacacgaaggtggtaataaattggtctcaaattcctaggcttgctgtcccagacagtgacatacctttttcttgccttgctccaggttttagtgaagtaaatagtatttggaaagtttgtttgttttttttttcattgcaaagagaaaatgcaatagacatgagcatagaggaaaattaaaggtattacaaggaaatactgcgtgtaattctctgataatcaatttgaaaacctaatggttttctaaaatttgcaagttattggccaggtgtggtggctcacgcctgtaatcccagcactttgggaggccgaggcaggcagactgcctgagctcaggagtttgagatcaacctgggtaacatggcaaaaccccatctctacaaaaaatacaaaaataagctaggtgtggtggcgtgcactgtagtcccagctatttagggggctgaggtgggaggatcacttgagctcaggaggttgaggctgcagtgagctgagattgccccgttgcactccagcctgggggacagagtgagaccccgtctgtaaaaattaaaataaataaaataaataaaataaaatttatctaaattgacccagaacacatgaagtaagccatagctggagctcagaaatgattaaagattgaaaaaggcacctgattccaatgaagtcacacctcagtcgtgtataacctttgaaacagatcatgctagtgtgtaaagttaactatcttagccgggcgcggtggctcacgcctgtaatcccagcactttgggagcccgaggtgggcagatcacgaggtcaggagttcgagaccaacctggccaacatggtgagaccctgtctgtactaaaaatacaaaaattagctgggcatcatggtggcatgcgcctgtaatcccagctactcaggcggctgaggcaggagaatcacttgattctgggaggcagaggttggggtgagccaagatcgcaccactgcactccagcctgtgcaacagagaccctgtctcaaaaaaacgaaaaacaaaacaaaaaaacatatataatatccgtgtatttatacacaaattacacatttttatatatcttatatgtttctgtgtatgtacatctaccaacagtaggtgttgacactgtgtgtatctatgtagttctatgataatgcagaagactctggaagaaaatatgctggcatgtgtgtgcattacagagggagagggaaaggcatggaatgccaaagagaaaatgagaaacaaggcctcactgaaaacaccagatctgatatataaataggaatatgtgtttaactatcttgtatgtttgtaagtgtaaatgtagaaacaaaattctgcttgtttttggaattttcttatgaaacctctgaagtattaaaaagaaggtactgtgtgttagttgatggacctgcggctttgctgggtttccggaaggaattcagttttgcgtggcaggtactcgaggacctgtgggcagcaggcaagcccagcagcgcccgtgcagggtcctgtgggagacgccattggaaagctggtgtgggcagcctgtacctggggcctcagccctgatcagggcactgggcagcaggggagggggcatctggggcagaaggagccagctgcatacccacctaggcctaggagaagccccccactagctgcatgcgaggaggagctggccgtggctcaaggaggggtccctgtgtgtggtctgggctcccttcaggaggtgacgggcgtgcgcattaccttgtgtttagtaactagaaaggaaggggctaacatcagcccctggtgatgctggacagctaagatttgtgagctgagaggaactggagagatcactgagccccttccatacacaggaaactgggggtctggagggtgaaggccctagagccgggacgcactccacccaggacactgttcctccagagtgacttgcttcccacatcagccaagtgaacgagcattttagagacattttctcataagtttttttccttcccacagaactgaaccaacaagggagagcaacagaaagacagattccaggctggtggatgtgtcccctgacaggggttctcctccttcccgtgtgcctcaggcacttaacttttctccagaggaaagcgattctactttctccaaaagtactgccacagaagtagctcgggaggaagccaagccgggtggagatgcagcccctagtgaggtgggcagaacgggcgcagctgggttctgttagctgagattcctggaggctgctcgggaagcccgtggaacccagggctgtggctggcggagttccctgccatgcttcatcctggggccagtgcctccgtgccaagcaacccaaagggaggcagtcaggacttccaggcctccaggggagaaagccctgcatttgactaaggcaagggtcagggatcaaagctgaggaagcgggaagcagggtggcaggagctggtggctgctggtgagcgggtatggacagggaggtgggcaacagtcagagaggcacggcccaccccatacagagcctccttccaccaaggccccgcctgattccttggctttccaaaccgccagcccacctggaacatgagcaaagctcacattctcccaagatggttgccagaaagatgctggactctgctcttaaccttggttttgtacccaggctcttcttgtagatatcaaactggaaccactcgcggtcactccagatgctgcaagccagcccctcattgaccttcctctcatcgacttctgcgataccccagaagcacacgtggctgtaggatctgaaagcaggcctctgatcgacctcatgacaaacactccagacatgaataaaaatgtggccaaaccttcaccggtggtgggacaggtgagaagtggcaggtggttcatgttgactcagccctgggtgtcctcagttctgggattgttcatcctcccagggccatcgtgggacccttgagagtggctgttgagtcttctcagctacacacctcagggcaggatgcacctttggcagcctgagcttctcaaagatcagctgcctctgaggtgccctgccaggaccctgccagctcttgttggacagggaccgcctctctcctgcccatagaccccagggccagatgtgggacagaggaatgtgcatggtgggggcctgggcttctccgtgtgtgtcctgtctccttccagcttcttagacgtggtggcccagagtgcttttcagtgcacccgagccaggatgagcgagtggctgtgatgacccacgcagccagtcctctgtgcagggaggggaagggaggccctagccggatccacgctcacctcctccactctgctctcttccagctcatagacctgagctcccctctgatccagctgagccctgaggctgacaaggagaacgtggattccccactcctcaagttctaagccgaaccaaatcctttgccttgaaagaacagccctaaagtggttttcaaccctcagaaacaagctttaggctggtcgcagtggcttacacttgtaaccctagaacttgggaggctgaggtgggcggattacttgagcccaggagttcgggaccagcctgggaaatatagtgaaactcctgtccctacaaaaaatacaaaaattagccgggtgtggtagtgcatgcctgtagtcccagctacttgggaggctgaagtgggaggatggcctgagctcaaggagatgcaggctgcagtgggctgtgattgtgccactgcactccagcctgggcaccaatgtgagaacctgtcttggaaaaaaaaaaaaagaaacatgttttagtagaagttttatttgaaaaagaaaaataagcataaatatattcccagtgctggagagggtgggctgagggactggggccagcacggaccacccaaggcctctgcttcccgccgccaccctcctcgctgccattctctgggctggaatgtgaagcctcagtcactctaaatgaagaattttcttttgaatgttttgtatgtaaaatagcaagtggctatttttaaagttaagtttgtataaatagttagatattctagatttacattaaattgtaaaataaatggacttattgaagcatatcttgatttttaagcttatcttgattttcaaacatgcatagctatttttatcactctaatcagtaaggctactatctagactcgaatgctttcatacaagtgattttcaaaaattagtcaataaaaattgatgtcagtgcaggcccaggcccgcccccagatacactagtttctaggtctggggccagcctagtaattgttactaggcacacaggtgatgctgactcgatggcctgagacacaccccttgagaagaagctgctctggggagacgagggtatgagtggaaagaggatgggcgaggaggccgggcttacctggacactaaggtgatggacggcgtctgctgggcaggcctcggggaggacccctcagctttgctctcagcaggggcccgacaagctcagtgggcagtggcaggaactgagtgccactggaaagcccattccctttatttagaaaacgagctccaggaagccgctactttgtgtccatttctcttgaggaaacttaccaccttggttgagcggcttcatggcagacagcagcgagccagcggccggactctgtatttcggaccccactccagtgctccctgggtcataccaggatctgcctctgtccacaaagatgagggaaaatgatgactgtgctgtgctctctacttcctgcggttactgcgtgattctaaagctgccactcggaacagcgagtcctctgccgtcgagagcagggaggggtagggtggacaggcgatgccgtggaaagacgtctcggtggaaactgccatggtggaaaggtggcgcgcttctcacggctgagttgctgcgcctgcagacggaagctccccacaggcagagctgcttggatgtgtgagtcatgaagccagagaagccccgctccatgagcagtgactccccaggtaagactttcagccagtcctgcgctggccagagtcgccgggcccgtgggaatcacggcggctccacgtctccgggacagcagggaatcccaggggcctggtagtgacaccggagggtcctcagggaacctctggtctggccctcatttcccaggggtagaaaaggaaatctgaaattggattaaaccatgcagcaaatatttactgaggctctgctatgggtcaggctgttttctgctgggtgcagcggggtgcagcgctcaggtaccccttccctcttagggcttcccactgggtagaggagggagatgttcagctcccagctcatctgtaaccaagctgtgcctcagttgtctccattcaggccctgggggtgagcccagcctttggcctgtggccccaatcccgctgctggggctcctcccccctgtgcccttcccctccccggtgcggcttcagtgcagccaggctctccttggtacccaggccagacagagtgatctgactttaactctctacagacagacaggaagagggcccaggagcaggagctggacagagcagagctgctcctgtcctgaggctccaggcccattcctttctgtctgggtttctccactgggctcttcctgccgaagccacccagtctgagctcccccactccctctcctggtacacaggcccttggttcacccctcagagggctccgggtgggaagatgcacagttagttggagactgaagggctccgtggccccaggagggccagcccctttctccataggatggcaccgaacacctcagctgccactggagggccaccctcccaggtccaagacgtccaacttcatgtgattttttaccacatttcattaattttgtggagcaaatgtcttcccattttacatctctgaaatccacgtctctgacattgctgttggcaggcggcacctgggatgtcgtcatcctggccataactagcctgtagtggacctgggtgatacacaggggcctcttggagctacggagtacctaaaataccatatagttaaccaaaaagtagcagaaaatatgtgagcatggatctcagccattttgcgggttggctgcaactgggacttaacctgccataaccttagatcagcctgccacacccaaggagggcctgcccccagacccagactcaagtttagacacagcctaaacgtgtacctctaaatctgcacaaactcagctgcccagatactggatttccttatctcttccgggaaatgcaagatgaaattgccctcctgttgggtattttcctgatcctttattctgaaaaagtggtcatccttttccccacaggccctgtgacctccctcctgtcttgcagctcctcctggcaccagtccccagggctctcctgttggtagttcctgcttttcttcttggaaattcctcgtggacctcgagatctttaccctaaaatagttctgttgaatttcaccctggcaatgtaaattgatagcttatcttcacagatgccagacaatggacaactcaccatcagtcctctgctcacctgagacaaatgcatgtctgattgcttcctctgccctattgtttatgtgaaaatgcagattcactgagccagactaaggcatcagtgactgttcctctacctgcctctcacatggagattgtgtattcagtgaaaggctgatcaaagacccaaaggaatgcaacagtttatctcttatctacctatgacctgcgagctgcccaccacccccagttgttgcgcctttccagacagaaccagtgtacatcttacacgtattaattgatgtcctgtgtctccctaatatgtatcaaagcaagctgtgcctcgaccaccttgggcacatatcctcaggacatcatcctgaggctgtgtcactggcatgtccttaaccttggcaaaataaactttctaaattgaaa

SEQ ID NO: 60 - DNA, 25157 bp, Homo sapiens
cgaagctagggcggggcccgcgggctgaggcagcggctgtggcggcgacgctgggcgtgaggtggcggcggccgcgccctggttgggtccccactgctctcgggggcgccatggacgaggccgtgggcgacctgaagcaggcgcttccctgtgtggccgagtcgccaacggtccacgtggaggtgcatcagcgcggcagcaggtgagccggacctgtccgacacatcctctgggcacccacccgccccgaccccagcgcgtgcaccgagccccgaccccagcgcactgattctgatgcgaccgaaccccagggtactgatccggcccgactggacccgggcgcacaggccgccgggccccgaccggatcctagcgcaatgacgcgaccccaccgcagggcactgacccggccgacccgagccctgcgcgcaggaccccagctcacagattgagccccgacccgacctcagctcacggacctggccctgaccctgcccctgccccggctgtcctccagtgcattgatgtggccctgagtcccacgttggagaataggatggctgcgcattacagagagctctagtctcagccgaaagctgggtggttattctttgagccactgcttctcagaccctttaattgttcccgttcctcacggactcgatgttaaatttttagggttcaaagcacatcccactcatttgtgaccaagtcagttcatggtatggtggggcctgtgggctgtgctgctccctggagtggggggaactcagcggcggggccagaccttcacagaccctccttatgtccacggagggtggattgaggtcaggtgagaccaccagcctcagaggggatgcagaggaagagacctttcctttaacagaatagctgttgactgggtattttctaggtgctggagttcagacacgtcagcataattgcaccagggcccagagacacctgcacaaagccccatcacagcctggcgacacctgtgtaaacaccttagcgctcagagacacctgtacacagtgccaccgcagcctagagacaccccatgtacaaccacacctgggcccagagacgctaggcataatcacaccagagcacagctgcacctagaggacagacacctacgtacaactgcaccagagttcatagacacctgcacacaaccgcactatgcatggtggtcgctgcttgtagggtgctgggacgattgcaaaggggccacatgtcacctgcctggctctgaggagcctgtccaggagggctcagagggaggcagacattgaataggacttagagggtgactgcagttgatcaggccagtaagctgggacagtgcatagcagggcacagaggtgtgatccgggaccaggtcactgttgtagaaaggggaggtgttaggaggactgcagcaagggggaccaagggaagccctggataccaagctgaaagcattagattttctcagcacgaatcacggctattggagacttgttacaatgcagaccccaggcctgaccccacagctgtggaacttcattagtaatagtgaaagccaacattattgcgtgcttactatgtgccaggtatcgtcctaaacactttgagtgtattaatgacttcacagtagcccagcatagcgagaactcttactgttgtcccctttttctaactgggagctgaggcacagcttcttcagggcacagctggtagaggacccacaggcaaggggtggctctagatttggtcccaggcaggccaactccaacttaccctgttaactactgggctttcttatgtattgtctgagtttttcaaaacacttcattttaacattttgtttttgaactaagatcatttatgtgtgttttggcttctttttttagcactgcaaagaaagaagacataaacctgagtgttagaaagctactcaacagacataatattgtgtttggtgattacacatggactgagtttgatgaaccttttttgaccagaaatgtgcagtctgtgtctattattgacacagaattaaaggttaaagactcacaggtaagttactaatttgctgggccaaggaacagttagctgaatacaaaaggttgtatcatgaatgtcttgccgttttcatagcctgttgtcagaaacaggttcacttctctgttggtttgggtggctagacaagttcttttcactagctgtcaggagccaggtgctgggagtaggaagtagccctgatgtcggggtgctctcagtatagcagtaacagattggaaaccaggaatgagaatgcagtgctgtacaatagtgggctgcgctggtaaggcctgtgtgccatgtctcattctttcaatcagcaaatgtttataaagtgctcagtgtgtgctaggaccataggaggtgtggggccacagagatgagaagatgggcttgccttatagaattcctttatctcatcccatgcatggccacctcacccaccatctgagttgatgcgtatgggttagaggagctttgtgtgagggcgtggaggcattggggcgattctggcaccagtataaaaacaacctgaaacattcctaaggaagacttatcacttacagcagtacaattcctgtcctgtaagaaccagctgtgaaggacaggcttggtactaagttctgctcgtgaggtggacctccccattcatacgttaggactcatgtttgtgcatgctcagagctttgtgcacactgagatctgataatgccgtggttttggccagtctgagggaaggaagagcttcccacactgttgtggagggatggacaccctaactggagggcacgggctgcccagggaaagttctaatgttctctgactgcagattcacttgtaggaatttatcgtagctgataatcatgcaattttgtagatctttctgaacagatgtttgttagatgctgttaataatagccaacaatttgaaatattttaactgtccaccagaggtcagttaataaatgtaggaattccatatatctacactatgtacaatatagccattaagaagaatgaaatagatttctatctaccaatgtaaacatttctctgagttaataacaaatgtaaaaagacacagttaggaaaccgactgggcaaggtggctcatgcctgtagtcccagcactgtgggagaaggatggaaggatcacttgaggccaggaattggagaatggcccggggatcatagcaagaccccgtctctaaaaagagttttaaaaaattagccagtgcggtggcgcacacttgtagtgtcagctactcagaaggctggaggtgggaggatcacttgagtccaggaatttaatgttgctgtgagctgtgatcgtgctgctgcactctagcctgggcgacaaagcaagatcccgttgcaaaaaataagttaattaaaaaaaaacaaaaaaccttatatgataaaactcagtttttggtcccatctgtgtgagtgtatttatataataacgtcccggaggctggatttagggcactttttcattctgtaagtaaatgtagggcccaaagagcaagggatgggtattagctttcaaaagagccaatcctcaatctgaaataaaataatagccttctcatctaatctgagaactagctttgattatactgtacattcagtttttatttgtagaccttaacatctaatttgtatggttgcagttaagtgagagttggaaatgtgtgtcgatattggcttttccctcattttagcccatcgatttgagtgcatgcactgttgcacttcacattttccagctgaatgaagatggccccagcagtgaaaatctggaggaagagacagaaaacataattgcagcaaatcactgggttctacctgcaggtatggggtgtgatgggagttgaaggggaggctgaggtcagaggattgtatactccatgccatgtcagttcacagggggggttctgtttgtccatttgttttgtaggattttaggatgttttctctcttatgaaatggaaagtatatcacaaaagaggaaagtagagatttccagtgtgggaccatactgttcctttgggtgggtaccttagagttcctggctaacggagagtgcccatgtgctcttctcacatgcctgcttggtctgtcctgctgagtggctccttgtctgcttgatgcttctccgtgggcattgctgatgggctctagcaggccaagcccacggcttcattcagtcagtgtgtggggaaacaggtggatttggatgggctctagcaggccaagcccagggcttcattcagtcagtgtgtggggaaacaggtggatttggatgggctctagcaggccaagcccagggcttcattcagtcagtgtgtggggaaacaggtggatttggatgggctctagcaggccaagcccagggcttcattcattcagtgtgtggggaaacaggtggatttggatgggctctggcaggccaagcccagggcttcattcagtcagtgtgtggggaaacaggtggatttggatgggctctggcaggccaagcccagggcttcatgcagtcagtgtgtggggaaacaggtggatttggatgggctctggcaggccaagcccagggcttcattcagtcagtgtgtggggaaacaggtggatttggatgggctctggcaggccaagcccagggcttcattcagtcagtgtgtggggaaacaggtggatttggatgggctctggcaggccaagcccagggcttcattcagtcagtgtgtggggaaacaggtggatttggatgggctctggcaggccaagcccagggcttcattcagtcagtgtgtggggaaacaggtggatttggatgggctctggcaggccaagcccagggcttcattcagtcagtgtgtggggaaacaggtggatttggatgggctctggcaggccaagcccagggcttcatgcagtcagtgtgtggggaaacaggtggatttggatgggctctggcaggccaagcccagggcttcattcagtcagtgtgtggggaaacaggtggatttggatgggctctggcaggccaagcccagggcttcatgcagtcagtgtgtggggaaacaggtggatttggatgggctctggcaggccaagcccagggcttcattcagtcagtgtgtggggaaacaggtggatttggatgggctctggcaggccaagcccagggcttcattcagtcagtgtgtggggaaacaggtggatttggatgggctctggcaggccaagcccagggcttcattcagtcagtgtgtggggaaacaggtggatttggatgggctctggcaggccaagcccagggcttcattcagtcagtgtgtggggaaacaggtggatttggatgggctctggcaggccaagcccagggcttcattcagtcagtgtgtggggaaacaggtggatttggatgggctctggcaggccaagcccagggcttcattcagtcagtgtgtggggaaacaggtggatttggatgggctctggcaggccaagcccagggcttcattcagtcagtgtgtggggaaacaggtggatttggatgggctctggcaggccaagcccagggcttcattcagtcagtgtgtggggaaacaggtggatttggatgggctctggcaggccaagcccagggcttcattcagtcagtgtgtggggaaacaggtggatttggatgggctctggcaggccaagcccagggcttcattcagtcagtgtgtggggaaacaggtggatttggatgggctctggcaggccaagcccagggcttcattcagtcagtgtgtggggaaacaggtggatttggatgggctctggcaggccaagcccagggcttcattcagtcagtgtgtggggaaacaggtggatttggatgggctctggcaggccaagcccagggcttcatgcagtcagtgtgtggggaaacaggtggatttggatgggctctggcaggccaagcccagggcttcattcagtcagtgtgtggggaaacaggtggatttggatgggctctggcaggccaagcccagggcttcatgcagtcagtgtgtggggaaacaggtggatttggatgggctctggcaggccaagcccagggcttcatgcagtcagtgtgtggggaaacaggtggatttggatgggctctggcaggccaagcccagggcttcattcagtcagtgtgtggggaaacaggtggatttggatgggctctggcaggccaagcccagggcttcatgcagtcagtgtgtggggaaacaggtggatttggatgggctctggcaggccaagcccagggcttcatgcagtcagtgtgtggggaaacaggtggatttggatgggctctggcaggccaagcccagggcttcattcagtcagtgtgtggggaaacaggtggatttggatgggctctggcaggccaagcccagggcttcattcagtcagtgtgtggggaaacaggtggatttggatgggctctggcaggccaagcccagggcttcatgcagtcagtgtgtggggaaacaggtggatttggatgggctctggcaggccaagcccagggcttcatgcagtcagtgtgtggggaaacaggtggatttggatgggctctggcaggccaagcccagggcttcattcagtcagtgtgtggggaaacaggtggatttggatgggctctggcaggccaagcccagggcttcatgcagtcagtgtgtggggaaacaggtggatttggatgggctctggcaggccaagcccagggcttcatgcagtcagtgtgtggggaaacaggtggatttggatgggctctggcaggccaagcccagggcttcattcagtcagtgtgtggggaaacaggtggatttggatgggctctggcaggccaagcccagggcttcattcagtgtgtggggaaacaggtggatttggatgggctctggcaggccaagcccagggcttcattcagtcagtgtgtggggaaacaggtggatttggatgggctctagcaggccaagcccagggcttcattcagtcagtgtgtggggaaacaggtggatttggcatctggacttgtgctgaagcatatggataaaagacaattgtaagtggctatgatcataaattttataatgtgttgttcaccaccaaaaaatgatagtttaatgaaaacatattgtggggattatgttatacgtcaatggaaaataaatgacaacaataccttaaagaaggatgggaagttaaagtttttttaaaagacaattgtgcgtgataatgagacgtaaagtgtaattctttgactccatccagttgtctgccagaagttacatgtgactggcatttattttgcatctttgattttaataaaaatcaaaatttgaagaaaaatttgcagaatttatactttcctgtaatcagaatcatagtcttgcctggagcagcacaatgggaagctcaggcttaggctcaggggagactgactgggggtggctgtaattgcttgccttcctgaaatcaggtctttgtttaattctgtcacagctgaattccatgggctttgggacagcttggtatacgatgtggaagtcaaatcccatgtaagttgctgtgccttttcccagaatgccctgttatttgaagaggaaccattactgttttgctctccaacacccctgagcaacttgatgcagatgggtttttgggagcccctgtctgctggcagcccttgtcctggacatctatcctctagtattgctccagagtagagctggtctctgaggagctccctgagggagaagagggaaagggagaacgtgaaggcaacttagagaattaaaccctctggagatgggaggagggaaggtgagcaagcctggtccgcacaaaggaaaggccggtgtgtcttaacccctgcaccctcttcaacgggaagggtctttcccatgccagcagctggctagaagactatcactcagctgtcctctgcattgatagtctgagactatcactcagactgctcctctgcattgtggctgttgttattttgcgaataataactgctgtatcattctagggaaggagcttactcattacttgataaacaaaccccttagtggttttgtttaatgttggcactttaaataaaagtgatcattttgttgctcttcttatatttataatagtaatagccagtgtttttccttttcccttttggaagcaccttctcttctgaaatgaaagcgtttggaggtgatgatctcttaggaggcggcctcgctccctgtgctccctcttctcatgtaggattaagccctgggggagggcacatttcttggggacctttgccttgttggtatctttgtcaagctcttttctttttctctatcagctcctcgattatgtgatgacaactttactgttttcagacaagaacgtcaacagcaacctcatcacctggaaccgggtggtgctgctccacggtaaattatgcaggcttttatttgaccagataagtggcatgaaatttagcctttacttgtaccttcgtccttctgcaaggagttacggctctttgttttctgaaggagccacagctgtcctagaatgtcccctctctgtgaagcagatccagctcatgacacttgggacattttttgtttgtttgtttgtttttgtttttgagacagagtctcgctgtcgaccaggctggagtgcagtggcccgatctcggctcactgcaacctccacttcctgggttcctcccaggttccagcaactctcctacctcagcctcccgagtagctgggattacaggcatgcgccaccacacccagctaagttttgtatttttagtagagacggggtttcaccacgttgaccaggctggtctcaaactcctgacctcaggtgatccgcccgcctcagcctcccaaagtgctgggattacaggcttgagccaccgcgcgcggcccctggggcattgattactcggcacttaatcaagtcttcctgtggggggccacattccaagacatcctcagatgccccaaacgtggataatactaaaccttatgtagactattttttcctacagacattcctatgataaagcttaacttataaattaggcttgtagtactcagagctttactttgtgaggagtaaactgaaaaagccatattttaaagaaattctgtctggttcttctcaggagaaaatactgatggtttgttgtttggttttgttttgttttgttgtcaatatcaccgggtagaatggggacacgggaattgagtggactcgagagtatgaaactgtagccaagtgttaaatagaagcttgaagggtacttggcttctttaagtcagttaagattgcgtgacaaagtgaccttaaaacacaatgttcttttaaagagcagacaggccccgcatactgccctcatagcacagtcagagtaagcagcaggtgttttaattagtgaaataagttgtttctgtttggaaccagttacgtatttcctctttaattcttgaaaatacctgcagaaaattagagttgtatgtctccattttctgttagatgctttcctttttccatattggtcacctcgcagcttctgtgaggcatcttttgtagggtccagccccacagggttggtgagttttctccccatgtgcaaagacgagagagtgtagaaataaagacacaagacaaagagataaaagacagctgggcctgggggaccactaccaccaagacgcggagaccggtagtggccccgaatgccaggctgcgctgatatatattggatacaagacaaaggggcagggtaaggagtgtgagccatctccactgataggtaaggtcacgtgggtcacgtgtccactggacaggggacccttccctgcctggcagctgaggcagagagagagaagagaaacagagagacggcttacaccattatttctgcatatcagagacttttagtactttcactaatttgctactgctagctaaaaggcagagccaggtgtacaggatggaacatgaaggcggactaggagcatgaccactgaagcacagcatcacagggagacaggcctctggatgactgcgggcgggtctgactaatgtcaggccctccacaagaggtggaggggtagagtcttctctaaactccccgggggaaagggagactccctttcccggtctgctaagtagcaggtgtttttccttgacactgacgctaccattagaccacggtcagcttggcagcgggcttcttcccagacgctggcattactgctagaccaaggagccctctggtggccctgtccaggcataacagaaggctcgcactcttgtcttctagtcacttctcactatgtcccctcagctcctatctctgtatggcctggtttttcctaggttatgattgtagagcaaggattattataatattggaataaagagtaattgctacaaattaatgattaatattcatatataatcatatctaagatctatatctagtataattattcttattttatttattttattatactggaacagctcgtgccctcggtctcttgcctcggcacctgggtggcttgccgcccacatcatgctaggggacgcttggcaggcaggcgtgcaagaagagtgctggcctctgcctcttctagtatggggtatgagcccactgagaattgtcttaggaaagagggtggttctgggggcaacaggaataacacatgacccctccacctccatttatcaagaaaggtgtgtttgatctctgaaaggtgccttgatgagtggatttcataaaggaagagtggggacaaggacaggtgtcagcaaagatgtaggctagaaaatgcaatgttcattcccgacgctaagtgagactgtaggccgagaagctgggagcagtgctgggggtggggaggcgatggaggctgagaccagaaatacgaagttgagtacaaataagaaagagggggagacgtaagtgtattggtaatatttcatagcatttaagtttctaagcagacttcattgtagtaataacattaatagcttttaactgtattccttatattttatggataatggaagttactgttgttttaagaaatttgttgtagcactgacttaaaaatatatttgcttggatctttgtcacaggtcctcctggcactggaaaaacatccctgtgtaaagcgttagcccagaaattgacaattagactttcaagcaggtaactttcggtaatctgtgagaggagagccatgggaatgggatttataacgggaggttgtttttttttttttctaaatcattttacgcaaataatagattcctctccactgtaagtcacttgattcctctgtattcagcatagttttgagttatgatttcagtcttttaagatttgagacttacttgattgccagcacatgatctctgctggtgaattgcacttcagaagactatactttctccccttgctggatgcagtgttcgtctctaattacggatttgtcttttcctcttgagttctgtctgtttggggcttatggttttcatcacatttggaaaatacctggtcattgtttcctcactgaatttccttgaccctcccctttatctgggactctgtctgctttcatgttagactgtttgatgttgttccacaggccactcctgtgctttttcattttttttttcagttctttagaaatatgttttattcgaaagtttctattgccgtattttaagttgactgattttctacatcgtctaatctgcttttaattccattcagtgaagttgttatgtctgatagtgtatttttctgctctgttctatttgattctttttatactgttttttcattatgttctcgttcacgtcttgaacaaccccataatagctgttttaatgttctgtctgctaattccatcatgattgtcatttctgattgtgtttctattgactggtttttcttctggttaggggtcacatggttttgctttgttagcatgttaggtagtgtttgattagctgctgaacattgtgatctgaagtgtgtggattgtgtgttcctttagtgagtgttagattttgttccgttaggcatttccattacttgtgatttggtgtgatcctttgaggtttggtttttttaagctttgactgggaggggtttaggtttggtcttaacactcaattgtggtcctctggggtctccactgagtgtgctgaaggatccgtgggcactctccactctggcggtcggagtatgcactcctctcagcctgtgtgaggtccaggagcccttcagctcacagaccacgggcgccctttacatagctgcagggaatgtcccctgctcacacacacctgagtattcatccaggacatcgggggcgccatgaggatcctgggcactccttctgaggtatttcttcatatttccttcccctctggaattctgttctgcagccttcagtcacttcagactccctgaactccaatctctgtctcctcgactcagcgagtggctgtgctccacttgggctccctcccgtgcctgtggttggaagatgcctcccggcaagaaagttagagcatttgtagagagggtccctggtcttccgactcaggagtcccagccctcactgccctgtgtacagcaaccttaccagatgtcatttcatccattttgccttaaatgaggttttctcatttaagattagatggtaaatctgcttcctgttactccagtatgactagcggaaatcctgtgaggtttaatttcgtatacataatttttgttcttcaaaaatgtcttgtaaatgtttttacatagggaaattgctttattttgaccccttagcttatgtttagcaacttgccctttgctttgacatattgaaatacatgtgtgttttcaagatctctaggggcatgccagcatggcggctcaatgcctgtaatcccagcgctttgggaggctgaggcaggtggatcatttgaaaccaggagtttgagaccagcctggccaacatggagaaaccctgtctctacaaaaaaatacaaaaaattagctgggagcacatgcctgtggtcccagcttcttttgaggctgaggtgggaggatcaccttagcccaggaggtccaggctgtggtgagcctgggtgacgggagtgagaccctgcctccaaagagtaaccaaaaaagatctctaggggcagagagggcaacacaagagaaggaaaatgttattgtaaggaatatagctttttccagtacaaagatctggaaatatgcattggttttatggcttagaaatggcaaaaagaagtcctagcaagacttttcctcactctatcaaagaatcaaaatgttttataattaattttgtttaatattcaacccagtctatattttgttagattgtctgtatccctccactgttttaataaacagtatcagtaaacggtctctctcttttttacgtggaatgccagtgatgcttcttgaacgtaattctttttcttttgtggacttttgacatggaagcaactgaaaagaggacctggaagtcagtttctctctggcctcagtcttgttctctggtgatttagtcagcagctaagcacgcccagatctgtctgcgggcttctgaatggatagaggagtgtttctgggttccagtcagtctgtgtgtgttaaggttaactttgggccacctgagcattcctgggctctggggtctgtgctgtttagggttctgtggaaggaggggaaaatgctcagctcctgccaaaagctcttgatgcttctattttgttttgttttctgtcttatgttagtactgctaatatttttaaacatagaaatataatttgtaaatagatataaaatgggagtttttactctttaactcaattgatacagtctagaactactgattgaatcttgttagactttttcataattatttagtacacggagggctggattcctcaattctttgtcagtaattgtaattcccccgatgctgggcacttgagatgttgcattcaggacgcgtgaatggctgccgctgaggatccacaggaccagttagtaattctctcaactccttttttctatctcaggtaccgatatggccaattaattgaaataaacagccacagcctcttttctaagtggttttcggaagtaagtattaaatattaattctaattgtctggattgtatagctgaaaaaatgtcttgtatgttaggcaaatcctcctccagaagcttcaggagagaactgggtgggaagggtgtgtgaggattggggctgactgtgatcagagaaggttccggagctggggcccttggggaccctcccttggttctccccagacctgtgactgggtgggacaggacaatcgatggactctcagaagggcagggctggcactcaggggactgcagccctgccatgcatgtccttggtgctcatgcgccctagcactgtctgtgagttgagggggtcagacaaggtgatgtcacatgtgattcttacctctgaggagctgtgcccaagtcacctggcatccgcacatccctctggtgaggtgaggtgggaccaggcacgctgggcacaggagagcctgtgaggagtgcatcccagcctgtttgcatctgtggtctgcctcttttcctcatcagagaggacacacaggtaaagcagaggtacaggtcaccctcactgtgccgccccgggcaggtcaggtgtggtctcaggtctcagcaccctggcattcaaagcagaggggaagagtgttaggctgacctcctcccatgctgccctagcttctctgatttagggagctttctgaggggccgtcaggagacagtgggcttgtggggacaactggggcagcaggccacatcagggtccccctgtgcacctggcagtgtggtccctgcacgttgacactaaaagggtgtttgggttccagagtggcaagctggtaaccaagatgtttcagaagattcaggatttgattgatgataaagacgccctggtgttcgtgctgattgatgaggtaggcatttccagataaggaaattcatgacagaatcgccttttgccattgtggggacacagcctactcctgatgctcctagctttcccctcctacagccgggctgccctctatccctccctgcactgtgcgcctttccaccttgccgcagcatccgcaggctaggcacgggaacacccattcattcatctttttcacgtgctcagcgggacgtatccccatagctgcctgtgaagtgccaggccctgtcctttttgaccccactgctccctcccaacaggtggagagtctcacagccgcccgaaatgcctgcagggcgggcaccgagccatcagatgccatccgcgtggtcaatgctgtcttgacccaaattgatcagattaaaaggtaaccaggacatgcagcaattttccctgagaagtgatgagaagtttgtcccaaagaaatgcgtgatacttgtgcaaccctagatcttagtgcccagctctttcaccggaaagtgcatttggcattgagtatcgactccttttccacattggaagcagcatatcacaaatgctttttaaagaaattgtttttagtgtgttaaaaatgtaatagaaggccaggcgcggtggctcacacctgtaatcccagcactttgggaggccgaggcaggcggatcacaaggtcagtagattgagaccatcctggctgacacggtgaaaccctgtctctactaaaaatacaaaaaattagctgggcatgatggcgggcgcctgtagtcccagctactctggaggctgaggcaggagaatggtgtgaacccgggaggcagaacttgcagtgagccgagatcatgccactgcactccagcctgggtgacagagcaagactccgtctcagaaaaaaaaaatgtgaaagaaaactcaggcatggtaagcattttacgtagcacagaaaagcataaaatgaagaactgctacgttcaggccttatcccacccacttctctcctatcccacccactgtcagcaccaactagtgctgctcgtaggtgaatggctgtcccctgctcgccctgctggcccaggacagacagcttcgtgtgcagatggtccacgtctccacagcccagcctcacagggccagggcctgttgtcattgtagcccaagtttatcaagcttaaggagcgacagctgctggcccaactcccaaggaagtgatgggcgagccagaacctgcctgtccctgtgtggtgctcagccaggactcaggttccttctgtgaaatgttctttctgtcctcagggtgcctggggagtccctggcattctcagaagctggattgttgagtgtggggtgacagcagactgaactgtgcagaggaacgttttgtccaggccatcaccactgtctcaccacagagagcgtatctggcttcctgagaagcgctcgttttggggtcagctgcaggaatgtgtgccaagaccagctcggtcggggagaccctaacccagcggcgctagaggaattaaagacacacacacacacaaatatagaggtgtgaagtgggaagtaggggtcgcacagccttcagagctgagagccccgaacagaggtttacccacgtatttattaacagcaagccagtcattagcattgtttctatagatattaaattaactaaaagtatcccttacgggaaacgaagggataggccgaattaaaggaataggtggggctagttaactgcagcaggagcatgtccttaaggcacagatcgctcatgctattgtctgtggcttaagaacgcctttaagcggttttccaccctgggcgggccaggtgtcccttgccctcattctggtaaaccgacaaccttctagtgtgggcgttatggccatcatgaacatgtcacagtgctgcagagattttgttatggccagttttggggccagtttatggccagattttggggggcttgtccccaacaagtgtgcaggtcctggaggggggcctcccctgcctctggcttccttctcctcttgtccacttccttccccacctggcttgtctctcagtctactgcaatctggctcctgcccccgccgcagcccagcagccccgcattcacatgagtgttcccttttctctttctggaactttgcacagcgctgacaccctgatggccccttccctgaatctctttgtgcctccctccccggcctccattctcctgtctccccggtttatgctgctggcgtctctccgcagggaggggtctacacagcctgtctgtggccttctctcctggcgtgtgccccttcagcatagctcagggttctgtggggggaatcccagacctgcacatccacctgtgaccagacatcaggcttagatgcccgggatgccaggcacactcccacactgctcactgggccccaaatccctaacttcctgggattccacacgacgctgatggcctcgctgtgcacctgccactcaaaccagaggatggaggccaccgtgacttctccctgtcagtcacaagggggtgtggctcaggaagaaacaaggagacacgcttgcctctcttgccttcattccctcgtgcttctggttccagcccctctctagaggactctttctgtcccccaccagtcctgtccactcccgcatctctggattgtcagcccctgggtcgtgatctgcaggcctaggcctccctctggcccttcctgcagccccaccctcctggtgctggactgagcagctgtgagctcacccaacctctgtgccttgttcctctgccggggacccacaggctccctgtcctgcctctgcttagctcaccccggcgcgcaggcacagggcctgccctcccttggccagggtctaggtgaagttgaccttccccaggcagcagtggtagcactgccacatgtgcagccacgccccccaggcctgtgcagcatgctccctgggggcaccttgtgcccgctctgctggctcatgctgggtccttgggggacattggtcaacagaccagacaacaggggctctctctatggagtttagacgctagaggggagagcagatcatgaacatgggaagtaacccagctctagagtatgtctagggatgatgagtggccatgcccaggtggtggtgggcaccagagcccacggtaggtggcacaatcaggaacgccatgcgaaagtgagatccttgctaggccgggcgcggtggcttacgcctgtaatcccagcactttgggaggccgaggcaggcggatcacgaggtcaggagatcgagaccatcctggctaacacggtgaaaccccgtctccactaaaaatacaaaaaattagccgggcacggtggcgggcgcctgtagtcccggctacttgggaggctgaggcaggagaatggtgtgaaccggcgaggcggagcttgcagtgagccgagatagcaccactgcactccagcctgggcgaaagagcgagactctgtctcaaaaaaaaaaaaaaaggaaagtgagatccttgccaaggttgaaggcagtgagggaatgagcgaagtggggctgtagaattcccagaaggccaaggagcagcgagagcaaaggctggggggtctgcgtggcctgtgttggcacaaggccactttccttcctgttggcagcctgctggccatcgtcctgccaacctccttgccagatagggcaggatagaattgggtcaccgacagccgtgatgactgtggtgcttgcttctcggccacaacaggcattccaatgttgtgattctgaccacttctaacatcaccgagaagatcgacgtggccttcgtggacagggctgacatcaagcagtacattgggccaccctctgcagcagccatcttcaaaatctacctctcttgtttggaagaactgatgaaggtacctttattttttttttcctcttgatacaaatggatttcttatatgttcttaattaattaagatagcttaaaataagctcgttccagtacggaggatttcaacatatgcattaactcccttcttaaattgaaaactagttttgtatgtgacaggttgagctgatagttgaaactagggccactgactcaatatttttgttcttttggcacaatacagtcatcattgttcattatttgaggtaccagtcagtgtaggggacgtcagtgaccggctgtgtttacctggctggctgcacaaaccttagttctcagcttaccccgggcttttccaatgccctgcctctcgggggcctgtatccttacctgaaagaggaaacatcacgggcgtagtatgggcctggttttggtcacggggtccacatgacgtcacgttcttgagtcgcctgttgtgatgataggcaggaacactgttgccgtgggcagagcgacgcgtgcgggttgtgtgtgtgagtcaggaaggccgtcgccacgggcagagcgacgcgtgcggggagcgtgtgtgagtcaggagggccgtcgccacgggcacagtgacgtgcggtgagtgtgagtcaggagggccgtcgccacgggcacaatgacatgtgcggtgagtgtgagtcagtaaggccgtcgccatgggcacagtgacgcgtgtggtgagtgtgcgtgagtctggaacgccgtcgccatgggcagtgacgctgcggtgtgtgtgagtcaggctagcagggacctgccccatgcttgtgtttctgctgctctagcccctgtgggaacagacctgtcccagacaaatcatcctgcaggggcctttgtttagggtagttgggcggtaaccaagcaaaccagtgaatggggatttaaacagtgatgagtttaatgcagttgttgccacctgctggtaccacagagtaggggtgttaacaaggatggcacaccctgctgtggttggggacgggagaactggtctcagccatggacccactgggcctgcccgggtcagcactgtccaggcatggttttcttgggggttggggaaaggagacggagctctgtggagctttgcctggagaatgccagtgatctgaagactgattctacagcagttttgctgccaaggagccccacgtgatagcagatcctgcgaggaagtcgtgtgtgttggaggtcctcacgcaccttcagtgtgggttccagccctcgcagtgtgacgtttatacacttgtacactcgtgctgtgaatccaggggctgtttaaagtgttagctaagagggatggactttttctgggacagtgtaggacaggggtagttttttgtttgtttgtttattttgagacacagtctcactcttacctagagctggagtacagtggtgccatcgcagctcactgcaacctccgcctcctgggttcaagcgattctcgtgcctcagcttcgtgagtagctgggattacaggtgcatgccaccacacctggctaatttttgtattttcagtagagaaagggtttcatcatgttggcctggctggtctcaaactcctgacctcaagtgatccgcccacctcagccttccaaagtgctgaggttacaggcgtgagccaccgtgcccagtgataggggtagtttcttattttaggcagtttatatgaaattaagacatgcagatgtcacagtggatattgaactggtctcgaaagctcaatatcccccaaagcacaagcacaaactgtcttaattttgctcacacccctcaacaaacctccaaaatgttcagacaatgctattttcttccttctccttgttcctgagtcagaacggttcgtattagaattcagtcatagtaagtcagtgtgcgcacctgactgttggcaaggctgcttggaaaagcatgacttccagacaaatgatctctgaggggaacttctggtgctcagctcctcggtcagtcagacactgtcatgctgccaaacaagcctcacctttaaaacagacaaactaggatcctgctttggaagtcagtggaagtcctggctctaagtcccagctctgcccactgtgggttttgacgtctccgaaggtggcataacagactggactgggtgcctccaggtcccttcccttcctgacacacagggaggaaaagttttggctcgaaacacagaagaggctatgttgctactggtttctgaggcatgttccgttatttgtatttgtttgaaaaagcagaatgtgtacgctgagaggcatgagagagcgagcttgttccctagtgcagctgtgcatcttgagtcgtcaccgtctggatttctgtgagacgtggcgtggttgacatttgacctgcaggtgctgtccctcttgctgacggtgcctacgctcaggcctctgtggactcagctaaccgcctgtacttctgtctccccagtgtcagatcatataccctcgccagcagctgctgaccctccgagagctagagatgattggcttcattgaaaacaacgtgtcaaaattgagccttcttttgaatgacatttcaaggtgcaaattgacctcatttttgtaatcaagaagaatccatttgtgatattaactagggagtcattgtttcctttgaggagaccagggagggccctgggtgtgaactctcaacacagtataggtatgaacatgcatgtacacacgtgtgtgtgtgtgtgtgtgtgcatgtgagtagaaacacgcagcacagccacctccttccaaaggagatgtaacccttgctcagggagggcgctggctcacactggaagcctgcaaccctacggctgacgacacttacaaggattcgcagagtccacagaaaggaaatggctttgggggtccagggagggtggaagggaaggtaggaaaatcaaacggtgccttgaaggatagaatttggttccagctggagagaaatcaggaaggctgctggagcagtgtgttcaggtgaccgtctagtgggttgcagtgtggaggctggggaggtgccggagaggcggggggtggaatggacagagcctcgggtttctggccagagtttgaattttattttgaagttggcaagaatgtggaaggctttaaacaagggataacatgaagaatgtagtattttttaaggatttggattatctgttgaagagatttaaatcagttaagatgggaacgaagaacagttcagagacttctacaaaaattgaagatgtgaacccacccattatttggggactctgtgcctactgaccatgtgcccgctgcatcgtgccttacgcctggtgctcccaggcaggtgatgccttccctgagcgcaaggatgctggccctggggcagaggctcccgggcaggtgatgccttccctgagcgcaaggatgctggccctggggcagaggctcccaggcaggtgatgcattccctgagcgcaaggatgctggccctggggcagaggctcccgggcaggtgatgcattccctgagcgcaaggatgctggccctggggcagaggctcccgggcaggtgatgccttccctgagcacaaggatgctggccctggggcagagcacacaggtgtgccttgggtgtgcttcagagccgcgaggacactgcctcccagagcaggagctgaggatggggagagaccggccccatacgagaggccgggggcaaagagacattcagagggcaaggctcaggagaccagtgaggggcaggaagtgccctgtgaacccagggtgtgcttgggacgcctcggcttgtgttcccagggatgcctcggccaatgaggaaaattagtcctgaaacgtgtgattgtataaattgctgtctctgaactgggttttctttacacaggaagagcgagggcctcagcggccgggtcctgagaaaactcccctttctggctcatgcgctgtatgtccaggtgagtctccactgctgtcctccagcacccgccctgtccacaggtctcagcctcgccggagattccgcttagtagccctggggtatcagcctcattttatctcagtttctaaaccacagggtcctggggccggaggaggagctgaccttggcaccgaaacacaggggctgtcttgagtcctttgggaggaggcggctgtgccacatgcctctgctcacacgcatgcatgcacacacatgcacgtctgcctctgtggtgtgctgagctcgtggccagggccctcgctggcctcaccagaggtttgtgctctttcagtctgggttcagctcacatagaacagtgacctggatccacagcctcacccactgggtgctgggcctgttgcagatgcttcggcctggggcactcacccctcccctgcactgtccccagcagccggttggggtaaggactcagtgtctggcagagcagatacacttacatctgagaagagaaaacccccatcttggaatgtttcctttcaaatcagaagtgactcaggctctgtctgatcagtagcagcctctgtgctggacacagtgctcagcacagaggtgacagtggccatggatcatgagtgggagccttttgatgcaggggaggtgacagctctgggcactgggccatgggaattctctggttataagcctgggacatagggtgggccctccagggtctgctccctacagcttctcatccttctcagtgtgtgggtggctgccttggtgctcccctgcccacccccgcagctgtttctgacattcaggacatggcgggggcgggggtcacgtagccaccttgttcgccttttctgaagtaaagagcttggctgatgtgcgtcctggacgtgtgtggtgcgcactcactgctcaccttatcagctaccacccccttctgtgctatctgcactgtgggtggcggcaggggctgtggatgccagatggccccaccaaacgtgagttgagcccctccagcaatgaccgtgtaccttctaggcccccaccgtcaccatagaggggttcctccaggccctgtctctggcagtggacaagcagtttgaagagagaaagaagcttgcagcttacatctgatcctgggcttccccatctggtgcttttcccatggagaacacacaaccagtaagtgaggttgccccacacagccgtctcccagggaatcccttctgcaaaccaaacgttacttagactgcaagctagaaagccaccaaggccaggctttgttaaaagaagtgtattctatttatgttgttttaaaatgcatactgagagacaaacatcttgtcattttcactgtttgtaaaagataattcagattgtttgtctccttgtgaagaaccatcgaaacctgtttgttcccagcccacccccagtggatgggatgcataatgccagcaagttttgtttaacagcaaaaaaggaagattaatgcaggtgttatagaagccagaagagaaactgtgtcaccctaaagaagcatataatcatagcattaaaaatgcacacattactccaggtggaaggtggcaattgctttctgatatcagctcgtttgatttagtgcaaaaatgttttcaagactatttaatggatgtaaaaaagcctatttctacattataccaactgagaaaaaaatggtcggtaaagtgttctttcataataaataatcagacatggtcccatttgcaggaaaagtgcagactctgagtgttccagggaaacacatgctggacatcccttgtaacccggtatgggcgcccctgcattgctgggatgtttctgcccacggttttgtttgtgcaataacgttatcacatttctaatgaggattcacattaatataatataaaataaataggtcagttactggtctctttctccgaatgttatgttttgcttttatctcacagtaaaataaatataattaatggtttgcatgtgaaattcacttttgaaagaacatgttaccttaccttttgttttagaagttttcaagtattaaaatattttttagaa

SEQ ID NO: 61 - DNA, 40255 bp, Homo sapiens
gagccgactgcggctgcgcggggtattcgaatcggcggcggcttctagtttgcggttcaggtttggccgctgccggccagcgtcctctggccatggacaccccggaaaatgtccttcagtaagtgtccgtctggtggggtggggaagcccagggggctggggcgcctggggttcgggcccggcccgccccagacctgccttcttttgcccccttcgcccccttcctgggtttggaatgtgtcccacccagcaaggccgtgggctgcttgagagccggggagggctccggcaccttgggttccgctgaggcccggcgcttgtccgcccatctgcgccgcggtggccgtttggagcaatctggataattcgttaggccctcagagctctcgtttattctttgtaaggaatcccctcctgacagttcaacctaacaaaaatcctgaaccttgtgtttagattttgtgatacgttttcaaagtcacgtatttaacaattcgactacagtagggaacgaatttaaagttgctctcctatccataatctcactgctattttttaaaagtctttgaatacagggtactttaagaaaaaaaaattgaaaaaaaatagctttgctcattattgagtgatgtgtgccaacctgctaacatcactcactttttacttaaagttcccacgcctttgttttatgacttagatgatttacccagactgttacttaaaggcatttaaaacaattaagtcataggttcaggaagtaaaactggtccgttttatcagttctttgcgatcagaagaccgagattgttaaatgcagtcaaaacaaaaatccatttgctctaagactttttctgtaaccttcaacctagccagcaaattattttctttcagaagtcccccgccccttttttaaaggtaaagcagatattcctggtcctgttttgacttactaaagattaatgtgctttaatgaactggatgttttactattacagtgcatttaggtcattttactagagaaatgtggttggtgttagaatatgaaatgtttaccttgggcgagcctactagacatattttggaagaaaggttctgaaatagggatttgtccctctgctataagacatgagagacattcaaacttcagaattattattttttttagttttaaaaataagcaatgcgtttatatgactaaaagaagatttagaacagtatttaccgagaactcctgtacctgactactgtcccactctgtcacatgtaaccgtttttctagtttctttttggaaatataaatatttacattattataatatgttaaatgtctgcacgtttgtatacattttttgcctttaccacacataaaatataacagtatatatatacgctgctcttttgcctaacaatatccctggagatctctaccaatacataaagttctttcttattctttttttacagctgtgtaatacttcatgtaccctaattgatctaagcagtcaacacaggttgttgacaatctgtttcaaatagtggcacggtgaaaaatcttgtacataacattttgcggatacacatgtgtatgtgtcttctagatctgcagaagcggtttgttggatcaaaagcaaatcagtccagttttggtagataattcccttggcaggaattgagcacatgcccacctacaagcaagatgcgacagagagcctgtttcttattgctgcacctacacaatcttttcacatgttttttagttttgccaatctgatgagtgaagaattgtttctcagcgaagtgaatttctgttatgagagactgaacatttttcatgtttgtgagccatgtatctttttctgtgaaataatttattatgccctttgctcattaaaaaaaaataggttaatagtttttttctcagcttctaaaagctcattgtttttccagtttatcatttctcttttgactattttgtggtttttttgtttgttttggttatttgccatggagaagtttttatttatatatagttgtctttatttagcttttcttttgtggcttctggattttgagtcataagaaacattgatttcattcatataccgaggtgatagctagaagtaaatattgctttttaggcaggacatggtggctcatgcctgtaattctaacactttgggagaccaaggtgagagagtcacttgaggccaggagttcaagaccagcctgcgaaatatagtgatacctcatctcggcaaaaaataaaaaattagccagacatggtggcatgtgcctgtagcctcagctactcaggaggctgaggcaggaggatctcttgaacacaagagttcgaggttacagcgagccatgattgcactgttgcactccagcgtgggcaacagagcaagattccatctctaaaaaaataaaaataaaaatacatattgctttttacatcgttttttcaaaaaaaaaaaaaatcttatagtgtctcagatagaaaacctcggagtcttcctgactggtttcccacttcgattctcacctctacctccttcacacagagggacattaaaatgcaaattaggtcttgtcacccccaccttttcctgctcatcacacttgaaccacactggcttgctttctgttcttgaagttctctcagccttgaccatttccccctcagatagctacgtggctgtctggcactgatcacatgtcaccgcctctgagaggcagggcttccttgaccagcctatctaaaaatagtaactcatcacattctcaccctttctcctattatatgttattttgtttgttcttctgagtacttaatgtaacctgacattactttgcatgtttctttttgtttagcccttctagctctccccaaggggaattttgctttgcctggctgctttttttcagctgtagttgagtatatggaagtgggggatgcagagttctctgggagctctgtggctgatttctgagcactgttatcatctgctcttcctcagggactttgttactttgaagcaatgaaaacaaactgtgtctgggaactctactttgtggtactctgggctgcctcacacccgtttacaatccctctttgactcgttccagccgtgtctcagccatgctcctgggaagcaaaggcaggtgtctgagtcagtgccatgcctggatcccactggaagggcaggtgtctcagtcagtgccatgcctagatcccactggaagggcagaggtctgagtcagtgccatgcctggatcccactggaagggcagaggtctgagtcagtgccatgcctggatcctgctggaagggcaggagtctgagtcagtgccatgcttggatcctcttgttaggaggaggagcaaacttctggcaactgcccctcatggtggtagtgacattggggttccgtgagaggagaaggagactcttggggatagagctgggacttatggaaaaacactggctgcttctgagttttctgactatgtctgagcgaatgcttcttaaaattttaaatactatttggatcgatatttaagattttcattttaatgcatataaatggtgtatatataaaatgattgatatttaagatttttgttttaatgcacataaatggtatatataaaatgaagtatatcttttgcttgtagaaattatccctaatatcccatgtgcatacctttctctcttctaggatgcttgaagcccacatgcagagctacaagggcaatgaccctcttggtgaatgggaaaggtcagcatttagttattttatttcccttaaacaaactatacactgccccatggaaaattaacattatccatatttttctagatacatacagtgggtagaagagaattttcctgagaataaagaatacttgataactttactagaacatttaatgaaggaatttttagataagaagaaataccacaatgacccaagattcatcagttattgtttaaaatttgtaagtatacttaagatgtataatcaaatctataatcatgttgtacttttgctttttaaacttagattgtaagatcattttaggcttttaattccttgtttctagttctgaagatacagagaggaaaatctgttcattctctgattcaacagacttctgtgccactagtgattaaaaagtatgtaggggctgggcgcagtggctcacacctgtaatcccagcactttgggaggccaaggcaggtcgatcactttagttcaggagttcgagaccagcctggccaacgtggtaaaatcctgtctctactaaaaatacaaaaattaactgggcatggtggcaggcacctgtaatcccagctactcggggggctatggcaggagaattgctcgagcctgggaggtggaggttgccatgagccgagatcagatcatgtcactgcactccagcctgggtgacagagtgagactctgtccccaccccccgctcccccaccaaaaaaaaagtatgtgcggacttctctctaccagcaaccagtcaatcaactctgtagttgtgtctccaattcaattccagcactacctgaaaataacttcagattccacagcttaagggttctgttccacaagactgcctctcacttacaatgccagttgcaagccacaggttgttttacctgtgcttctgcctgactggctacaaagcagagttcgcacaaccctctccctgggtctgagttcgatcagtttgcatgagtggctcacagaactcaaggaaacacctacggttaatgttttattataaaggatattattaagaatactgatgaacaccagatgaagagatgtttagggcaaggtattggggaaggtgtgtggagcttccttgccctttccaggtgtgacaccctccaggaacctccatgtatttagctctccagaagcttgtctaagctctatcgttttgggtttttatggaggtgccttacacagacatgattgattaaatcattggccattggtgattggcttaaacttcagtccctcttccctccctggaggttcagcagtggggctgaaaagtccaaccctctaaacctgccttggttttgctgatgaccagctcccatccgaagctacctaggggctcccagcttagctggctaactcctcaccagacatagactagcagttccattattcttatgtctttttgttttgggttcgtgtaggctgagtacaacagtgacctccatcaattttttgagtttctgtacaaccatgggattggaaccctgtcatcccctctgtacattgcctgggcggggcatctggaagcccaaggagagctgcagcatgccagtgctgtccttcagagaggaattcaaaaccaggctgaacccagagagttcctgcaacaacaatacaggtagttacaaagtcaaactctctgtgatgattctgactttgaaaagtaatgtttgctgttaaaaattgtatcattagcaatttgtacagggaaatccttctagttttggacaatgtggataatacaggatagtgtaaagaaaaaaactgctcagaaatattactgttaacaataactggcacatttccttctagtatcttttcctgtacctgtgtgggtatctttgtgtttatatattttaacagcaaatcatattgtatgtctagttatacatacaaagaaatacttaagaaattatgagcttttaaactacttctatagtagttgtgaaatctgtcacagtgttgtgtcataatccactctccaattggacattgaagttgtttacattttgatttttataaacagcaccatgataaatactttttttttttgagatggagtctcactctgtcgcccaggctggagtgcgatggtgtaatctcagctcactgcaacctgccacttctgggctcaagagattctcctgcctcagcctcttgactagctgggactatagggacgtgccaccatgcccagctaatttttgtatttttagtagagacgaggtttcgccatgttggccagactggtcttgaacccctgacctcaagtgatcttcctgcctcactcggcctcccaaagtgctgggattacaggtgtgagccactgcgcctggcctgtgatgaatatatttcttaataacattgttcacatttttaaaactttttctatgattaaacatatctcacttagggaattgtgaaaatacagaaaacgaaagaaaaccttttggcattttccttggcgcttttttctcttcttgttacaggattgcatgcatgctttatgtacatatacagctttgcgtcaaggtctttttccttcatcataaaattattttttagtatatttcctatttttacttagtttcttttcatagattctcagaattgaaactattgagtcaaagagtatatgaagagtttttacacttgtggtgcatgtaaccaaactacctacttgaaggttataccaattgtttactcttcccctctcattagtagaatttgagacctattatctactgcaccccttgccagcctttaatatactcatcttttcagtttttctgtagtactcatgcttttttaaaacgtcattgagatttttcaaacacacataaaaaagaaaaaattagtataataaacttccatttatctatcaccaacttttaataattaacattttgtgtttctcaatgctgacaaattttaaagccgatccataacagcaaaatatttttccccaaaccctattgtaaacatctctaaaatcttatttcttacagagccttattcgataatcatacctaagaaaactaacaataattatttaatatgtaattttcagtctttcctcatcacgtaaaatggcttcttaaccattggtttgtttgacttaagagccaacaagggttaccacttggttgctttatagtgtgcactttggctcgcatcgctcagaaatgtcaggcatgggaattgcacattacccgacaggtagagttgaaaatgaaatatgccatgaaatgacatatttgagaacttctcacagagtatgaacaatgatgtctgccttttgaagcagtaatctaagtacttttgtactttcacttctttcttccaaatatattcattatgttccaaatgtataaagaacctaaagtaggaggtcaaacatcctgtgttagaacatttgcagacttgacacgtggagaagagggtgcatttttatatgaatttgagaaatactaacataaactaagcaaaaggaggaatttttgtaatacagataatgtattggatataaaaatatttccagaattttattttttaatttcgaagcaactctaaaatgcaactgtacattctctcttgacgtcagactttactagcttataataagttgtctatggtatttagttttcactctaacagctatgtactgtaagtttataatctacattgatgccttttctgctgtcatttaggttatttcagacacgcctcactgaaacccatttgccagctcaaggtaaaatcaggctttctaaaatgcctgttgttgtccatttagtcttggatttgtactagtattttcttttctttaaaaaacaaacccggctgggcatggtggctcacacctgtaatcccagcactttgggaggccaagatgggtgcatcacctggggtcaggagttcgagaccagcctggccaacatggtgaaaccccatctctactaaaatacaaaaattagccaggtgtggtggtgggcatctgtagtcctggctactcaggaggctgaggcaggagaattgcttgagcccgggaggcagaggttgcagtgagctgaaatcatgccacttcattccagcccgggcgacagagtgagactccgtctccacaaaaaaaaaaaaaaaaaaaaaaaaaaacccatccaatttttaatgaaaaccaaattgcactctcaggtaacagagaaagcattctgatcatcataatgcccactaaatagccccaaagagcagaggctttgtcttagcattttaaaagctcaaacctgcaaaaaaaaaattgataatttcactgtatttgtaggatttttttttaattcaaaattgaccaaaatacttaatctggactccatctattttgaatggaatcaaatgtgtttaatgcaacttttaaagaaatacagccatttctttttcttagaactaagtatcacatttcagcaataagcattgcctatcctatctggttgtttaaaattattagttaggttttacatttcttttgggtacttcctggcatgttgagttgatcagaaaattgtataatacttattttaaaaacgttttagttgaaatttctgagacagtgtgaatgagttgatttacttcttatgattcctactggaaggatcaggggaatttattatgtgataattttacttacggttttacccttaatttctccgtattttatcctcttttccctcatagctagaacctcagaacctctgcataatgttcaggttttaaatcaaatgataacatcaaaatcaaatccaggaaataacatggcctgcatttctaagaatcaggtaataatgacatttgtagcttgtgtggaaactgggaatggtattgaatggccagcctggctgccttctacatccactttgacatctcatttctttgatctttctcttcatggctctgagctccatgtcagccacctgctcctgtggcaacttcctgggcctgttattctcccacacagctcacctcaaatacaatttgttgtctaacccagaggccctcaccacacggcctcctgtctttactctccccaccagcttttcccttaccaatgtcctttcctctgttctgctggcctctgcataggctctggaaatccctactgggaatggatccacctgggggcttctgagcctggctttcaaaactcagagcctcaaagattgctgcctgttacctcaagtaacagggaggtctcatactcccaggcaatgggtcatactcccaggcaatgggacatgcttccagtgtctgattcactctttatgttttgtgtatctcttatgtttccaggttcactctagcgccaaactatagtgattttagacttcttttcagtctcttcaaacttgggacctcgctacctctagcctctctctcaggaacttcaaaaatactatttcaacagatagcagatgccatcaagtgacatctatcagttttctgccaccaaccaataaatgtaactgcatccttccctgtgagaaaaggtggccttctatctgtgcttgtccttatcctcatcaaggtttttgccctgtggagatctcttctgcctccatggtgtatcaacatgggaaaatgctcaagtctctcttcttccctcagcctcatgtttcccaactatgtttcccatgttaccctccacagtacaactttctttcaaagttcatcaaggacctccttgaagcaaaagccaatggaaacgcctgtgtgcttagggtgtatgtacaggtttcattaatgtaatacattcttagaagtagaatatgcgctcctgactttgacaggtagtgcagcttgtcccaatttacattttacgtcctacacatgcttgccaccctcctgaccacctattgtcctgtctaagctccagacagtagagatgggtcttgattgcagtcacatttcccagacctagctcagagtgtgacatggaggtgtctggcaaatatttgtttagtgaaggaatttgagaactcttgagggcagagtagtacctgaggaaaattttaattaaaaaaaaaattagcagcagttgggaatgtcaatcccataatgttcagacactatactctagctactagactatgaattgaagggaaatcagctatggttcttctctactgctgagtaggactttattaaaaacaaaacaacaaccaaaaaaacctctttctttgattagattaagttacaatagttattgtaaggttgttgatacaaacaatcttttgatattaatcataatttaaaattacataaatctacttgggattaaggtccctcttcccctcaagcattttcatattgttttgtgaagtaatttgggtgaagctttcttctcagataagtgaatgctcatgtttgttttctgttttttagggttcagagctttctggagtgatatcttcagcttgtgataaagagtcaaatatgcaagtataatcagtgcattaatctattattagtttcctttaagtgctcttaggtacattgttgtaaataatgtattttcccccattgtagggaacgaagagtgatcacgatttctaaatcagaatattctgtgcactcatctttggcatccaaagttgatgttgagcaggttgttatgtattgcaaggagaagcttattcgtggggaatcagaattttcctttgaagaattgagagcccagaaatacaatcaacggagaaagcatgagcaatggggtacttgcaatcttgtatttttagttattcttatgtcacataaaaaaatcctcatctctgagtaattacttttttaaagaataattgactatgttgaaagactgcaagaaagtcttcatctcatcctatcagaagcccagaaatcattattaacccattttgcgtttgccccgagaaaactgcgctggcagcaagctgcactttttttttctgaattggaaattgcttaaccactagtgtagcagccaagttagtccaaggactaaattgatgtcttggcagcaaactcatagttgaaagagtactaaattagatatccataccagtgtcatcttagctttagtgaaataaatatttaaaaatttttcagtattatctgtatatagtaattctaaacctctaggtcagttatttgaacctttattccactcaggacttttatactatctaagttatttgggctatagccattctgggcctttcttttctgttcattacttttcatactcggttgacaacagagaagacaagtcagttaacacagaggactcattttgtgctgggcatagatgtgtttttctttcacatgctgtgaccagaagttttaagccagactctttgacttgcctgtggcatgactctgttaaccagttgttggaaatgggactgaccacagcatgcttgaagccctgatcatttagtgcagttcacttctacttagaaagtctctagaaatttttatcttataaaaacaaataaaaatttattttaaaatgatttgcacaatcatgattgtttacaagaacagtcatgtatatgatggctacaaaaatctttactattatactgtgctattattattatttttgatcagcatgtagtttttttttttttttagtaatttacatgtcctaaacatgtagtagccaagctgtgggcaggtaaaaattaaaaggtaatacaagtttcacttctaaaaccaaatatgagaaagactaataaaaaaatcggccccctaaaatataaccctttcctcattttgcatgtattcctatgatgacctggatttaaattttgcatgcaaaccatttctatctttcctaaagtaaatgaagacagacattatatgaaaaggaaagaagcaaatgcttttgaagaacagctattaaaacagaaaatggatgaacttcataagaagttgcatcaggtggtggagacatcccatgaggatctgcccgcttcccaggaaaggtccgaggtatgttgtgctcctcatgacacatcctgtgcccagcagcaggaatggcagtttgatttgttcctttctatgtgctgttttagagttaattctgatgttaatttagctagtaactttctgaaagtctaaaataatttgacatagacgttcacaatgtagagtgagagtggaaagttacaaaacagaatggtagtatgttttacatgtttgtgtatgtgtacatgtctatatattcatgtatttatatatagacctttttctggtttttgtacagtgactattgtgtaatgaaaattggagtatagtactctcaataatttatcatttagatatattttttgtttgccattatttcatcttggaaaagcagagaagtgatgagtgtgttagagccacatatattttcttaaaattagtagtgaatgaaggagattggaaataaactcatttaaactgtataatggttgcttaatctttcatattatatgtttgtctatgacataggatacgatgaagataaaatactttattttcttacatatttggaaagtataaaaatatgtgactagatggttttttaaaatatcacatgaaaggtgtgtatatatgtatatatgaaggagagcattcatttgtatatatgtatgtatgtatgcatacacacacacacacacacacacacacacacaaacattctttttcttttttttttaatttttagacggggtcttgctctgtcacccatgctagagtgcagtggtatgataactgttcattgtatcctccttagtagctgcaaccacaggcatgtgccaccacacccacctaattttttattttatttttatagagatggggtctcgccatgttgcccagcctggtgtcaaactcctgggctcaagcgatcctcttgcctcagcctcccaaagtgttgtgattacaggtgtgagccaccacgtctggtctgaatgttctcctttattgctaactgctatagtttgtatttttccagacttattgtgtatgaaaacacataaatatgaatacaatagaacgttctacataaataagacttattttctgctttttctacctaacacctctgatagatctttcactgctattgcatagatatctaactaattctacttgcagcatagtcttctgtcataccttataaaagggagtgtatcatgtagaaactgttagaaatcatgctacctttcaagtgtatgtacctaaaatgctgtcagtctgccctctataaacttcggactgtgcactcacattaacagtgtgtaaaaggacttgtttcttgtacacatttggctaacattaactatactaaatcttttcaagcacctgatgtagtttctttaattataggtagatttggacattttttggatacatttcgtggctgtttaacttctttcctttaaattgactgaatggctttgtccatttttctattgagtcatttcattttttttctgatttgtttggatttctttttgtataatttatattttccctggatagttgcaagaaattgttaataaattgttctccctggctcctttcctgtggtatatccctggttcccatgtcgttatctctccttactgtcctcatttcgaaggcacactttctccagtagcttatttaaaaaaaaaaaaaaaaaaggcaacagcagcatgtttgaggggttagtttttgaggtctcttgcatgtctaaaagcatctttattttaccgtcacatttggttgataatttggttgggcacaatgttctaggagggaacttacattccctcagagtttttaaagacactccttcattgttttttggcttgcgctattggtgtggaaaaacccagagtccttctgattgttggttctttgatgtgatgtttgtttttctctagaggggtgtagaatcatttttccctgctgtattgtgacatagtgatgtatctggtatttatcttttcatccattatacttagtgcttaaatgttctagttttgcaattctggggaattttcttgatatatattttcagaggtggatattttttcctcatactctctgttaggctatcctggactggtcatttaattttcttaaatttcaccattttctatctttgtccttttttccccctaattttctttgagattgccttaatttttatggccatcttattaaattctttttttttttttttttttgagatggagtctcactgtctcccaggctggagggcagtggcatggtctcaactcactgcaagctccgcctcccgggttcacgccattctcctgcctcagcctcctgagtagctgggactacaggcgcctgccaccatgcctggctaattttttttgtatttttagtagagacagggtttcaccgtgttaccaggatggtcttgatctcctgacctcgtgatccgcccaccttggccccccaaagtgttgggattacaggcttgagccacagtgcccggccagcatctgcttttaaacagaattttacaatgttcctatcttcacctccaccttcacttccattctgaggtgtagctagcattgtagatttctgaacttgtctagcaattagggacacaccgctcctagcctccttcaacagctatgtgaagtgttagaattccttcactgtcatgttggtgagatttttggagtatatcaagccactgtctttaactagaagcctccctttttcaaacttctctgtatgaatagcatcaggatatattttccaagtagattgcctgttgtctgtaaatcatttattgatctgctcagcctttccccattgatttaaaatatctttaccatgtactaaattttcatatatacaagatccaattctaaaatatctatacctttgctttagtcagtagatctcttcttgatcatttcataggtgtatttactacaactttctttttttttgagacggaatctcccactatcgcccaggctggagtgcagtggtgcaatctccgctcactgcaacctccgcttcctgggttcaagtaattctcctgcctcagcctcctgagcagctgggattacaggcgcccgccaccatgcccagctaattttttctatttttaataaagatgaggtttcactatgttggccaggctgatcgtgaactcctgaccttgtgatccacctacctcggcctccaactttcttatgtgttttggtgtctggtggagaaaatctctggtattgttcagaatatttcttcagaattgaatattatgatgatttttaatctttactaatttggtaggtgagaaaatggtgtaggttatcatttttgctgacgaatgaggatgaggtttttatatttttttccattagtctgtaaaataactattcttgccctagacatttggtagtgtgtgtttgtttgtgttttgaggcaggggctcactctgtcatctaggctggaatgcagtggtgcaatctcagctcactgcagcctcctcctcccaggctcaagtgatcctcccacctcagcttcctgagtagctgggactacagacacatgcttccatgtccagctaatttcttgtatttttttgtagagacagggttttgccatgttgcctagcctggtctcaaactcttgagctcaagcaaaccaccagcctcggtctcccaaagttctgggattgattacaggcttgagccacccatgcctggctggtgtttttcttaacaatttataagcatacttttatatggtgagaaattaactcatctaactttgtaacactaaagcatacaattacagtcttacactgatgtgagtagcaaagcaaagattttaaatttagagcttgttatgcttcctgttgtgagacaggcttttgtggcagttattattgcaatttatatttgtgtttcctattcttcaaagtgaaaacggctatgaaaagtattttatttatttatttttttccctttttcaagccctatctcatataccaatctaagggtattttaatgggaggaaaaccgtaatgagcttttgataacactgatttgtcgaccttttcccaaaattaagtaaagagaaataagataatacttaaatgctgatacaactatagagacttgttatttcagtggttagaaattataagctgctgatggtgtctgtggttcagaagctacaaagcatccattttgtagagtggtctttttgttgttgactgtacatttcagaatgcttgaagaaggagtatggggaaacttcaaggaaaaaggaatccattgaagacagatgccatgctttgagaagatgtaatgcctgattagtagtattctggacttcatggttttgtttttgttgtttgtttgtttaatatgaaaggttaatccagcacgtatggggccaagtgtaggctcccagcaggaactgagagcgccatgtcttccagtaacctatcagcagacaccagtgaacatggaaaagaacccaagagaggcacctcctgttgttcctcctttggcaaatgctatttctgcagctttggtgtccccagccaccagccagagcattgctcctcctgttcctttgaaagcccagacagtaacagactccatgtttgcagtggccagcaaagatgctgggtaagctgaaggtagtcctagagatcacagtgatgtgagtggcacctgtcaccttctttacatgacctgcattatcaggaacagtatgtaaaagatgaatgatgtctgccttttatttttagataggtatgttgttgaaaaagcaagtggcaaaacattgctcccaatcctttaggcttacttattccatgcttcttttagaatatttattttatactttcgtgaattaaaaattttcagtacctgaaagtcaacagtcactttgtaactgaagaatatacagctgttaggctaaaattccctttgctcactggctttgattgaatacctacagggatcataactgtctagacaattacttgacatgtgttctcatattccttctgtcttcccatagagagcagtttgggattaatacacatgattctgtctctcaaaatgtacctctgcactggaagtttttaccccaattttgagggatttttccagatttcagaaattatagttaatgtcatatcactcgtttaagttacatttttacctccagtcattttggctctcttttagctcgtttttatagggatttgtaaaattaaaaatgctttgcatgttttactttataccttaacagggtttattaagggaactccagcaatgttaaatagacatgttagatccactaccccaagtgcacttaaagtgtgatataaatggcttgtgtgtcatttttttctttcttgataaccattacttttaaatgctagaggacattgcactgtggctgctggcttatcacagcaaaggtatcctgcacagctgaggcgcaccagtgcttctccacgtcctgactctggttagctgcctggagccgggctcaactctttaacctctgtaatgaatgggatcatttgaatagtcataggactctaccacatatagagatggttcttatccctgtaatccctgtgtcacacaaatgtttagtacctggtcttttctgtaagaattcttttcctgaaatggaactgaaaggaaaaaaaaaacagtttatttactaacactgtagaccctaagtagttccatctgtattttaacaggcttgtaattattgactgattcttttttctttctactattatttcttgagagtcagttaaaaattctaatagatcaagcatttttttgttttgttttttttttgttttgagatggagtctcgctcttgttgcccaggctggagtgcaatggtgcgatcttggctcactgcaacctctgcctcctgggttcaagtgattctcctgcctcagcctcccaagtagctgggattacaggtgcctgccagcacaccccgctaatgtttttttgtatttttagtagagaaggggtttcaccatattggccaggctggtctcgaacttctgacctcaggtgatcctcccgcctcggcctcccaaagtgctgggattacaggcgtgagccaccaccgcacccagcctagatcaagcattttattctctagtgtgtctcaagagttttctcttccagatgtgtgaataagagtactcatgaattcaagccacagagtggagcagagatcaaagaaggtaatgtttaattataataaatgtgtttctgtccagattcctctgtatcactcagaggtgtattttgtggctgtggtttatgaaggcttcaggccttaatgaacctgagtgttagatttcctattcttagagtataggttatttatccctgaaccatttcaaataaatgtagaaatccacttgttagtctcatcttctttaacattctttggaaatgtaatttgtgaatacatttctagtaaatttctcaggaaattaatccaaaacagagtcatctttagtatgttaggtaggaaaggttatcaaaagtttaattaggagtgttacactgttattcggtactactttgttagaggcatttgcataggagataagtcttataaataataagatgcacaggttgggctttcacttctccgctgtgtgactgggacattttttttctggacagtttggtgaggaggagggctgtttgaaatagctggaggttcattaactgaaccaagacttactgagcctgctctgtaggtgccaggcactgttatacatagttagggatgaagtcatgaacaaaaaatctccacccacacagagggggaaagaaatgtactattggagttatggggttgaaatttcagtcaaggtgatatttgggtaaagggctaaagttagggagctaccatgccattagcttgggcaacttttcagacagagggaatattaagtgctaagccctcaagcaggaaaatctctgatatattctaagcacagcaaagggaccaatgtggggaggtaagcagggagaggaggaaggtgaggcctgaccaaacaggacccaggctgtgcagggccttgtattctatgcctgactgcagtggaatgagatgggaagccaatcttaagatttacattgtgactatgaacttgggatacagtggcactaagggtataatttatgacaaagttgctaatctggtataatccagaccaaccactcaatctctctcagccttcatttccttttctgtaaaaggataattttcacctcatttacttcataggactattataaagataaaaatgaaatatatgaaagcactataatactggaaattcttagtgataatttttaacaatgacaaactgttttaattgtaacttacttaaattgtgtgtcttttaagttattctgatttccctactgataccacattttgtctccatttctttgctagggtgtgaaacacataaggttgccaacacaagttcttttcacacaactccaaacacatcactgggaatggttcaggcaacgccatccaaagtgcagccatcacccaccgtgcacacaaaagaagcattaggtaaagtattttatctgagtgtgtagcacctgatgacaagttaatgaaagctcttttgcaacctgtttacaattattctttttgttctttaaggtttcatcatgaatatgtttcaggctcctacacttcctgatatttctgatgacaaagatgaatggcaatctctagatcaaaatgaagatgcatttgaagcccagtttcaaagtaataactatttaaaagctactaagtgcatagcattataggtggttatcacagaaaatatcaagaattatttaagaggtgaccctgcccttgattagcttgtcacataaaggcagggaatgcatgaaataaaaataagacagttcttgacaaggtactcaatgtgtgtgatagatttgcttgattaaagggaaaaaaaaaaaaagaatagtgctaaagaaggacaaaacccccatggataagaagggctgagtactcaaggtgtgacttgagccttcactggtagaggaatggctggggcagagtattagaggaggctggcagctagcccacatttgtctagagtcaggggattcatgctagaagccagagatcatgataaagataagtagaagccaattagactcaggaggacttgaaatgtaaagctaagagcttaattctttcttgaaggaaatggaaaacgaaaccctgagagcgtttattgagtgagtcaggtgacaatagtactgatttaggagaatgattaacaccttgctgatatgtggcagggactcgtgacctgggacttgagtacaaaaccctgttaccatagttaagtcacttcatctcactatagtgacttactgcctagtatttgaaaagctgatattagttcttttctgtcagctgttagtcctttttcttatttgtagttgaagtttaatataaaggatgttttttcctagtacaataattagatgctattttttattctgttgcagaaaatgtaaggtcatctggggcttggggagtcaataagatcatctcttctttgtcatctgcttttcatgtgtttgaagatggaaacaaagaaaattatgggtaaaaaaataccatctagttaatgggatgctgccgagttttctctgggaccagaggtggtggggtggtgaggagagaatgtgaactgccaatcacatggtcaaatgagccttttgaccacacaaccaggggggtgttgccaaagttctccagatttacagtactgcaggaattcatttttggcttctaaaagttatgtgacagaaatttctgtacttcccaccctcaagtaatgataggtctacttttataagtcatgttaatttgattacactcagttttgctagaactgctataaaagcaaggaatatctatataaagattaactcattaaataggataagtagagaacttttctaatggtcaagtgatagcatttatttccttagcatattttactatttataatttagcaaatctttccttagattaccacagcctaaaaataaacccacaggagccaggacctttggagaacgctctgtcagcagacttccttcaaaaccaaaggtaaacaaacctgttttatctatgaaatgggtcctacaacccatccgctttattctaccaaatgattatgccagtcagaggatattgtgtatgtgaaactatgctaaaaactatgaaacataggaagaatatgtttcttttaggacattatttaataattattcaagaagaaacagggtatgtgcatattttccaagtgtcctaccaaaattatttattaatattcattactgtggtggtttcacatttatccacaaattctttgaatttttttcctccagtttaattcatctccttttgagtgtggctagatttggtgacttgcttcagacaaaaagcaaagggaaagggaaaattagattacagtagggaaacatgggagattctgcctaatcaagtgattgggttaaccaggaataagtcatgttgacagcagatatcccctaatatgatgtaatgagaagaacatttcacctctgatatccttcccaaaaatctgtaaccccagtctaatcatgagaaaacatcaaataagcccaaactgtgtagggacattctacggagtttctgactagtgttcaaaagtgtcagtacaaaaaagactcggaaaggccaatagacaatgacagactcaaggaggctaagaacacttgagaactaaaggtgacatgggatcctggattggatccctgaacagaggaggcacattagtgggaaaaaaaaggtgaaatccaaactacagttaatagtactatttcatttttacaaatgtgccacagttctataagaagttgacattagaggaagcttggtgaggagggtatgtggaaattctgtgctatctttgtaactcttctgtaaatcacaactttttcaaattaaaaaatatatatataatttgaaaacaaaaatgtggctcttgctgtaatgtaactccactgattttccagttctggggaaaagaactgaaccatgatattgtgggctgtattagccaggggttgacatctgtttcttctttaatcctcatttctttggatcttaaagtgttattgaataaggtttcatggactaaagagggagattgctgcttttttttcatttcatcttctgttataggaggaagtgcctcatgctgaagagtttttggatgactcaactgtatggggtattcgctgcaacaaaaccctggcacccagtcctaagagcccaggagacttcacatctgctgcacaacttgcgtctacaccattccacaagcttccagtggagtcagtgcacattttagaagataaaggtgtgtgttacactgttttagtgtctgtcttctgccaactttgattctttcagttttcttcatgaagtttgattcttgtagttttcttcatggaaattccacatgggaactttgaaaatcataaagaagaaacttaaaatctgttcattgtatttttgttcataggtttttttttcctttggcatattgtcttcctaaagtctatgtatttttaaaatataatagcttagattataggtagaatgggagaaaatctatagaagcatttaaaggaaataaggtccaacccatttgtatagatagagcatgtttattttgtttcatagcaaacaaaacagccactacagacattaaattatttgaatgctaaaaataatgaacatttatattttctaatttaataagagtaacagccaattttagtcctagatgtgtgtctacacacatatatgtcaactttattagacatagccaagtacgatagtcagaaagtcttatttttcctacttttagtgatctgactttaagaaagtaatgataaaactcacaagtagtccttatttctaccgtttcaaatctatcaccctatatatttaaaaattcatcatatatctgaattgaatcctaacatatgacattgtcattgagcacagataattgttaactattaagtaccaacctacaaactagacagtcctcttggtatccacagaggattggttccaggaacccctgcagataccaaaatccaggtggatgctcaagttccatagttgaccctgcagaacttgtggatatggaacctgtgaatacagagggctgactgtatactaactatcattgctcacgcttttaaaatatagcaattgtttaccaaagcaataatagaagagctgccaaagaatttcacttcattggatgaaagcatattttaatgtgggttctgagcctatagacctaaacatttttgaccaaggatttcttagagtgctaatccaatataataaatttcttttctgaatcttaaaggagaggtcagttgaaactttgacaattgccaagcaccatcacaagcttgcttttaattaaaaaaaaaaaaaaaaaagattaaagccttttccatccaggaaaagtagtttaatgagtctaaagaatccttcaaaaagtcaatattggctattcttaagagtatttggcactttggctcgataaacaaaaactaatgttctagtgctaaaaagtagtaacacctgttcagtgaaggagtatctgataaaatgtaatccaatatacttggctgtgtgcagtattataatcacttggtagaaatttattctgtatttctgttcttcctagtttacctatctatagatagattttttttttaattatggagagtaataaatattgccaggttgctttctgatttaaacacaaaatcgtttcaataaattaaatgctaatttagtcaatcaactaattgactacaacatgttaaagtgaaaaacccaaaatctctgccctccagaagcattgtagccttttactctccatgttcttgtcttcaggttctcctgaagctgggtgtagccctgccatccgtaccagtaacttcccatggtctggtcatcctgcccacaatggacttgccactctctcgaccccttttttcttgaaggattataggaattagatgtagagttgaaatgctcacatatattagtagtagattttatttgtttgtttgtttttaagagatacggtcttgctatgttgcccaggctgagtgcagtgcagcctcaaactcctgggctcaagtgatcctcctacctcagcctcttgagtagctagggctacaggctcctaccaccacatctggttaattttaaaaagttattttagggatagggtctcactatgttgctcagccttgcctcaaactactggcctcaagtgatcctcccacctcagcctcccaaagcactgggatataggcatgagccactgtgcctggccagtagtggatttttttaaagtgattttttcctcccatttttttaatcttattatacattttacaatggaacactattttgaaatcataatgcaagtcagtgtcaaaagaaatcctagactttgtaaccatatcaaatggtgtgtgttgtgcacacatgtgcatctaacatatcttgtctctaatttttgaatctttcagaaaatgtggtagcaaaacagtgtacccaggcgactttggattcttgtgaggaaaacatggtggtgccttcaagggatggaaaattcaggtattgtgagggtttatttggttctgccattctcttcattttcattctaacattgtttaccattttcattctagctttgccttttaggctgtaatagaatacctaattttagccttaaaggccaataaagattttatggactagtagctttaagtcagaaggtactctccgtgaatatacatacaacagtgaacctaagcacttgatacatcaggccggtgcttgatgagaaaacatcagagaaacccaaattgaaggacattctccagaatacctggccagtactcctcaaaactgtcaaggtcttgggaaactaagaaagactaagaaactgtcacagatgaaagaagagtaaagagacatagcaactaaatgcaacctggtacccaggactagatcctgaagcagaagttccttagtgaaaagagtggtgaaattgaatgatgtctacagtttagttaatagtaatggaacaaatgttggtttattagttttgacaaaggtaccattgtaataggaaaggataatcttagcagaaattgagtgaggagtatacaggaattctctattatctttgcaacatttctttatacctaaaattattacaaagaaagtatagttgaaaaaagtttacaacggaaaaatgtgacaagtgaaaatagcagtgtatgaaattgcatgtataaatttatttgtataaaaatacatacttcagtatgtttaggtagatattgattgggggtgtatgtggagatatatgtgcagtcagttctcattattcactataattctatagagtcaccacaaacactgaattagtgaataccgaatattcttaaggggaatacagacagcaatccttcaagcctctaataacaacattttgttaaaaaacaccttatttattatatattgtcaattcattaacattgaatttatgtccagcaacactgacttacatctaaataaagcttatctaatacacatattttcacaggtttctagtgcttaggaacattagagagcacttcagcactatactttgggaccattttcaataccaaaatcaccaagaaaaagcacaaagacacaaaaattgtgacactaagtacagctcgaaaaggatacttgtttgcagtatgagagctggaaccggaaggctgagtgtcaccttgttcaaccttagctcagaacatgtatgttaggtggctcaatttttcatcactctgcgttctgtaaatgactgaaaaatcactatgagtattgatttgaagcttacaaataaattttagcatgcaggtgaattcacaaatatgaaatccattaataataaggatcaactgtatactgtgtgtgtgtgtgtgtgtgtgtgtgtgtatggatgtatatgtatacatatacttccatgtacagtcatgcagttgcttaacaactgggatactttctgagaaatgtgtctttaggcagtttcattgttacatgaacatcagagtgtatttacatgaacttagatggtttgattagtttactacacacctaggctatatggtataacctgtggctcataggctaaaaacatgtacagcatgttattgtattgaatactataggcaatggcaacagagtggtgtaagaatttgtgtatgtaaacatagagaagatatagtaaaaatacagtgtaaaagataaaaaatggtgttctgtatagggcacttcccatgaatggagcttgcaggactgaagttgctctgggtgggtcagtgagtgagtgagtggtgagtgaacgtgagggcctaggacattactgtgcactgctgtagacttcagaaacactatagttaggttacactaaacttataagaaaaatttttcttcagtaataaattagccttagcttactgtgagctttttactttataaacttaaaaagttttatctttttgacttttgtaacaacacttagcttaaaaaacaaacacattgtacaactatacaaaaatattttttctttatatcattctataagcattaaaaaaattttttttttcactttttaaacttttttgttaaaaacgaccacacaaacatacacattagctgaggcctacacacccagggtcaggatcatcagacatcactaggagactggaggttttcggctccattatgatcctatggggccaccattgcatatgctgtcctctgaattgttgttatgcagcacatgactatatatatggaagtgtactggagtgttgtattgtgattgacattttctgtttgtttcaatgttataaaagcagccatttttggaataaagttaaatattcagtcttgatgatagtagtgtcgcatagatgcagcttggagaaataaacccactcctgacatttcctactaaagaatatcccatgtattacctcacctatttatctaatataaccatatcttgattttattatttctgttcatattgtactagctgtatattttcatagatttgtttgtctaaaaatgctttaatcaacttttagtctgtgaggctattgtgaaatgtcatttctagaatgagaagggaatttcatgtgactgaatccaacagatttctaatcatgtggtgttttggtttctttattcctttcacacgtccagtccaattcaagagaaaagcccaaaacaggccttgtcgtctcacatgtattcagcatccttacttcgtctgagccagcctgctgcaggtggggtacttacctgtgaggcagagttgggcgttgaggcttgcagactcacagacactgacgctgccattgcagaagatccaccagatgctattgctgggctccaagcagaatggatgcagatgagttcacttgggactgttgatgctccaagtacgaacactcactctttgttatgcccttgaatcaggacaggagcatggggaaagctgtcccatgaaagaaacccacagtgggacttgaatgtcactgagtagaacagatgtcagtgagttcagatgaaacttgcataatgcatcacaatggagtaacagtagcatacttgaagggcaaatcaattttaattttagaaggtatcaaaataactactgttggaagagggaattagaatttgacagcctactacgtgccaggcttttaatctaatactattatattttacattttacagaagtaaactgaggctgaaggttaaagagacacccccccccgcccacccccttgttacacataaacagtctggcatagtggttaagagcacagagtctggagatggactgactatgttctaatcctagctccctcacctaagtagtcacgtgatcttgaccaagatcatttcaattttccatatccctcttttctgtagagttgagctgatgctagtacctaccttagaggcttattgtaagaaccaagtaaattaataaagcactgagaacagtgttctgcatgtgcttagcgctgagtgagtgttaaccatgttggattagtatttgataactgccactaatataattttttgtaacattccaggttggagagaaagctttttcttacttttagaaattatttctcttttgtggacccaaagtatatctcatatatgcaaattgcacataggtagtataagttttgtggatataagtggaaaagaaattaaataatatgtgtctatctgcgcacattagaagtaactaatgtccacatctgcccttaagacatgtatccctaattgtgttaaagatagaatctagccgttccagttgagtggagcaaatgcacctagagttgattccctttgtcacaactaaatattgatccaaatttgtagatctaaaatggcaaataataaactgtgcagagctaccaattttgacttttaaaaatagttcttttttattttgaattaatactcttataaggctttgaaagcttacttagtaaatatctctactcactttgtctataatttatttggtaaagttcttgagtactcaattcatgttccctttttttttttttttctcattcctttaagacttcattgttgggaacccatgggatgataagctgattttcaaacttttatctgggctttctaaaccagtgagttcctatccaaatacttttgaatggcaatgtaaacttccagccatcaagcccaagactgaatttcaattgggtaagaattatttggataatataactttaaattcttgtttctctatgagaagttgatggtaacgtgtgtgtgtgtgtgtgtgtgtgattctcctatttgccccccaacctccaatagggagttgtatctgtaatactaaactgatcattttgttaagccatgattgtaggattgtgcttgctgttgggactataactcctataactcatagagggcaatttgccaatatctattaaaattaaaaatgcatttacttttaaagccagctatccacttttaaggatttcctatagatattattatatacttctatagtaaaatactatagtaacattggcaacagaacaagaaagctcactctgtactgatagggaatgagctccaaaacataccatactgttaaaagggcagagccgtatgtattatatgccacaattaaaacagttagctgtaggtgggagtgggaaacaatggtagcaagacttcacaatattcccttttaagttttttaatgaatagactttatttttaagagaagttttaagcttacagaaaaattcagcataaagtacatattcctacctccccatatatacacacacagattttcgtgttactaacatcttgcatgagtgtggtacatttgttaaaattaagccaatgttgatgcattattaattgaagtgctagtttacattagggttcactctttgggttgtatatcctgtggggttttttacgaatgtagtacagtgacatgtatccatcattacagtatcatacagaatcatttcctcaccctaaaaatcccctgtgcctcacctattcatcccttcctccttgtcccccaacgcctggcaaccactgattgttttgctgtctgtgtagttttgccttttccataatgtcatatagttggaatcatatagtatatagccttttcaactggcatcttttacttagcaatatgcatttaaggttcccttgtgtcatttcatgatttgatagcttttttttttttatcactgaataatgtttagtgcatgaatgtaccacaccgttaaacctttccactcatctaatgaaagagatcttggttacttccaagttttggcaattatgaataaagttgctgtaaacatctgtgtgcaagtttttgtgtggacataagttttcaactcataatttgggtaaataccaaggagtgtaattgcagggttatatgatgagagtatgtttacttttgtaagaaacttccaaagtgactgtaccatttagcattcccaccaacagtgaataagaattcctgttccccagtcttgccctcattaggtggttgtcagcgttttgggttttagccattctgatacgtgaacagtgatatctcaatcttgtttgaagtttcaattacctgaagacatactgtgttgaatattttttcatatgcttatttgccatcagtatatcttcagtgagatgtctatccagatcttttgtccattttctaattggttggttggtttcttatcattgccttgttcctgatcttagggggaaagcatctacatagtttattacctataagtatgattttagctgtaggttttttgtaaatgttctttgtcaagttaagaaagtatctctctattcctagtttgctgagagggttttttttttaatcataagtgggtgttggattttatttatcgtgctcctttcaatattttctgcatttattgatatgattatatgattctttgttgatgtgatggatttcattaattgaaattaattaattaagtgttgaactagccttgtatacctgggataaattgcacttggttgttatagtgtataattctttttctacattgttggattggatttacttataattctttttacacattgttggattggatttactaatattttgctgaagatgtttgtatccgtgttcatgagaggtactggtctatagttttcctttcttgtaatatctttatctggtcttggtgtcagggaaatgctggccccttagagccccttaggatgagataggaagtattccctctgcttctttcatctgcgagagattgttgagaatggatataatttgttcctcaaatgtttgacagaattcactagtgaacccatctgagcctagtgcttcccgttttggaaggttatcaattactgattccatttctttaacagatataggactgttcagattatctatttctcttttgtgggctttggtagattgcgtctttcaaggaatttgttcatttcatctcaattctcatttgtggatatggcattccactattgatttctactgtaatgtttatttcttttattctgcttactttagttttaatttgctcttttttctagtttcttaaggtagaatctcattgatttttagatcttcttttctaatatatgtatttagtgctacaaattttcctttactgcgtcccacaaattttggtaaattgtatttccattttcatttggttcaaaatatttttaaatttctcttgagacttctttgaccaatgtggtattcagaagtatgtttaatctccaagtatttgggggactttacctttcatactgtgtatgatttctgttcttttaaatttggtaaaatgttttatggcccagaatgttgtctattttggtgaatattccatgtgagcttgagaagaatgtatattctgctgttattcgatgaagtattccataaatgtcaattagatccaattgattgatgctaccattcagttcaaccatgtttttactgctgatttcctgcctgctttatctgccccttcccgtccctccctgtcccgcccctcccctcccctccccttcttttctttctgtgttgaaacagggtatcactctgtcatccagactagggtgcagtggcacaatcttggctcactgcaacctcaaaatcctggattcaagcaatcctttggccccagcttcctgagtagttaggactacagtcatgcaccacaacatgcagcttttttttttttttttttttttgggtagagatagggttctcgctatgttgcccaggtctcgaacttctgacctcaatccatctttctgtcttggcctcccaaagtgctgggattacaggtgtgagccaccacacccagttgatctgtccatttctgatggaagggtgttgaagtctccaactataatagtgaattcatctttttctccttgtagttgtattagttttcggtaacttttgactcacatattttgacactctcttgttaggcttatacacattatgtcttcttggagaattaatccctttaacattatataatgcaggccaggcacagttactcacacctgtaatccagcactttgggagccaaggcaataggatcagctgaggccaggagtttgagacaagtctggacaatgcattgaggccttgtctctacaaatatttttttaaaaaaattaaccaggcatggcaacacgtgcctgtaagtcccagctacttgggaggctgaggctggaggatcacttatgcagaggagttcagattagccagggaacatagcaagaccttgtcttacacacacacacacacacacacacacatacacgtaacgccattttctatgctgataattgttttgctctgaagtctgctctgtcagaaatgaatatagctattattacattttcttttattagtgttagcatggtatgtctttttctatccctttacttttttttttttttgagaaggagtctcgctctatcacccaggctggagtgtagtgccgtagtactatgatcttggctcattgccacctccgcctcccaggttcaagtgattttcctgtctcagcctcctgagtagctgggactacaggcgcacaccaccacgcccagctaatttttgtattttttttggagacagggtttcaccatattggtcaggctggtctcaaactcctgacctcaggtgatccgccttccttggcctcccaaagtgctgagattacaagtgtgagccaccgcacctgggcttatccctttacttttcatctgtcttggtatttaaagtatgtctttgttttgattggtatatttagaccactgatatttaaagtgattattgatataattggattgtcactatatttgttttctactccttgcccttgttctttctttgtctgctattctctttcttccttctctgattttgagttctttcataattccattttgtctcctctcagtgtattaattatacttcttttaaaatttttttaagtggttaacctagtgtttgcaatatacatcacaactaatcttttttgcttgtgtaagaaaatttttattcttcacatttgaaggataattttactggatacagaattctagattggtggattccaaatttctaagtactttagatatttcactccactctcttcttgcttgcatggtttctgagaagtcctgtgtaattcttatctttgctcctctataggtaagatggttttgtcttgcttctttgaatattttctctgtgtctttttctgcagtttgaatatgatatgcctagatgttgatttttcagtatttatcctgcttggtgctctctaagcttcctggatctgtggtttggtgtctatcattaattttggaaaattctctgctattattacttcaattttttttttttttttttttgagacggggttttgctcttttttgcccaggctacagtgcagtggcacaatcttggtgcactgcaacctccgcctccagggtttaagcaattctactgcctcagcttcccgagtagctgggactacagatgcccaccaccatacccggctaattttttgtattttttgtagagatggggtttcatcatgttggccttgaactcctgacctcaagtgatccgcccatcatggcctcccaaagtgctgggattacaggtgtgagccgctgcacccggcctcagatatttttgtctgttcctttctcccttcttccttctggtattcccattctacatctgttatacattttgtagttgtcccacattccttaaatactctattctatctatttctttctatttttttttttttttttttttttgcatttcagttttggaagtttttattggcctatcttcaagctcactgattcttttccctgccatgtatagtctattggtgagtcaatcaaaggcattctttatttctgttacagtgggtttttatttctagcacctttttttgcttctcagtttctctctgcctgtattacccatttcttcttgcacactgtctacctttttcattagaacccttagcatgtcaattagaattaaaaaaaaaatttctagtgtgggcctggcatggtagctcattcctataatcccaccactttgggaggctgaggtaggatgatcacttgagcccaggagtttgaggctgtagtgagctatgttcatgctactgcactctagcctgggtgacagagtgagaacctatctctaaaaacacaaacaacaaaatcctagtctgataattctaaaatctctgccatatgtgtgtctgtttctgatgcttactctggctcttcaggctgtgatttttgtcttttactatgccttgtgagtttttgttaagagccagacctaatatatgagctaaaaggaaatgggattaaatagacctttagtgtgagctttcatgcttaatctgcctatgggttaggctgtgtttactgtttgctgtcactacataagaggctataattgccctatgtgtccttatttttttgtttcccctgttatctttgggtttccctacggactttttaaataaggtctcagatgtgcagttctttacattataactcccccagtactggttccagcagtggtttctgttcctgggcttctagtttggcaagctgtgattctctgcgtccacttgtctgtctctaattttggaggaagcagattgtcctttgacctcagttctctaatggatctcagaagcgtcgttgattttcagccatttggcttactgtgagggtggagtgatgactccaagctcctcatatgctggaccaggaaccagaaatctactactttacatctgattttgaacatgtgaattcttgtttttaatttaatttaaaaatctactagtacagtctaggtgtgttagctcactcctgtaatcccaacactttgggaggccaaggcaggaggatcacttgaagccaggaatttgagacaagcctgggcaacatggtaagaccccatctctacaaaaaatttaagaattagctgggcatggtggtgcacgcctgtggtcctggcttctcaggagcctgaggtgggaggatcacttgggcccaggaggtcaaagctggagtgagctattaccttgccacagcaacccagactgggcaacagcaagaccctgtctctaaagaacaaacaaaaaactactacaacttcacctctgtggtcttccccccaaaatccaataactccaaagtaaccacaagaaatgtatcaaacaaacccaatttgagggccattctacaacatacctgactagtactctttggaactgtcaaggtcatcaaaaacaaggaacatctgagaaactgtcacagtccagaagtggctaagtggacatgatgactaaacataaagtatcctagaacacaggcaaaaactagtgaaagtgagtaagatgtagagcttagttaataggagcatactactttggttgattgattatttgtgacaaatataccatggttatgtaagagttaacaactgcagacagtggatgcgaagtatacagaaaactctatgtctttgtaacttctttgtaaattgaaaactatttaaaataaaaggcgtacataaattaaaattttcaattatcttctaaggttctaagctggtctatgtccatcaccttcttggagaaggagcctttgcccaggtgtacgaagctacccagggagatctgaatgatgctaaaaataaacagaaatttgttttaaaggtaaatgacctgagttgtcttttgtatgatatagaaatgaattttagaacttgagtttgccaagaaattttttttctttaagatagtggtgtttttatttatatctacagttggcaattaaaaaacaaaaactacaaaagatttagaatttttttcccactaaaattgtcttggagcaagccccacattgcagcaacagttcatagcttgtcatcactatcaacaccacatcttttattgggatagaggttgctttattgctatcatttttcagaatacgagattggatatgaatttcacatacctgatttgcaggtccaaaagcctgccaacccctgggaattctacattgggacccagttgatggaaagactaaagccatctatgcagcacatgtttatgaagttctattctgcccacttattccagaatggcagtgtattagtaggagagctctacagctatggaacattattagtaagtattcatttttatgatgagcacatgaatttaaaatggatttttggcttgtaccttgcacgtacttttgtggttggggcttttgtggagtggtgggcaggggcaaagctctcaatttgaaattttattaatcttgtgcaactaactcaggattccactttccattgttcctagaatgccattaacctctataaaaatacccctgaaaaagtgatgcctcaaggtcttgtcatctcttttgctatgagaatgctttacatgattgagcaagtgcatgactgtgaaatcattcatggagacattaaaccagacaatttcatacttggaaacgggcaagtgttatgcttttaacagggttcttctcttcctatttccatagcagcctttcatcatttgtgctcatgcagcctggctttgtttgtgtttaatatagatttttggaacaggatgatgaagatgatttatctgctggcttggcactgattgacctgggtcagagtatagatatgaaactttttccaaaaggaactatattcacagcaaagtgtgaaacatctggttttcagtgtgttgagatgctcagcaacaaaccatggaactaccaggtataaaactaaagtgagggacttggaaatatttttctgtgttgcgcttatcagattttcaaaatgaatttggggatctaggtagtttgaggtggtcttttgaggagcagttgaaggagagatgagcctaaggccaacatggcagggatagaattctattcctgaagaatactctgctttcttattagtccattatagatcctgttatcaggaaaggggggcagatatattctgtgagtttgatcatagggaagagtatttaatgattagtgaacccttcagaaaggaagtcatgcagcaaagagacagcttggtttattgagatcaaggtaggccagcccaatttcctaaatcagggataacagggagacctgcatgcccactccaggcagagttgagcacatgttggatatacctgggatgctctcaggcaggatggtgggtttgactgtaatagatggtacagccagattcctaactggccagatcaagaaatggatcattattattctaatggaagactgctgaattttcaaccaactagaatattaggtgaccagggaggagaatgctaattgggataaatgaaatattttgaacctgggtttaacaaaaccaactgccaagttccctggtgagagctatgtctttccaggagcccatggtaaaaggggcaaagatttggtgggggtggggaggggtcttgtttctggtatgttgtcactgctagtgaggccttaggagatggtcatcttctatcctgtggatgtggatggggctggagtgttcttttcaattatgaacatatcacacaacaagaggccatgggggcgagttagagaactacgaccagagtcccaggggagtgagctgggaggacttccaagctgtctatgtggaagagggcttagagtgttgtgtttgtcctctgtgtgacagaatgaaggacttgagagggacatggtagctcaggagggcagagcttttcaagagactggaagcctgtggcaaagcctagatattcagtaagacatgttagtggggcgattgaacaaatgccttccaaaatgttttaaaagtaaaatcctgtgagtatttaacttgctgcctaagttagacaggcatcttgatatagtcatgtgtaaattactatttaagtcatatatacctctatcttcttcatagatcgattactttggggttgctgcaacagtatattgcatgctctttggcacttacatgaaagtgaaaaatgaaggaggagagtgtaagcctgaaggtctttttagaaggtgagtattagcattggtgctgtagtgaaaagagaataactaaagtagaatgttgggttccatctggcaaaaaaaaaaaaaggatctctgccaccgcatggaaatcctatgccttgggcaatatggtgacaggacagtcctgggcactgggcacagggagcaagctgcatagctttaccacttctctctccccactggggcagctgatgtcctcactgaaagctcctggccaaatggttgacatcctgtacacacgcaaatgtttccacccctaatcacctaatgtcactggacctcaggttctcactggttttttcttttttcttttttttcttttttttttttttggtctatggaaatactgatcctatttttgtcagatatttgtaagaagcgaaggaaatagtgtatgtgaaagtgcttcataaattataaagtaatatgaatagctctctctcacaggacagtcctagccctgtgtttcttgggcttctcaaagatttttttttatctataaatcacagtgaaaattcatgattaggcaagagctcttcctgtcaacatggatggctctcctaacacaatgtgtgaacaaactgttggaatgttttgtttaagctgagtatttggtacctgcatattcattatatcacttatactttcttttttgaggcataaaaacatgcagaaaagtacactcatcttaagtgtacagcctaatggacttttacatatgtttatatcttcttgagaaaacgtaagagtaggaacctcatctgtgaacctcatctcccccagcccccacaaaaaaaaaagaaaaatggcaataattttatgaaatgtcatatactgtacataagtaaggttaggttcaggccctggaggaaagcttataacaactattctttattctgcataatgagccctcatgtttagtaaatactttattccatctttggctcaaaattgaaggaacagatagtttcatctctgaccaccagtgtgaagaagagctggaagttaaccctcagcaggcctgatggcatttcctatgtggagcacaattcctttgcattctactttctctccaacaccttatctccatgttctggagtttctgcagttaattttaacaattatagtagttggaactcttaactcttgagctctctcctgggcagtccaacctgtctacttggtcctggtgcatatgcagttaggcttgacagaagcatttgtccagattatccaattctagcagtattgtatgtatggctagccagaagcagatagtttgggtttttatttaaagggagagagagaaaattttttgacttgcagtattgctaaaagattacttatcttattttttggaacaagatgtataagacagttaattgggtctttaatctctctcatgtataatagatatagtgtttccatacttgctgcattgtattgtgtttaggtgagagttgttatactaaactgtccaagcctgtggaagtcagatgcaggggtggggttatcctgcatattgaaggctacattttagccattatttatgctttgtctttttcaggcttcctcatttggatatgtggaatgaattttttcatgttatgttgaatattccagattgtcatcatcttccatctttggatttgttaaggcaaaagctgaagaaagtatttcaacaacactatactaacaagattagggccctacgtaataggctaattgtactgctcttagaatgtaagcgttcacgaaaataaaatttggatatagacagtccttaaaaatcacactgtaaatatgaatctgctcactttaaacctgtttttttttcatttattgtttatgtaaatgtttgttaaaaataaatcccatggaatatttccatgtaa

SEQ ID NO: 62 - DNA, 79151 bp, Homo sapiens
ccgcagctgccttcggcgccgccagccccgccatggctgcgccctgcgcggtaagcccagccgagagcaactccccaggcctcagtctccccgctgggacactgggcgcctaatggccagagcgatggctgcgaggggcgggcggggcgccaggttccagggtggtcctcttcaggtccagtttactgtctgcgcagggggcgctgggtcgggcactttctgagcgcctcctgcgtgccaggccctgcgctgggtttctggagcgaacaaacaggcctctgcctccatagtttgcatcctagcgagggacacacgaccaagtcccgactcatgtgtgacctggggccggtatcgggcctctctagccattctccacgtccttagcagtgggtggctgcgtggggtcttgttgagggtacaccctgctccagcaggtaggtacagcaggacgctgggatgcccgggcctgcagtgtgagcggggcggagccgccctctctgagttcacattcctccagaagtcctcatttcgagagattcctttgaacgggcaaggccctctggctgattggagagtcagggaggctgggtggtagcctgtgatgccctgaggcacttgaggacatggacggagattccaggctaggatacagaccttttgactcctaatctggtactctacctcccttcctgtcccctcatgtataaaccactgttgagggagatgaggcccacatgcagggaactacagaggggaggcggtgttgagagataccatgggacctactggtcaggggtggacctgaacttgcctctgcccactgagcctaggggcggacactctcttacgcatgttctttcaagaagcttaggtgagagcagaaggctctgttggggaccctcccccagctgctcctccctctgttgttgaaaggagactctgacaggtgcgttaggggtggagctgggcacaaggccatagggcctttgttctggttactgctctgtagggtggcagtggctttgctgtgccccaaggacatcctttcccaggaggagcctttgggcttcctggagcacccaaaatgcttctttgaggtttctgatacttagagtagggggagatgtttggatggctgaattataacccttcaagtgttaagacacaagctgctattggatggagagagtctccggagtattctctctggtgttttaactttattaagttattcatacaccacagaattcaccttttaaagtgtacatttcagtagtttttagtacattcacagtgttgtgcaactgtaatcactaattccagaatattttcatcatcccaaaaagaaactccatactcaataacagtcataccatttcttctctttccccattttctcccaacccttggcaaactaatatattaatactttctgtctctatagatttgactattctgaacttttcatatgaatggaatcagacaaaatgtggcctttggtgtttgacttctttcacttagcatgttttcaaggttcatccatgttgcagcaagcatcagcacttcagtcggttttatggctgaataatattctgttgtatgaatatgctacatttggtttattcagtcatgtgttgatggatcatttgggttcaatcacttgttggctattaaggaaaatgctgctctgaacatttgtgtacaagtttttgtgtaaaccatgttttcaactctttggggtatttacctagaattgctgggtcatttgctaaccacgtttaactactttattttttattttatttatttatatttattttatttatttattttttgattaggagtctcactctgtcgtccaggctggagtgcactggtgcaatctcggctcactacaacctcctcctcctgggttcaagcgattctcctgccttagcctcccaaatagctgggactataggcgcccaccaccacgcctagctaatttttgtatttttagtagagaggggttttcaccatgttggccaggctgatcttgaactcttgacctcaggtaatctgcccgccttggcctcctaaagtgctgggattacaggcgtgagccactgtgcccggctaactacttttttttagtcagggtcttgctctgttgcccaggctggagtgcagtgatgtgatcacagctcactgcaaccttgaactcctgtgctcaagcagtcctcccacctcaccctcctgagtagctgagaatacaggcatgagccactacgtgtggctaattctttaatttttttgtagggtcagggtcttgctgtgttgcccaggttggtcttgaacccctggcttaaagtgatcctcctgcctcagcctcccaaaatgtggggattacaggtgtgagccacttcacctgacctatgtttaactttttgaggaactgccaaattactttctatagtatctgtgttttttgtttgttcgtttgtttgtttgtttttaaagatttttttttttttctgggtgtcttgcattttcatgtgaatcttgggagcagcttgtcagtttctgcaaaaaagacacctgggattttgataggaattatgtggaatcggtagatcaatctgaggagtatcgtagtattgtatcttaacaatagtaagtcttcctgttcatgaatgtggaatgtctttccattttttaagtcttctttcatttctcttagtgatgttttgtcgtctttactgtacaagtcctgcacttcttttgttaaattattcctttttttttttttttttttgagacggagtctcgctctgtcacccaggctggagtgcagtggcacaatctctgctcactgcaagctccgcctcctgggttcacaccattctcctgcgtcagcctcctgagtaactgggattataggcgcctgccaccatgcccggctaatttaaaatattgctattttttttatgtatcataaatagttttattttttggattattcattgctagtgtacagaaagacaattgatttttgtgtcttgattttgtatcttgcaactttgctgaactcatttgttttttgtttttgttgaagcatttccacagttgatgtattaattcaaatagtaaaaactattcctagtaaaaactaatcctaagtggattccttaggattttctttatataagatcatgccttgagcatttttaaccctactcccccggctgttgtaggaagagtgctggccctggggaagccccttcctcacccaggcttcacacatttgaccctggctctctctcaggaggacccctcgctggaaaggcattttaagggccaccgagatgcagttacctgtgtggacttcagtatcaacacaaagcagctgggtaagaagaggcaccctgtctaggtgctaggttatgagctgaacaggccaagtttttacctcggaggggtggtgggtgggaagcagagcacaaggactgcacagctttgtctagacctgcttctagtcttgcttctgcttgccagctctttgggcactgggcttcatgagcttcattttacatgcagagcctgagggtcagagaggttaggggccttgctaaggccacagagcttttgagggtgggactgggatctgggtcttttctgcacaccctagccaccttttgggtctgtcttttggtgtgggccctaaacagtgactccttttccttgaagctttactgattctgttgcccacagtaataaggcacaccttgttgaagagccttgtcagtgagaaggctgttgagcagagatgggcacccccctcgaccccactgctcttatgctgcagctgactgtcccccttccttggttgcatgaggtttcgtacacagcttttatgactgcgctttctggttcctgcagaggaggcttgccccttcatcctgtcatcaagaccctctgatgtgtaaaggttaagagggaactgaagtgatttttgatcagttttggggacctcctttaggcttcatactgagttgggccctctcaatgggaggggctggcttcccagctggggaggacttgctctctggtgccctcaggatgtgtctggggggagaccctgggccccatgggaatgagttttcccagagctctggattgcagtccaaggctagcatgggaagggcctcggtcttattcccatgtgggtgtgctccttggagaactctgggccacaggctctccacctccagaccatacctcgagatgtgctctgctccatgggagacttctcacggtctgtttgtggatgccagggaagatggagctgggccagttgctccccctgcctctccaatgtcttggtggaggcttgaagcctgttagagctgtaggtcatagcatcacccactgtcctcagccagtggctccatggactcatgcctcatggtctggcacatgaagccgcagtcacgcgcctaccgcttcactggccacaaggatgccgtcacctgtgtgaacttctctccttcgggacacctgcttgcttccggctcccgagacaagactgtccgcatctgggtacccaatgtgtgagtcgtacactttgaggaggcttgttggagtctggggccctggtgccagagccatccccacccaggtcccctagcttggctctggactggtcacagtgggacttctactctgctttggaagaggtgccatcagaggctggggctgcagttggagccctcccctcagggttggaagaggagttctgggcttacccaatctatccctaaagaaatgccacctgatgctgtgttcatgtgggtggggcctagagatggtgctctgttcatataggagaggctctggctttcccttgtggagactggggtactcgggcttgactgactttgggaggggtgcttgaggagtaggagagctttgatgtgcttgtgggctctcatgtcactgttatgggtttccttactcttggatgcctgtccttgtagcaaaggtgagtccactgtgtttcgtgcacacacagccacagtgaggagtgtccacttctgcagtgatggccagtccttcgtgacagcctctgacgacaagacagtcaaagtgtgggcaactcatcgccagaaattcctgttctccctgagccagcatatcaactgggtccgctgtgccaagtgagcattgttctgtctggagacccttggaggaaccctgggggttgggggctggcccaggggctgctaggtaccaacttatgacctcgggcaagttacttaggcattgtttaagcttcctcagcctcggtttccttatctgtaaaatggaacaataatagctcctgcattgtaagttgtcgagaagcttcatggagctgatgcatgacatgtaagttagtccatagtcagccatgatgaccctctgacatctgtgttggcaaagcacaaactgggtcaacaggggccatttattatcaaaaacaattaggtactttcagtactaccattacacattttctttttgttccttaagacagttctgcaagctaggtgcatttccattttgcagatgaggaaatgggggctcagaacagtagtatcttgtcccagagcacacggtgggtctgtggcagagctggagtttgaacccaactctctctgacagtaaggcttgcctactttcctctgggatgttctcaggggatgattttgctccagagctcccagatgggggcgcaggcttcggagatggggggcttagcctggaggctagccttcctgctggccagggagccagtgctgtgcagacagcgggccaggtaacccaaaggacctttcaaggtccaagaattgcagacagatagtcctacttctagcttatttcattcctttcaacagagcttccccatgggtcaaatatctttgcttcagaggaaggggttggggtgccaggtgacattaggaaaccacatgagtcagaagttggggactattgagctgtgttcttctggggaccccatacaagttactgttctccagggcacccccattcctttgtcctgggagacccctgatggctcttagaggctttatgactagggtcctgagatcaggaggggccaggccagcaaactggggtgtcaagtccatactgggcctttggtggcagtccccaggacctcatgccttttgttggcagattgtgtcttgctgacccgcacttgagtcaaatgtagactcggaggacctggtcccagagtaatgacactgatggtgagcttttggccacctttatgcaaatgttgccggcaggcagtcggctgcatgttgccatgtgctgtgcgtcaggggcagtgctggggctttatgtgcatgaggctgctctgtgctcactcgtgaggcaggcacctttttttttttcttttctttttgtttatttatgtttggttttcctctaagtcaggaagaatttctctttttcccttttggtcagagtttgctgttgggatgggagaggggctatttgctcatgaagctacgtaagaaaacgaaaacaagagcaacaggaaagatcaataagtttcacagattcaggaagaaaaaaataaaggaaacatttttataacatttaaaattaagtcataggccgagcttgaaggtgcatgtctgtaatcctagcactttgggtggatgaggtgggaggatcctttgactccaggagttagaggaccagcctgggcaacatagtgagactcccatctctacaataaaataaaataaaataaaattagctgggtgtggtggtgcacgcctgtagtcccagctgctcaggaggcttaggtgggaggatctcttgagcccaggaggtagaggctgcagtgagctgagatcacaccactgcactccagcctgggtgacagagcaataccctgtctaaaaaacaaaacaaaaacaaaaacaaaatttagtcacagtttcctgaaaaactcttcagaaggaaaaaagaaaaatgatgtgctaaaagttaactattttcagaaacaaagtataatttaagatatgaccaaataaacagaagtaacattgcctcctaggatgcaatgcatttgttcctgaaaagacaaattagggtattcaaattaaaaaaaaaaaaatcacagcagggcatgtgaccccgggtggttcctgcaggcagatagtaggcactcggggaagagtggctgtggaagaaggtgtgtggtgcccatgtcgtctgttagtctgtgatgtgacttgtgccccacccggttcaggttctcccccgacgggcggctcatcgtgtctgccagtgatgacaagactgttaagctgtgggacaagagcagccgggaatgtgtccactcgtattgtgagcatggcgggtgagtccccagatgctgtcctccacctgtaggcgctcaagcacagagcacagacctgggcatgaggaggcccagtggccttcagtggctggagccgtgggaccagcagccttatcactgctgccccttgtctggtgctttttgcgaggtctggcaacctagcattgtatcttttgctgtgtggatggaagctttggccccatcccacaaatagcaggagtgcttaacctcaagccatgcaattctttggagctgtgtaattatttgtgctcctctttttctccttcactttctggttgtcaggattacaacatgtctgtctggcagcagttgacactcagtcgcccaaactacattttaaagcctcttggtatgttatccatgatgatggctttacaaaattcttgttgggttcttgtagcagatggtggctgttcatattgtgccacatcatcaggagagagaggtgcctacatttgagtagagaccccagcttctgcccttctttgttgggctgggagccacaagggcttctccttgagaggtggacatggtaccagcctgggtatcacatatgggtgtggtgagggtccttggcctgtctcctagaaaggggtgggccaatggccctgtagtcctgctggaccttcccacctgtgcctcagctggcaggatctgccctgcagccacccctgggaagggtaccagctccaactttgaaaatcccaggggagcctggctaacttttgggtttgaagatagctctctcaacttgtattgaaaattggcggtgggatgtgctccctggtcagtccaccttagtttgttgctggccactgttctcaccttttacttcttcttgctctcccttggccacctggtaaacaagtgtgacagaaaggaggtgtctgggtcaagggaacagcgtgggcaggacacagggatggggaaagcaccaaatgtttctgggtccgtcctgaaccagggcagacctcctatagtgcatagtggcccctgtctttccagctttgtcacctatgtggacttccaccccagtgggacgtgcattgccgctgccggcatggacaacacagtgaaggtgtgggacgtgcggactcaccggctgctgcagcattatcagtgtgagtggtgaacagcctcctgggcccaagggcagccctggtgggactgtgatggtgttggatgttgtcctgtgctgtagtgcttaaatgggtctgagatggccttgggcaggaaggtgtcctgggtttgttgggattccaggggtgggagtctgtggcatggctggcctggcttggaaccttggccaggagatggagcctggtgctacctggcttccactgagccagtcaatgctcacctccgaagtggcagaatctcacacatactgcagggccagatggggagtcctcactggggctctggtcagggcttcccttgaggaccacttctcaggggcatgccacttgcctttcctggtgatggaggctctgccctccagggccaaggtgacagcccttgacctgtggtaaagggaacagggctgtcagtagaggccagcattggtgggaccgtggccacctctggtcttacagtgtcctccgcagatgtagagtcatagggagggttgacttagctaggggccaggcccaggatggtagcccttggaaggcagggtggcgggcagtgggcatgggctcatgtcaggctccaggtgggagttggagggcgagggcagacttagacatgcccaggatgagttcgctgagagtactgggtagggaactggcctgagagcaagtatgagtgggcagggccatgaggcgccccagttccagggatgggctcagggaagggagctggtgaggggtcattggagaaactgggaattgtgtagctggcaaaacagagatgagcaagactggaccagggccgagaccaggaaggaggcagagctggagttgtttgaagaaccgtggttgttaacctgggactaagcttaaagttcttgggctcgcttccttaagccacacctgaaatgggaaggacatggctggacacaggtgtggggttccgaccccacccacccctgacacacacacacccttcctagctgactcctggtgttcaagtacagcactttctttggggtaacagaggtgagcacaccttcccagaatggggagaagatcctaatcttgaacagcacatggtggagagtgggctctgcagctggcttttaaagcattcctggctgtgtgatattgggcaggtcatttgactctgtggggcctctgggacaatgatggggcctgtctcacaggaggtgttgggaggtttaatgagttgtttcatatcaagaattgagagggtggctggcacaaaatggggggaaggaggtacaatgttagtgatgatgacaatgacactgtcttggtcctgtctgggctggtgaggccaacctggttggttaaggcctgtagtaccctacagcaccaccaggtggcaggggccagccacaagaacctgttcccccaccccacccccctccataggaagccctgaggtttgttaccaatgctctttcagacagaggcttctggaacagaagagcagtggggcttgcctccacttggagcccatatctttcctatccttccttcagccttctgctctgggccaggcctgagtgaagggctggggcttggggatggggcacatctgcccagctgcctggggaacgtgggcaggtgcagaggagggaggacttggacagggagagatgggagtggaaggcgacgaggcaggacagtggtcaggagcacatgctgtggttcctttctgtaaagggggtggcaataggccttcctcatggctttgtgaggctctgatgggaaaagccacaaaagggttataacacagggctaggtatgtggtttgtgctacataagtcctgacactgggcagagaggatgtctaggtgaccctgggagggtccagacccatctctgatggatcaggagcctgggcctggtgttcatgggtataacagcaggtaccccttgggaagggccttggatgccatctctggctcggggtcccaaagatgtggcctgattggcagtgctaggactagcctcgtcatttaaggtatgaagggaagaaggacatctgagaggatagcggtgtccagagcctgctggggttgggggctggtgtgccccatgtgtcccagtgatgggtaggtgtccagctgtgcctggtatcaaagtaggggctggcatcagagtgggggatgggttgcagaggttgagtagaagcagagaagctgaccctgttggggtggaggggccagctggacccagggatctgggatgtgagaatggctgaggtcacattctgagcccctataattgaggggccacagaagataaaggtccacaaagcagccagagtgagaggtatgaaccccgtctccaagcatgggagagctgaggagggcagaggctggggagtgaaggagagtggggtcttgtgaagagggttgtcaggaggtggagcaatgcagagcagccgaggagagcggtgggtactggggagagggagctggggacctggagggagcaggcttggcagagggcaggggcggatctccatgatggcagggttggggaggtgtggatggactcagatgagctccaggggctgagtcctgagtggagctgagtgtgtgggctgacaggccctgctgggagattgcagtctgcttgtgcttctggccttgcctcttatgacagcctctcagtgggcctgcagtgtctcatccctaagccacccctagtgtagattggaggcttagcaggatttggagtaccccataaacacagccggttccccctgagctccctgctcaatgccgtggccagtggtgggtgttcacaggatagcggagtcatcccatagcctctaggctgacccttaggggtgcagtgagccaggttgatctgagctccctgggtagggggaacatacctctcatcctctgctgacgggaggacatggccaggtctgctctggtcttggggctccccagaaaacctttagctgaaactagggggaaaccctctacccaagtggctcccccacccccataggtgcagtggaatctctttggaggctcattccccaggaagggctcccagtactctggcaacagatgcctgatccgctttctgtccctgatccctaggaaacccaagggaaacctacggacacagtgacgtgcagtgtctcccctagtgactctggatgggcatcaggcacttccagaatggccttcgggtgttggacgctgatgggctcttgtgagaggatttggttaatgatactgcagtgtgtggctagcaagccccagcctgcctgcatccagccgtccatagttgtgctctatgagggcacttcctgttcctgctagggttgttggagttgaagcccacttggggctttgggctatggaggcagctggagccatttgtcttgcgctggctgactctcctaggtaaggagtttcttggctctggcctatcactgcagagagcagttctgatttctcaattcagcaaggatttgggctggtggagccctgggagtgccaatccctgtggtggtgggttagctccatatgctctgagcccacgttaagactgttcaggcatctgagcagcagcccccatcccagaacctgtaatgtgcttcgtgccttacagcacgtgcaggtccattatccagtgacaggcctgggtggccagcaaagtaggtctaccctccatttcacagatgcggagcatgcagcccacagtcacacagctagaaagctatgggtctgagtctccacctcagggcctttgagtctggcattctgttgacaggctcacgctcggttccttgcacttcggtgactctagtcatttactcttcaggctccctgggagaggtggtctctttggctggctgtcagcagggcttagaactcatagagtcccaagctctctgtccgatggtctttagtgcagccctgcacccccgcctggcctgatacattgtcatggagggttttgtctttttttttttctctttcagagatggggttggggtctcactgtatttcccaggctggtcttgaactcctgagctcaagcagtcctcccacctcggcctcccaaagtgctgggattacaggcgtgagtcaccatgcccggccggagggttttaagtagttgcagctatcagggcaggcctgtaccctgtactgggtgttttgagactaaaagggttgattggggtacagtggtgctgtcccacctgatctagccaacctactctcccactgtcctgaagtgagcatttacacggcatttacacagaggagtgttttgggtgtcctttgctgctggtatcagagcacttttgtggtatgaatccaaagcctcttgtcaacccagagccaccgtgtcactagtaacatcagttgcgcatcgcaagagaccaccctggggaaaatgagcggtccttttgtggaaggatgttgggatggggcttggccctggcatggtctcctctagagaggaacctcctgcttgggcacccaggctttctctgggcccttggctggtttgcagcccgttaggtagtgggcctaggtttgcccaagcctctacaggcagagcagcatggagtgggtgtactcaggtctctgcttagaccacctactgcccacaagccatgactagttcttggtatttgggagcaggggctgtggtggcctcatccctgggtccctgaggatctgtagaagtttgatgttggtgtatctttgacctggagtcagagttctctctttggagtggagatgggataagagccacaagctcacagctgccacccaggtggcagtatgtgtcatcactgatatctgccatggagccaagaagaggcctgcggctttggacttgaaaaaaagtggatcatgctcagacatttggcgctcaaggcatcatgatagaaggctcatgccctcatgggacagcctagccttcgtggtagactctcatgcaggggtggttcttacgatgaggcctccatagactacccgctccccaccacctccacagaggcaagaggagtgagagtggaggctggtgcggccagtaggtgaggcaggagagcaagtggggaaaggtggggtgggtcctggtgtctggggtatcccccaaagcctggtatgccaggccagcccctcttctggagtaaatggttctaggtgtttctatccaggcttgggtattcctggcatttatgtggagtggagattctgttgcccttcttctgggagagattctttcccttggatgggcttgaccaggtgggggcccctggtgtggcatccatacactgaccctgccaccttgatggtgctgggaagcccagagctccctgagcatgccctcccttctgcaccctcctgccaccggctgttcctctggcagcttctgctcatggaggggtggaggtggccttcatcccagtgcagactttctggtgggggggtctctgaattctgcctccaagagctggcttcagagaccccactggtccctctccagcctgcctcctggagatcctggcgcttggagggtgttgttgagatataaatatcatgttacgtaaagccttggctgtttccccctaagtgtgcctgggaacacgtatccagactccccggcacatcggcacatcagctgggctggcatctgagggactgcgtgcaccctgtgggccttgttgagggccgtttcgtgttgggtgtgtttaccaacccagtagtggttcttacagcctttcagtgctaagatgacggttggttttgaatctgcctttatgttggtggcaattctgacttggcagggtcatggttattttagccccactggttttcctcattgggcctctggtaatgggaagaaagacactggggttttcctcagaaggcaccctaggaggctgtgatacagctgatccatgcattggctgtggagttgctctgtccccacgtagactgcccaggtgtgcccccagcttcacctagaacatgctcttgaccttgagggagagttgtgtaacctgctggggcttctggatacccagcttaagcacctgctcaccaaccactttctgagtcctgctcggtgccagggacttaccacccctgcctgatggagttcatggtctcatgggagatccagatgtgagtcagatagttgcatgtgaatgtgaagagtgaaccgatgggaggcttgtgctgctttggaaggacaaatgaagggggtggccctaattgggaggccaggggaggcttcctggagaaggcagcttccagtaatgagctttaaggtcagggaaagggaagggcaagagtctcccaggcccattggaaacaaggggtaaaaaagttctacggctgggggaatcgacagagctggggtggccggctcttggagagtgagggacaccagaaaagatggtggggttagcctgagatggtagggaaaagagagtcatggacagggccaagctgttgagtgggtgaagtggcaggaccttgagttgcatggaacacagggggcaaaggagaggaacatccatgttggcattggatggctcactctgcaaagacctcatgtgcttaacttagtagcatccgcacagtacctcttacacataggtgctatggtacagatggagaaactgaggctcaatgtggttaagatgcttgctcaggatggatgtggtggctcacggctgtaatctcagcaccttgagaggccgaggcaggtggatcatctgaggtcaggagtttgagaccagcctggttaacatggtgaaaccccatctctactaaaaatacaaaaatcagctggacgtagtggcacacctgtagtctcagctactcaggaggctgaggcaggagaatctcttgaacccaggagacggaggctgcagtgagctgaggtcgcaccactgcactccagtctgggcgacagagtgagactctgtctctcaaaaaacgtcatggggtgagcccaggcaggaggcttggggtccgaatgcaggcctgactgcttcctaagagtgtcttagctttctgctcgtctgcccccacacacgtccttcctgtgtggcagtggcattgtattgacatttgaagggttttgttttccattggtttctttaaagaaagagtatatcgggcagaccaaaggctatgtttgtatgtttgagtactctattctgctccagcttgaccgcttggtgctgtgggagaggatggaggaatcgtctgctgcctctggtttttgcatctgtttctgtccgcctgtcttccactgcctgcccttggctctgaacaggccttttcctgttcttcgattgtgcccctctcctgggaaatccttgttgggttccccacagctcttctgagcaatgaccatcctgacccagccccatcaggcctgtgctgagcctcgattggccctgattgcccgtcttgggcttcagctgtgctccctgtgcctcctagccagcacctgactgatgtccttcccccagtgcacagtgcagcagtgaacgggctctctttccacccgtcgggaaactacctgatcacagcctccagtgactcaaccctgaagatcctggacctgatggagggccggctgctctacacactccacgggcatcaggtgagaggtgtcggccaggtgctgagtggtgtggagtggtggtaccttcactgtctgggcagtgggcaagatgcagaaacaggcttgtcacccacacagcctgcagggagatggatggaggcatttccatgtgacctgggcagattgctgggcctgggactggtgcagctgagaagggtatataagagttgaattgggcaagggttgggggctgcatctgggcatggttagcaagccgccccttaggggcctgaatggaatctgtcccctaatggcctcagccatcccttggtccagaggttgagttgagccttggaacccatgctctgagttgacatcagggtttcctggaggccctcggactggcagacatcagtgtgtctagagactgaggcaacctcaggtgtcttgcagaggctgggacaaagaagggaagtcttcttcatgtttgtcgtttgagaattcctggaatggaatcaaggaagcaaaggcctcctttctgaatgagcttcaaagcagccggttccctggtctccctgggtgggctgggtccctgggggccggctgtgggaagtaggccacatgcagttctccccaggaactggcctgggtccgggcctttcacatctagtacttccactaggaagtagtgtccgagccctcctgatcagagcggtcgtcagaatgtctcctgttggggcgtagtcaccatgcccacttgagatgggaggtctggagtccattgaattcaagtctgtctctaatctgcctgccatgctgagggaggccctgggggtgcttatgtgtcttggactatcagctaagtctgaggtgtctagcctggtgttttctgagctgttgtttgggtttccactgccatctgagttagggtacctgggggccatttggctatgactaggggatggggacataggccttttcttctacttcctcaaggtctggaggctgcttgctgcccccagccttgttgtgaccccttgccttccctgtcagagacatatccagtgtgcaggactagtgggcctgttctccctgggccagcacatccagagggggtggctgctggccctggtgtaagcctgttcacaagccaagcccctggacaagcaagttatacagattcatgtgtaaccgtttgggatcttatgcccaggagggcatttgaaaatcatgtgaatgctgctaccgctcctgctcccctaaaaaaaacaaaacaaaactcagaaacagtttgaaacagatgcctatcaagtgatcacctctttttgtgagtgttctttaaacagctaactcacgcttagcctgaaaacacttgaatgtgggatctaaaatgtcattcccggtgttctggcatcgcatctggcacataaacgaaagctattgacattgttctctccgggaagtgaagcaaggaccatggcgcattgccttgtgtggtcacttgtctgctattaaatctagagatatgggaaccaggccaagggacagctgatggtttggggtgtggatagggctgggtcatttcttcttcagggcaccaggctcacaatgcccagaggaaaggagaagaagagaaacgaaccaacgacctctgttcattttgccatctgtctgtttgttcattcatcatcggctctctagctcacggggctgggcaccagggataggaaatggatgttatagctctacttcctgggcttcctggcctgggaagagggggactccacagggaggctgacagagctgaaggcagcatgagacgagttaggctggctgagaggtagactgagtcttagagagtacttggagggcaggtgaaggtgggtaggccctgcccatctcccagggtacagctcagatgaaggtgggagtcagcgtgtgaggctcaaattattttcttctcccagccccctaaactccctatcaaatacaggaacttaggattgatttaccacaagttttaagggttctttgtcctgggataccgacgacacccagcccctctgtggggtactccaggtatccaggtgtaggaacccctgggcctggcttgctcagggttctgcaaactgattcaggaagacaaattgcccagggtcaccctctttccccacctctgcacttactttaatccttgctcctttctagaggctgattctctcccatccctcctctttaagacccatggtgagaccaaccatgcactccaactggtggtggcaagtcaataccgggttctacagctggcctgggttgaaaggtcccgatgtggacaaacctggcctgattcctgcgcccctcccacctgcactgtggggttgctgccttgagagggctttcttttggggtccttactaatgatgtgcagcagcatgattgaagagccaggctgagggctgaggtaggggtgtgagtgtgtgagtacgtatggggcagggatgcccaggagaaggccttacttacttccagcaaagaccagctcacctccataccacagcctggcacccctgggacccaggtctgccagcgtttgctgtggctccttgtcatgcttagctctgcccctggatttggagtgattcagaatcagctaatgggccaggtgtggtagctcactcctgtcatcccagcactttcgggggaggctgaagtgggaagattgcttgagcctgggaagctggggctgcagtgatctgtgattgtgccactgtactccagcctgggtgacaaagcaagacactgtctcaaaacagaaaaccccccaaaaaacagattcagctaatgttggcttcccaagggagcatagtgcaatcgaggagccttaatttgggcatttggttaagatacggggtccactggctggacagaatacctagtgcttatggagatctgtggctaggatcagaggtggctttgctccagctgggggtagaaatccgtaggggctgggcctgtgttgtcacccaactggttccgaggatgttcattactgatgagggcctggctggaggccacatcacaggggcctgctgacaaaggggctgggttctgcctgggcactctgcagcaggtatagagtcctcatgggctcccactcactcagaccttcgaggaagatgtgcagctggttctttggtgacttcatctttcacattctgttctgggaggtggcgatgtggtggggtcctggtggccaagggcctgatggagcgcagctgctatcagccacttcctgaattgtgtggctgagcagcctggggctcctgagtgggtcttgggtgcctggggcttctgtcctatggataaggaggatggcagattggaaagcattttttttttttttttttgagtccaggtggtgaaaatgagagcagtctggattagtagggggtcttatgacttctagtgtgccagagctgggacaagtacctgtgtctatgcagtttctatcacatgtacatgtgacttttaaaattctatttgtaatttcactcttgtttctttcattcattcattcagagacagtttcgccctgtcgcccaggctggagtgcagtggtgcgatctcagctcactgcaacctccatctcctgggttcaagcgattctcctgcctcagcctccctagtagctgggattacaggcacccgccaccacacccggctaatttttgtatttttagtagagacggggtttcaccgtgttggccaggctggtctcaaactcctgacctcaggtgatccacctgcctcagcctcccaaagtgctggaattagaggcctgagccactgcatccagccttcttgtttttatttacttatttatctttactggggtaacatatgtgtataattcaccatctttaccatttttaaatgtacagttcagtggtaataaatacatttatattctcttttttttaaccccttcattccctggctccccttccccatcccagccctggtaaccaccactctactccatcttcatgagatccatgtaactcccacggatgtcactcttgtgtttagctcacaggtctaggtagggtaccagcaggcttatgtcggcttgtgtccccatcttgctgctacatgaccccattctgatccaacagaagggagccccatgaaactttggtttggacgcaggggacctgctgtgtcctcagagatggcttgggagagctgcgagagagagggctactgcatcttagggccagtgggacagcttccatttctgcatctgagaagtggacagtgcaggctgggggtgagcagcagtgaggtcagccacagggagctgctgtgggatgaggcagaccttgacctgggcatgggggctctgcgggtgccaggagaagggccccagcaagccctctggggaaaccgtgggggaggtttggggtagaaaaaggagggtcagggtgcagtgctgttgggctgcaactctattgtctgagttgaggccaaactcaccctgatttacctttcagttgtctcctaaggtacaaggagcgccaggacagagggacttgccaagtgccagctaagatgagtatcacccagtgtagccctgggtctcctgggctggacctgtgtgctggtgttgagggcaggttatcagccaggagtcagcgtgcgggtggtttggtagctctctggcacatgagtggcacacatcggcccatttgagaggccttttgtttgcgcaggctcattttgtgagagtaaggggttatcttagtctgttctgtgctgttgtaataaaataccggagactgggtaacttatcaagaacagaaagttatttctcagttccagatgctggaagtcccagatcaaggtactagcgttggggaaggctgccctctgcttccgagatggggcttgaatgctgcatcctctgaggggagtaacactgtcctcacatgcagaaggtggaagggcggaaaggaccaaactccctttgtcaagccctttcataagtgcacctaatccccttcatgagggcggagcccttgtgactcaatcacttcccaaaggccacacctcccaacactgttaccttggggattcaatttctttctttcttttttttttttgagatggagtctcactctgttgcccaggctggagtgcagtggcgtgaactcggctcactgcaacctccgtctcccaggttcaaacaatcctcccacctcagcctcccgagtagttgggattacacgtgcacgccaccatgcccggctaattttttgcgtttttagtagagacagggtttcaccatgttggccaggctggtctcgaactcctgacctcaagtgatctgccttccttggtctcccaaagtgctgggattacaggcgtgagccaccacgcctggctggggattcaatttcagtatcaattttgttggggacaaaaacattcacaccatagcaggggtggatgttggttacaagtttattgtggccctgaagaattctggtgcttctctcctgcagtcctggcttggggactctgggtgataaagggccctctgcctctcaaatctgcccatcctgagaggagagtggacagatgtgggaggtgctgcctgcaggttatggtgcattgccctccttccacagcctttgccctgggaacaccagagcctgtatgggtcacctttgcaaacatctttgattgaggccaagtgctgggatatgttcagctggggaggttacacagccttgtctggtgggggatgatacttagctttctcaggaaaaccccagtatttttaggaacaaacagtttgtacccacccatttctggttttgaaaaaccatgggtcctctcccatcttgttcatctgaaacagcctgagcttcaggaggggaggaggaatgggcttgggcactgggtcagatgattccagtgttgcctctttttatgtgacattgggcaagaccttgactttgctgagtctcttttcttatctgtgagactgacatcccattgtctgcctcatggtaggagaggatgtgtctaaatttcccagcaccggacacagtaggtcctcatagatattaatccctttccacttgagctcatggaaaatgatgtcatgccgttttaggtgagagctctttaaaagggcattagaagtttctgttgtggacatggtcctggtgatgctgagtgggtgggcagtccatttgttagaaaaacgggtccatgggggtgtctggtgccttagccaccccatttctggcatggggctgtggcctctgccccagggttggaggcgcgcgtttcctctcctgtgcaccttcggaatctctcaggggttcatctgccttttacttttgcttagggttgttgtctcccccagaacattttgctttggcttctcttgtcacacagctcatggaatctgtcccctggttgggggctggggagactccccgacccagactcgtgtccccaccagctgccctcgtgggtttgctttgccgggtgccttggtgtacatgtccatgtgcactgccctttgtcaggcctgtccttccagtcatctcaagggcctgactcctggaggatggctggtggatcaggagacccgcgtggtggcactggtgccagtgccctatttgaggctctggaaagtcttggtcagggggtgtgacacaactgtgacgttaagcaggaggaaagggagtccctgcctctcactggatgtcatacagacttgggttgtcagagctgcaatggaggctcatgatcccatctcaccccctcattttatagaagggaacactggtcaggagagggaagggcttccctaccaactaccacggttgttcagagcctcaggccccgtgtgaggccctcacagccccatgtgtggcaagcgtggggggcagtgtgctagaaatacagatttatctttctgtattttctgaaacataatcttgagccacacttacttggtttaagttctctagagctatttgggagaggatggtgggcgggttgtgggtggggagttaaatctggtatttgtggctgtgcagttggtgtgcatgtcgctgtagagtgactgagctgcacacggtgccatgcgcccccgccaccctccccccgaccccgtgtgggtgagcagcccctgccctggacccagacctgcacaggcgctgctgtctgtgctcagggctatgctttgagacttagttggtgggaacttgcaggctcagagtaggagacccactgatgcttatggggtgcttgcgccatgctgggccctaggttgaggttgggatagcagcagcaaaggggatgcaccttcaagcaggggaggcgactgtgtgacagtggctgggccagtgggccatccctctgtccaccccaggtggagggcagctctgggagtgggccacccctcccttgtttctgtgagagctctgtagctcctgtctaggcattttggaggactgttttgatgctcaggagggtcacacctggcttgggtggtcgggcacctcctgtgagaggtgagaggacatgcagagagagaacggctcatttatttcacactaagaaactaagaagttggcctggccctctgtcccctgccagcagcccagagttgagggctgggagcaggtgtcttcggccagggtcaggaggtcactccccgtctgtggagttatgatggcctcctatgggccccactcagccatgagagcccagttcacagcagaccctggtaagtgagtgcaggagcctcctggtggggctctggaagaagcatcccagtgggttggattgttgtctctctgtctgagcacaggggctggagaccacagcactcaccccagaggcctgttgggcctcctcagtcccattctctgtgtgatggccactctgcttttccctctgactgaggggcatgtggtgtgacaatcctatttgttcactggaagactgtgcatatgagagtcaacacaaaatattttgcaacgcgtgagaggtggtggtgggtttgccagcatagctgttgtgggcatgcagtcagagttcaggcatacaggggcctctgagagtcaggcgggagaaggtgaggaggatgaggagagcagcgaggtcagtgtgagctgccggagcagcagagcgagagccagcacgactgtgaaatctaatcaccatgggctcccttgttttgccttaaaaaaaaatctttctctgttgatactttgttgtttgaagaaaccaggcaatgtgggtcctttttaggtctggaaattggcaacagaagatgatgtgtggtaaaatgactgggtgtggatccagccaagctccagggccagatatggcccggttagcaggtagagtagcagggaggccaggctgtgtctgggttcatgactggttaagcaggaccatctccctgaagattctgcctggtctttcaagggagggagggaggcccttattgagcctgtgaggcatccctgctaatggacctggcctggagtcagagggagaccagggcttcccacaggtgggtacctctggtagctgggggcaggccggcatccacactgctgaaggcccagccaggagccgctgctcagaggaatcctcaggggtgtgcagagacacccagagacaggtcttgcctttggagaggatggacttggcaatatccctgccccaagtggataccctgatgcatgaagagtgattgattaaataaaaggaataagccatcatgagggtagaacagtctccaaaaacatgtatcatatctggctgctggcaatggtaagaagagactcttcaagcacctatggtttggaaactttattttattttatttatttttgagacagagtctcgctctgtcgcccagggtggagtgcaatgacatgatctcggctcactgcaacctccacctcctgggtttaagcgattctcctgcctcagcctctcgagtagctgggattacaggtgtgtgccaccgcccctggctaattttgtagttttagtagagatggggtttcgccatgttgaccagattggtctcgaactcctgacctcaaatgatcctcccgcctcagccttccaaagtactgggattacaggtgtgagccaccatgcccagcctggaaattctagaatgcactctcaaacaaccaatgggctgaaggggaaatcacagtggaaactaaacatttggaagtgaatgactgaaaatgttgcatactggaaacttccaggatctattgaaggtgtcatcagaggcaaatttgtagccttaaattgatttatataaaaccaaaaaaattgaaaatacctgaattaagaactcaatgcaggtgacagcagaaagaatatagagaaagagaggaccttttctgtctagatcatggtgtttgaggagcactagggcagggaggagagagcctggaaagttagcaggggccgaagtaatctggggcctccaaggctaggccctgaagcatgtcagcagtggacagtctcttctacagtacatgttggctttggcccacagcagagcccaggtgttctctgtgctgtcctctgagtgccctgggctgctaggcagaagaacaggagccttcgtggaaggtacctggagcaggggctgcgtggtcctcttggtaaacaggcactgttagggaggactgcagatccacacagcttatcactcgcttcatccctggaacttcctggggtttggtctcgtaaaggagcgctagcacttcttatctgcagggctcccagtgcctgcgctctggtcctgacccctgctgagctgagtgttttgttggttctgctgctgttgctgctgctctgactccaccaccttttcccaacttggcctctggtggttgagtcatgacatgaaaggagagtgacctgcaagtatttttcccttagttgctgtgacttcttggaaacctgccatcactcagtgagctctgggcaggcaaaaggcccatcttttttgacattccatgtactggtttccttctcttttctctgtttcctctttgtttttcctcacaatgaaagtagttttgttgtttggtgttcgtattagtgtagcaatgccatatattcattattaaaaaattcaaagtaggccaggtgcggtggctcatgcctgtaatcttagcattttaggaggctgaggagggtggatcacttgaggccaggagttcaagaccagcctggccaacatggcgaaaccccgtctctactaaaaatataaaaattagccgggtgtggtggagggtgcctgcaacctcagctacttgggaggctgaggcacaggaatcgcttgaacccaggaggcagaggttgcagtgagccaagactgtaccattgctctccagcctgggcgatagagccagactttgtctcaaaaaaaaaaaaaaggtttgtgactgggtgcagtggcccacatctataatcccagcactttgggaggccgagacgggcagatcatggggtcaggagatcgagaccatcctggctaacacagtgaaaccccatctctactaaaaatacaaaaaaaatttagctgggcgtggtggcgggcacctgtaatcccagctactcgggaggctgaggcaggagaatggcgtgaacccaggaggcggagcttgctgtgagccaagatcgcaccactgcactccagcccgggcaacagagcgagactctgcctcaaaaaaaaaaaaaaggttcaaagtaacggaaaaatgaaaaatttctaagaatcaagtaaaagttacctgaaattacctcacacccctctgttaaccccttggtgactgtccacctgaaagggtatctgagtgatggatgccctgccctcatcctgcagtcaggccctgcatgagcaggggccacacagcccgtgatgtcttacacttgggatttcaccctcactgatgttattgggcattgtttctctgttagtaaaagtggatctatattatcctggttaatggtggcttaggattcccagggctgctgggagtggggcattcctgggcccttgcagctctacctgtgtgaagaaggcaggagggcaagtgtaggccagaggctttgtctttgtgtcctctcaggctttgttccctgcacttggacatggcacccttaggaagggtagtgtgattagaatgtgttccccaaagttcatgtattagaaacttgatccccagtgtgggttgttgggaggtggggcataatgggagatgtttgggtcctgaggccatgcccatatatatgaattaatgccattcttgcaggagtgggtttgttaccatggggtgggtttcttataaaaggatgactttggcccgcttttctttgtcaccctctctttgcccttctgccgtgggatgactcagcaagaaggcccttgccagatgctggcccccgatcttggacttcccagcctctggaactgtgagccaatacatttctgctcattatgaattacttagtctcagatattccattatagcaacagaagtggactaaggcaaagggtcaccgcacagactgtcctttcaggattcagtgggtaaatgcaggtgctgtgctctgagcgcctgagtgctcggtgttcaccagtgttgtacttgcttttttcgtcagaggtgttatgagcacctctgagaggaagagccgaaggtggactctggaagcatgggtgggcatactccctgctgtccagtgtgtctgaggctgaatggcacctctcaacctgcctgtctctctgggagacaaaagctgccttcctccatggcctcgaggtcccttttccctcccagaacttggctggtcttttctggcattaagtggaaggcgcctcccaatgttcctctcattgatgagtcagctgtagatgtgctgccagagcccatctcatgggcagttggggctcttgccgctccctgcactggtctggggggactgaggtggacttggtgacagtggctgtgctgtcttctaggagagaacctcttttatctgattttgcttgggaataccaggtactggccacagtaaaagttcgactgggaggaagagatggtggtggctgtggtcatggtgtcgtagctaaacagatccttactctgagcacctttctgggatggattttaggtatgtggggaagaaccctcctttgctaggagatcatgcatcccccatctcccccgccctggactgctctccagcccttggagtgcggcctggcgtgtgcctggcattccccttcagatggtcacgcagaccttcaacatctgggaagccagagtgggcacatcactacccatggcctgaacataagaaaagtgaatgcacattagagagacgtgtcacattgctctgctgcccaagcacctttggaaacctccttcctgtcacctgtgccttgaactatgccctgtctgcttgagccattggctcttccttggagatccctatttctctggtcagcaactgtgcagtgttggggagatgttgggtgttagggttggtctgggtcaaagggaccaagttctggtctcagtgctgtggctggggtgactcagtgcatctctctgacctgtggtttcttactgggaaagtggggacaatgaggccagccctggagggctgccagtgcagactgtcccattcactcatctctgtcacccacattctcatagcctggacttgtccctgttgtagtgctcaggaacagaagcctgagcggtggtgcttgcacctggctgcaggcaggctcctgggctacaggttacggaggactgtgggctgagtgggctctcggtcctttatcctgctgctgctttcattcaagaacgtctcgttttcttcctgtgcatttagaatggagaatgacctttgatgtgtgttattttttgtttgttctgccagggaccagccaccactgttgccttttcaagaacgggggagtattttgcttctggaggctctgatgaacaagtaagtaaagagtagtcgaatggaatggtgaagaagggaatctgagctgatttctgctcagaaccaaacagggtgtttgggggatgggctgggtttcgccagcttccttggtggctttcagcgactaaaaaggccctgatggcgcttggggtggggttgcccagatccaggggccttgccactccagaatgggcctcctgcaggtgccgacctcatggctgcatctcagaatcctcactgctcaggctagcgcttagtggaaggaggctgggctatggttgtcgtgaaaagttggttttttagttattttcctgattccaaataaatagataatgattattattaatatgatcttactttaggcctgggaatatggccaatgtgacaagagcttcatacctcatttaattctcgtgacatctccatgtgggagatgaggccctctgatctccccgtgcggtagatgaggaaactaagtcccagcagatgctagagctggggcaggtactggggcctgtctcacttcagagtcattctcctgccctgggagcctctgctctgtcatctgctgctctttgctcccagcccccttggacactgtttgaggggtcagcattttcagtatttttggctgcagagagaggacattgtgaagaggtcctatcccaccttgtcaccctctgctctgaggcttcagcctgtcagccctggtgccttgtgccctgactgctaaccaccaatgacctgtctcctggcaggcaccctgcttctggggcctagtccagaccctggcactggggaggccaggagcactgaagagtctaaccatcagcagtctttctccagtgtccgcatggtcctcttgtccagagaaccacagcccctgatgaggaaaggaggaaagggtggctgttctgtgccactgttgacctgatggatggccgagaatgtttattccactactgcccagtctcttagttctggctgctcagcctagaaaagtcctattggcctatacgagtcctggtctcagccaaatctaccaattttggttgagtctcttccagtaaggcagagggtagttggaggctctttgaccacagcctgggttagagacagcaggcatcttcccacaccagcaccagtcctgctctagcagacgagggaggaggaaggcaaaagtgactcctgagccttccctgagcgtgaagcctggcttattgcttagaagacagggaaactggtaacttcacacagtaaatagagtcatggtagaatcaaatgacatagtaggagaggcagcctggtggaaagtaggtccagcagcgctgccatcagctcccaggcttcctgtttaatatctactctgagctttttcagagtgacattggcattgtctatttgcattcatgatagccactctactgttaggaatttattcagcagttagatttgcagtgacatgaagaccctgtaaacaagggtgtgtgtgtgctaacattctgtttctaaggtgatatgtgcacgaccctagacgccatccatctgggagaggaaacagtggagctgctcagacagtggtgaggagcctcctgaagaacgaggctcacagctgcgtcctgacagacagggatggtgtccagggcatatggagtgttcatcttgtgtggatacggtggtttttctgtggcctcaggtgaccactggccacacactccccagttctcttgtgacacccaagccagccatcctggaagtggccctggaagcacaccgtcatgcatggccagcagcctccagcagggagcgctcttgctccccagccaggtgcctccctcagctgtgttcaaggaaccgagggacatggtcctgctgataggaggacacctggaataggatgtgtttttcatggctgagttagccttgggatgacgagtgtgttgctgagtacttcctgtgtgcccgtgtccaccaggctgtctcctgtgagcctcacagcagccccatgagatgggaactaggcttatcccagtctcgcagatgcaggaactgaggcacaaggttgagtcccttgccttaggccattcagtaaggagtgttctggcctggaggccatgtgttaaccacttctcacagtgtaacaggccaggccaccgcccgcaggaacttctattttagttcagaggcagatgataaacaatgaaaaggggattaaataactccctactctgatgctatgaaggaaataaatagagggctatgataaacattcacagaaggcctctctgagaaggtggtgctgttgaagcagacacttcagcctgcgaagcagccaaccccatgaagctcgggcctgtgacaccctagggaggtgaaccagcaagtgcgaaggcctggcggtgccacgccgtggtagtccatcctggtcacatccaggtcctcttgaggcctgtccacaaagcctgctccccagggaggtggggtaggtcccggaattgagttggggtgtcaggtggggaccactatcccaccatggctcagaactttgggcatggcctctgagcccatttcctcagtgaaggactggcaaggggattttcttctcctgacttggtgtgcctgttggttttggcaggtgatggtttggaagagtaactttgatattgttgatcatggagaagtcacgaaagtgccgaggcccccagccacactggccagctccatggggaatctggtaagtggcttggcaggcatgtcctgagctctgtgactctggtgggctaggtcatggtgaacagctctgggcttggagacggtgagggaggaggtttaggcctgtctcgggaaagggaccctagcaagatcttctcatttaccaaatactttggaagttgtggtgctttgttttccatctagagtgaacgaataagacacaaagaggctgttacagcaagctgccgggtgccccaggcctgtgccatttggtgggagcgtgttgccatggcatatggtgctgtttgattgaggccttaggagacaagggacccgtcccatactgaaccctgggtcacaggacccaaacgtggggctcctagagggttcagggcctgaagccacagctgggacaagtgggaaaggcccagccctgttgctttcacttccctccctttttttttctaaccatggagaggaagttcctcagccacaaaccatttttagtacctctgttcgtaaaagaatattcagtgttcctgaatttaaatagttaatatttttgataaatatttggggaaaaaaattgataactgatacagtctcattaaataaggtcatattcagcttgggctgaaataaatgttaaagccgaggttgtggaaccttgagggttttaagctcctatggccacaggctttttagatgtctctccgttggaccatacagagagtgtggcctcccccacacggatactggcccaaacaacaggaagcggctcgcccaaggcctccagcgagtcaaggctggggcccagaatagaactaggaagcctcctgagtctatcctggggcttctgtggctgcagcagatagaccctccatctccccaccccaacacacacacatgcccccgttttgtgtcctggtctgcctctaggcattggcccagttgggatttatggtttttcttacaagggttgctgtcctggctggtctcttggctgtcctctgtacttgctaatctgtggccagttttcagcttttgggtttgttgggggatgactgggctgcatgatgcactgcttgctgccagttcatcttccacccagaaaggcatttcacactgcagggttgaggccccctgggactcagcagacctctaggtccctgccctctttcctgtgaatccctctctattaggcacttctggtgagccatagccaaggccttttatgctcgctaccctgtttattccttatctcatcagaatgagtgggtaaatatactgctcaattcacagatgagacacctggggcttagtcaccttccccagatgcctggacctgggggcccaccaggctgatgcctctgagcaaagctagaaactacaggtggcagaggactgctggctgcttttccccatttcaagggagggccctgacatctgccgcttgggagtggttaatatctaccagctgggggagaatcccatgttcttgtagctattaggaaaataacttggatgaattgcttcttgttcctttggtcctggctcagcaatggagtatggagcacctttgcttcccagagctgtgggtgggggatcccagcatggcaggatggggcatgagtgggtgaacagctcagcagtgcttagagcaaccacttgttcccatactatctacagactcacgttggagttgtagtcacagctctgcccactggccctcactgtgtgggcctcaaataggggaaaggatgtgggtcctggggtcagagaactgggtttgaaccctggatgtgtggccccaggcaaaacacctggtcttcccaaaccaacatttccacatagtacctgaatacgcccataggcaggctctgatgagagctttgagacccccaccaagtgacttgttaatcctaaaatcattcttggttcagatcagacctctttccttatttgtcataagcccctctgagaccctgagtggatgtaagtcctcttccagacacactttcactgacacacacatgccatgtggtgtcaaccttcaggacttctctaatctgaggactcccaggccaagaggagagctaggtttttagtttgttttgccttgttttattgtgatacatatatatatataacacaaagtttaccattttaaccattttaagtgtgcaatttggtggcattaaatatattctcagtgttgtgcaaccatcaccgtctatttccagaagatcttcatctttccaaactgaggagagctactttttataacactgttcagtagttcggttttcttctgagataggaagggaagctgatgagtgtgctctcgcccttcttgcccaagggcttccctggcaccgagaccgtatctggggactggttctatggctggccagagtgactcaaccccatagggagcccaggagcactgcagccatgtctcaggagcttgtgagtccgatgagcctctgtccctccagcactgtccatgtactggccttcccaataacccagggtttctcaccctcagcactattgatatcttgggccagatcattctttgctgtggggggctgttttgtgcattgtgggatatttagcagcatccttggcctttactcactagatgccagtagcatcttcaccctcccaccaacccaagttgtgacaaccaaaaatgtcttctaggccaggcatggtggcccacacctgtaatctcagcactttgagaggctgagactagaggatcgcttgtgcctaggagttcaagaccagcctggtcaacacagcaagatctcgtctctacaaaaaaatttaaaaattagttgagcatggtggcactcccctgtagtcctagtcacttgggaggctgaggcggaaagatcacttgagcccaggagttggaggctatcgtgaactatgatcataccactgcactccagcttggatgacagagtgagactctgtctctgggaaaaaaaaaaaaaaagtcttctgatgctgccaaatgtccctctggtgggcagaattgtccccagcttagaatcactgcaataagtcttgcctcagcggggagcccagaaaagaagctgacctagcagtgggaggagtgtgggaatgtgtctggagatggggctgtcttagcagtgggaggagcacggggatgaggtgggagaggccctgggcatgcggacgaggactattccagcagccttgagtgtgaggactctgttcaactgggccagatttgggcttccaccagcagcagcaatagtggcccaggtgtctcagcctgggtttctaacagaagtcattttgtaggaatctcatttggtcgcagtcttctggaggtgatggtaaacaaccaaaaaaaaaaaaccttttgcctttagcaactacttggttttcttcacttaaaaattggagagtgtttttgcctttcctgactaaaggttttcctggctctgggagaatatctggtcagtggtttggtggctgaccagtgtggctcgacttctcaaagagctcatgggcaccatagccatgccccaagaactcatgaatctaatgatcctctgcctacatcagctctgtctgcaccctgggcctcaggccctgaagccttgtgaaatactcctgggcatttggggaatctaggaagcccatcgggcaggtgtaggtgttgaattcctcaccatgtccccattccagcgtagcagtcgaaagccagaggggcagaccctgcatggaccccttactttacttacccactagcagaccacggcaagggcagccctgtgagcctatgatggtccttctgcccaggaaaaccccctgcccatgaccctttctctgactgcagtacttcagctctcagatcttggaatgaaggttgtccttgagcccactctgaatagagctctgttcactgcagagctattttcaacctctggttgaaattcacagcttatttttaggcacatttcatgttgaaaagcaaaagccatttcccagccattcagaatgagaataatgggttccattttccctctattcttggctgagttgtgcatgaggagggatttcagggcttgtggctggggaaccttctctacttagaaggttgcagatgaaggattccaggccatgctctgggctgagggtggacagaagctccatgttcagccttgtgacatgctacaaggctgggggaaggttggaagagccacttgcaggcaaatgagcacctcccagaggggcttgagggtgggcaagggatgggagcccctgggaattgtctgcattgggtgcccgtgctcgtgttttcaagggtctagtgcttagctctgttcctgccacagccctggcccctctattcttgtccaccctcttgctgtctgttctttggggcctgaccccgaggcataaagacccctgtatcttggctgatcttgaatttaacacctcccaaacccctgccactataggacggacttctgctcaaccacagaagcattttttaaccactttttaaatagcaaaaatgcatttgcttgattgacttatttttgccctccttccaaatgtctgagggcccattatgcaatggggaagaaaggttgcgctgggtggggtgggaggagaacacagagttctaggtaattcagtgaaacgggaggaaaaaaaaacccactttctgagttctaagggttggctgctgtccggttcacacattaaccttgagttctagggctgagtgcttttctccactcacctctcaagatctcattttaaggaggaaagctcatctgtggttaagagcctgggttctagcttccagccaacctgtgattaaatcctttctctaccctgcctggggtgtggtcctaggaaagtggccagacgtctgtgaggcacggttttctcttctgtcgtttggggagaggctgggccctccttcgtgggatttcatgcgtggtgcatctgcctggcacatgacaagtgctcatcaagctttagctattttttttgagtcagggtctcactctgtcacccaggctgaactacagtggcgcaattgtggctcactgcagcttcaacctcccaggctgaagcgatcctcctgtctcagcctcctgagtagctgggactataggcgtgtgcccccacacccagctaattttttttttttttttgagacagagtcttgtgctgtcacccaggctggagtgcagtggcacaatcttggctcactataatctctgcctcctggattcaagagattcttgtgcctcagcctcccgagtagctgggaatacaagcgtgcacctccacgcctggctaaattttgtatttttagtagagatgggatttcaccatgttggccaggctggtctcgaactcgagagctcaggtgatccacctgcgttggcctcccaaagggctaggattacaggtgtgagccaccgcacctggcctaattttttaaattttttgtagagaaagggtctccctgtcttgtctaggctggtctcaaattcctgggctcaagcagttctcctgcctctgcctcccaaagcattgggattataggtgtgaactaccacgcctgccccaccaagctttagctactttaaaaagggttcttttcccctccctgactgaaagccaatccaggagattatgtgttcaaaacttgctggggtgagggacagtgggcaataatgggagcacttataattttccacgttgacccctctctgcaggtcatcgtagtgagggccagtgaggtttctagacccttgcaggcatcaaaattgtgtttcctgatggcagacccaagtcccctgtgctcccagatgagagagcagatctgtgagtgggtggaaacagacttgtccttctgccacaggattcctcaggacaagatgcccaggatccccagagcctcagtgcttgaactgtcctctggaagagggagctgggtcagttgagaacatctgaactgagcctcatccgtgccgaaggatggtctatttcttcttcctagttcctctgatactgagagtaaagcaccagccacctcctgtgcttgtccttaacctcccacatttccatttttggggcactgccacaggggtgggcttcacttagggatttgtgggaccctgattcctggcccagagattcttggcactagatcttcccttatgctttggatctgggggtcctgggtgcctgtggatttttaagatctgggttctcactccaggtgccttgcctgaggaattagagagttggagaaacagggagaggagacccatttccacctcatctgcctcatagattttttaaaattatttgtatacatttcagaagtacaagtgcagttttgttacctggtatattgtgtaggggtgaagtctgggcttttagtgtaatcatcacccaaataatgtacattatactggttaagtattttctcatcccttgcctcatagattatgtgttagtctgctcaggatgctataacaaaataccatagactaggtagattataaatatagaaattttatttctcacagttctggaggctgggaagtccaagcaaagcaccaacgggtttagtgtctggtgagggtttgttttctgcttcatagatggctccttctcactgtgtcctcgcgtggtggaaggggctagctagatctctggggtctctttcataagggcactaatccaaacctgatggctccacccatatgacctaatcacctcccaaaggccccacctcctaatactattactttggggttaggatttcaacacaggaattttgggggacactagccctcagaccttgcagcagatttgcttctcatttgggaggacttgggtcgcttaatgagaacacagatttatggtttggcattcactttctgtagaggggagaagtgtgggttcaacggattcttagcaagagcggtgttgtaggtgtttggagcaggagtgaaccccagatttatatgtcttagagaagagcctctcccttctccacttgaccccaatcctggcacctaattttttcaagaccattaaggttggtaggatgcagtgactcacgcctgtaatcttagcactttgggaggctgaggcaagaggctggcttgagcccaggagttcaagaccagcctgggtaaagtagtgagacccccatctcttaaaaaaaaaaaatactattaaagggaactgttggcttcctgcctgctgcaggcaagtcagaagatgcccaggcaagttacccaacttggaaaaggcatggcttcatggagcccaaacccccgacgcctcaagctgcccgtgcccttgggctcagggcatctctgggggtcaagatgtgcctgttaatgtgttgtggctctcactttgctcacaccctttggctgaatagctggcattgcccacagtcctttttatcggtgtgaatgagagcttgatggaaatggcaaagcagaccctcttctaaggggcaccattccacctcgtgtggctattgtggggctttaccggggccaggctttatgggatgacttgggaacagtggggactttctttttcatgtttcctaggacttaccaggtggcccatctctggctcctgggggaaattcattcctgccccctatgccacacagaggaggaactttgagcccagaggtgacctgctggtgaatagcctgggccccagccaagtccttgtctctgggattgaagtgcaggaacgctaataagagacccctgactggaaaagagcaagggggagtctcctcatttctcagtgggaaaaaggagcccagcatcctcacccctgggacagataaccgtgccttcccctgtgtgtgtgcacatgcatgctcatgtgtggacccctgtcagtgctgcttcagggtctcctggtgtctacattcccacaatgctctgtcaagtgcacctcccttgtactcattcatgtaatccccctgcagaccctgttgttccagttctgtggggcgtctccggtttacatgggatgtactggggctgggcacagcatgggggatgccagggatctggctaggcaccttcctggtatgagaaaaggcagcttacaagcatgtctttcctggaaaggattttcaggcagccccactaggaaggtggaaggtggatactagaaacttctggctctgggaaccacttccagaacttagttggcagtaagagctgcgctgccctagtatgctggtctgagcagaggctgggacccagcctgaggtggcgtgtctcctgtaacctcacgcaggttgtctcaattctctgcaccccgatttctccccagcattctgcattgcatcctttgtgcatttttcatttcatgggctcactctgcaaaagaccttcctgcagaagagaggccacagcagcctttgctttgggtggcagaggcctccagataagatgccccctttcatactcgggttgcattttcctccacctttatctcaatagaattcgtggaaagtgctctgggtttcttagtttcagtgggaagagagtggatactaaaaataaagaagattcaatatttgttaccaaactacaggttttgtttttgttttgtttttttgtttgtttttgttttttgagacggagtctctctctgtcacccaggctggagtgtagtggcgcgatcttagttcactgcaacctctgcctcccgagttcaagcgattctcctgtctcagccacctgagtagctgggattacaggtgcacaccaccacaccggcgaacttttgtatttttagtagagacagtgtttcaccatgttggctgggctggtcttgaactcctgacttcaggtgatccacccaccttggcctaccaaaatgctgggattgcaggcgtgagccaccgtgcccagccccaaactacagtttttgtagaatgtttcctgcttgaaacagagcacctttggccagtggctggtgagtaatgtggtgttcgcaagatccaggagcaccaaagatgccagtgctcctggaagtggggccacccaggcccagggcagggtcccagctcctttttcttccagaggctaccactgacgttattactaggtacatgttaaataattactaagtttcccatgggggaggagttgcctttgataagcatgaggacagcatttgcagaaatccattaggagatgctagctgggcttcccaggcagtgatggtgaagagacaggccttttaacatttgacagttatcatggtaagcctcctgcagtggttctcaaactttagtgtgcctcagaatcactctgagggcttgttaaaacacagcttgctgggcctcatatccagagtatccgatttaatagggaattcacatttctaacagatttctaggtgatgctgatgctgctgatccagggactcacttggagaaccactggtcttttggaaaacagtctagcctgttgtgactatggcatcctgggcaggggaattaagggaagaagaaagtctctttatcttcgaagtttctatgactcgtcgtgggtacagcttgggagaggcaatcagaaaatcagtgtccctcgcagcccactgtagtctgctgctttgcagaagaggaaaagggtatgaccttggttcttttttgtgtgtttgtttgtttgcttgtttttggtattttttgagacagtgtcttgctctgtcacccaggctggagtgcagtggtgcgatctcggctcactgcaacctctgcctccggagttcaaacaattctcatgtctcagcctcccgaatagctgggattacaggcatgcaccaccacacctggctaattttttgtacttttttagtagagatggggtttcgccatgttggccagctggtcttgaactcctgacttcaggtgatccacccaccttggcctcccaaagtgctgagattacaggtgtgagccaccacgcccagccaacctgagttctaatctcagtgtactgtttaaagaaagcccagccaggcttggtggcatgcacctgtagtcccagctattcagggctgaggcgggagaattgcatgagcccaggagttcaaggctgcagtgaactatgattgcaccaccgcacttcagcctgggtgacagcgtgagaccctgtctcaaaaagaaggaaagcaagaaagaaagtccagtgctgccccgtgggccctttaaacccaaaggcatctaccaaggctctgtttacaaccagacaggcaggcgtgtggttttattaccagctgaggacatcagtagtaaggaagatgggacttgctgtggctctgctgtgagcctctgccagccctgttgttctgtcccagcttctgtcctgccccttagtactcctgccattagtccagtcacctattcttgaatctgtgttctccaggccacctgtctcctgtgttatccttggtgtctcccttgctgtcttgatgtcctgtctcccacttctcaccctgcacatgtggatgcctaggccagctcccatcctccagacagcctgctagactttagggaagcagatgggtgagagtctctgtctgagccagagatggcttgggtgtatatggcttaacatttgaaccccagatgaaggtcttatttgcagagcctcttttttttttttttttttttttttaattttgagacagagtctagccattcttgcctaggctggaatgcaatagcgcgatctcggcttactgtaacctattccttccagttcaagagattctcctgcctcagcctcctgagtagctgggattacaggcacctgccactacacctggctaatttttgtatttttagtagagacagggtttcaccatgttggccaggcttgtcacaaactcttgacctctggtgatctgcccgccttggcctcccaaagtgttgggattacaggcatgagccaccgtgcccggcctgcagagcctcttgaagaggtgcctccaggtagcaagagcagagacaagccctgaaacagcgattagggtagaggtggcaaggttggagtggaagccagaactcccttctctgaactgcccccttgaggggctaatggtgtttcctgtcactagaaaaatttccatccattctaaaagcaagtaggttcctctccagaggagagttcatgatgttgaggaaggaaggcctatttaatgacttaaaccaatgggaggtgtgttctcagacatccagggaaaagcatattaagacaatcacagtatcaggaagacagagcaacctgactcaggaactcagacaaaggctggaggcccttgggtccagctctgcgtgcatcagtacacatttggcatataaacccaggcacacacactcctttgagagcttcgttatctctttcgagagttccagaactgttttgggttttccttttcccctggcagccaaagcttgggcttagggttattggagcttccacatgtgcatgtggggaaatgaacctgagtcacaggacagaaagtggagtctcaacactgtgatgctttcctacaaggcacacatggccccaggcagagccaggctgcatgccttgaaggaccttttgcttcacacactggggccactgctatgacactgcctttttgccaatagtgatgacaggcaatctaaagccccatcatcacctctccacaggagagcccacagaggccacaagaatcgtcttgtaacaattgtttgctgcaaagcagagagggtgcacaagaaccgagggctttggcatttaaggatctttcttcccttttattttgttcttttgttttcattctatttttttaagctcagaaacctgaaaatgaaataaatgagccacaggtagaaataaacctgtcgcttaagtctgactgatttttggggccaccattcactgctcctagtgttgttgcgctcatccttatagtctctttccagatggcacctcctccatgcaggcttccttgggaggctggcagctggtgagttcttcctgctccacctgcctggagcactctcctacctggagcagccccgctctcctgttgtctgttatttacagacctaacttttctccctggagggctggggccttgctcttgccatggtgctcagtatgtgtctgacacataaaaaatgctcaggaagtcaaagcattctcacgtctgtgggcagcataagttgagtgtgtgaggctagaggcgggctgtctttccttttggcatttttgatggtctcagactaaaagaaggaagctaccttctggccttatttgtcagttttggggggcagatgacatggggtggtgtgggcagtggcagggcaacagagggtggtagagtctgcatgcctagattagaagtttcagaacttcttttcattttaaatggaaaaaaaccctttgtggtttatattttccagattggacagcagcattgccatgtggtgtaagggtgttggatagtgcttgtgtttatgttcttattggttgccatggaaaaaaaatcagaatagatggtttccatggagattatcttacaattagtttctttgaaggtccggacattgctgcaggattcgctgagtactcgttgccatcaggggctttctctgtggcagtgctaaaggctggtcagaacgttccgtggacttagacaaagtcatctgcctcctatgcttgcaaatcccaggacaccagagtggaggtgatcctgtggctgagcttcctcttggagtcccacttgccttggatcagctccgcagctcctttcagtcaccaggaaggtttttttttttgtttgtttgttttaattaaacaaaacaaaacaaaacaaaaacctttgtattgtggaaatttcaagctagcacaaaagatagaataatgtaacaaaccccatgtaccactcacctagcttcaacattctgctaatctcatttcatctgtttcccccacattttaaagaagagtttgagtggttttaaaaatcccagatatatcattttttactccaaataaggccatttcttagttatataatagcagtgctcttatcacatccaatgaaattaatagttccttcatatcagatatctagtccacattcacattttcccacattgtgtcattgttcaaataaggatgcggaaagctttgagaaaacccatgttctctgctcccccttccccgacccatggttctggtaggcggagtagctgagggggctttggcctggagctgtcttgggcttggggaagggggcgcgtctgggctcacaccacactcctgatgtcctccaggagagtttggtactgtgagctcctcgctccttcctggaggtgggtcaggcacaggtgggctagctactgccagctatcttgggccaggcatccgctggggggcactggctgtctttgaagcctgcagggggagggaagggaagacgtgatgtaaccttggttcataacagctgtctgcgacttcattttccaggaaaggagaggctgtttgaccccatgggacacagccttctgcaactcctccctgggaatcgtggggctgctggtggagggctctggctgatctgctctggtggttctgagggctctggtggagggctgctgcttttgcgggttgggtagagccagtcctggttatctatcttggcaggctttgctcgtgtcctgtgatgctgcacaaagtatgaattacggagcttgggagtgatgcctggggtgtggtcggtggctctaacactctccattgaactaagtgcaaggagagtttaaaatagccagcctttgttccgaggttttaaaaattcaactccagtagttacaatgagctgtcttcaagtggatctataaataaaccgctactgttcctctttgtcactgagagctgtggcgtctcccagagatgtcggctctgccgctcgtcttcattagatgcctcatctgtggggcagctgcaagtggagctgacacacagagtttgtaatgacagcaacacattccctttcaaaaatccacagtccccaaaaattaactacacaggaaagatagtaactttgcattgtagaaacctggcagagaggtcagtgtcaccattgatcaaggtcaacattccctgtaataagcccttccatgtgaaccctgtgttactgtgcacatcacttttctggtggtgtccagtatttataacctgaatctaatgataaaacccaagtcagggaacatttgataaaataactgatcaatattcttcagaagtgtcaaggtcatgaaagacaagggaggactaaggaactgacacagatgggaggaggctaaatacataataaatgcatcggtaggattctggaacatcaggatctaagcacattagtagaaaaactggtaaagttcaaatggggtccctattttggttattggtattgtcacagtgttagtttcctggtctgatcattgtcctatggttgtgtaagacattaacactggcagagggatatatggaaattctctgtactattttttgcaacttttctccaattctaaaattagttcaaagcagtttaatataaaagaaatctacagtcagcacttgggctttatcggaatccttgatctccctaccagggtacctcggttcaggtatgtgctgtgggagggtaggcatttttgtctccaggtattgggtaggtaaccctaagatactcagcaccagctcgtagtgagcccttgggagtgtacgtggagctgaactgaaccagagccgccctcaaggaagcgggtgtgtgttgagagagaatgctcccacacaggtgttgggcagggcgggttgcctgcttgcctgtgtggtggtttctgaggatgctccagaggtgcatctgctccaggaactccagaacagactcagcaggagtgtgggcctggcccaggatggacctgcttcctcctgaggcttcctagcctccaccatgcagtcctccccctctgtgttcctaaaaccggctccaccttgctgccccacacccttgtgtgcatttctcactgtaacaagtgtgatgacctggagggctccagcttctaaaggctggggttgttttccagcccgctctgaacccttccagggaaggaaccgcacatgccaaggcatgttcttgctgcttcctcactgcctctactggtttgaagttacttagccgtcacctccctgcttcatctcgctctcttcttcctggcttccctcacctctgtgtgtcacttcagtaagatagacctctcagatcaacttcttcctcctgggggcatgtcggacaccaaataacttgccatttcttgcctatcaaggcaatcctttcactgttttgaaaaatcacccctttgtgtgggggaaaattcttggaaatgcttgcagagagaggctggggagtcagcagattgatgggggtcaagcccaggagtggccatcacagccctggggcaggtcctccatcttgccatgggcctgggtgaggagaacagagtcttggtttgtgcatacagcatctcctacatgcccaaggcctgcgagcaacacaggtgaaataggatgacaggcacctgtgatccctgcctcaaagggaccactttctgagaggggacggggagatggtctgtggtcctggttctgtgtgtgacaaggcctggaatccaggggttggtcaggcatgcagattccccatccttcattttagacctacccctcaaccccttcacgatttttattttatttatttatttagaaataggatctcttgcaatgtcactcaggctggattatagctcagtgcagcctccaactcctgggctcaagtgatcctcccatctcagcctcatgagtagctgggactacaggcgcatgccatcacacctggccccttcacaagttttaatccaaaggacaccatgttggtttcccataggcaggggcctgaggtcaaggggtggctctgaggcctgactgtgatctgtagttgtggagcatttgatttggttttggaggttaccgtgtggactgtggacctccaggccccatgtctctgaactttcttttttttttttttttttttttgagacgtagtctctctctgtcacagtggcgcgatctcggctcactgcaagctccgcctcccaggttcatgtcattctcctgcctcagcctcccaagtaggtgggactacaggcgcccgccacctcgcccagctaatttttttgtatttttagtagaaacggggtttcaccgtgttagccaggatggtctcgatctcctgacctcgtgatccgcccgcctcagcctcccaaagtgctgggattacaggcgtgagccaccacacccggcctgaactttcaaaaatgacctagcaccttccctactcgcagtctggcatggggaatgtgaaaaggcacgctgcatgttcataccccctagatgaaagccagaggtgggaccaaaccccaccctcatgctcaggctgcctggaggcaggactggcaggactgccaaaagttagatggttttaggaaagcagaatttctcttgggttcaggactatgtttggaatcagaagtttcttctcctgttggattctaggccagaaccctaaattacagggcaaataaggctgtagtgtatctagtctgcagatatgtgtggtgaattcggtataggcttcttttgagctctgatttgagaaaacgcccgtgcctttcctcttgagaagatggacgtgaggctgagtccacgtgagctcggtgtgttccctgcttccctccccaggggcaggtttagcaaacatggaggtagacagacatggctgcctgtcaacttttcatgaaggcaaattgtcaaaggcctgaggccaggactaagaaacatctgtgtctgtgagtctcctcatccacagttagcaggctgtacagtgaacagtccaatcgaagattcagttgaaaatatttaatcatgggggtgtgtttgtgtccatttcttccagttttgcacagggcagccctgctttggaaatgtagtgacatgccttggttttcagtgagcagtggtcagacatgctgttcacctgggtctgtacaggaagggtgagtgagatagtccagctcttggccccaggtcaccttcttctcccctctcttgcctagaatcaagctttggaccagttcctggatgcttttgtttattacagtttcagtttcaggagcgggctggacaaagggcatggtccagtgttagaaattaaaagaaaagtagaaagttccaccttgagcaggtgttaagaattgtccatttcaacccctaagaggggtgtgttccatctctgctcaagctccagcctgctgaccaggtgtgtgcagaccttgctcctgactgccaagctgtgtacagactcctaagcagcggaggcctgacactccatggactgcatggctgctgcttgggaggccctgcctgggaatctctgcggctctctcaaattccactgggaaactggggctttgggaattgaactgcattgagttatgactctggctttgcatttggaaaatgtaattcccagactgatgatggaccttgtgggcctcacctggggtcttcagccttgggtttggcccattggtaatgcccagtggagagctggtgattttcaccttgagggcagagtggcagtgatggacggtgtcaactgtgtcctgtgatgggtaggttggtcccctaaggacattttagttgtaaccacatgttttttgttttcagtccggctttataatttacgaatagtaacattcaccattttagaaagcaagcagttctctgagttgtgacagaaacagtcatgtaaccaccaccacaatcaagatatagaatctttccatcatcccaaaatgttctcttttgcttctctgtagtcagtctactcactccacccccagccccagacaatcattaatctgctttctgtcactattgattagtttgtattttttagactatgatataaatggaattatacagttatgtattctttttggtctggtttctttcactcagtctaattattttgagattgacccacattgttatatgtatcagtagttcattcctttttatttaatcaaatggatataccacagttttgttctgttggtgagcatttgggctatttgcaatttttggctattataaataaagctgccatgaacgttcatgtacatatttttctatggaaatatgcttccattttcttgggtaaatacgtaggagtggaatggctgggacatataataggtgtatgtttagctttttaataactgtcaaacttttcaaaatggttatgccatcttacgttcgtgccagcagtatatgagagttcaagttgctccacctcccttccaacacttggcatgatcagttttttttttacctttaggctattctaatacgcatatagttgtatgtcgctgtggttttaacttccattatcctaatgattaatgatgtagagcatcctttttaacatttctgctctttcaaagagcagaagttttggattttgaagttcattttatcaattttttcttttatggatcatactttaggtgtcatatctaaggaatatacccaacccaaggtcacagagattttctatgttttacaggaaaaatgtgtatcagttttatagttttaggttttgttttttgttttttatttttattttttgagacgaagtcttgctttgttgcccaggctggaatgtgttggcatattctcgactcactacaacctctgcctcccacgttcaagcgattcttctgccttagcctccctaataggtgggattacaggtgcccgccaccacacctggctaatttttgcattttagtagagacgtggtgttgccattttggccaggctggtctcaaactcttgacctcagatgatccacctgcctcagcctcccaaagtgctgggataacaggcatgagccattatacccggccttacagttttagattttacacttaggtctatgatccattttgaattagtttctgtatgtggtgcaaggtatgtaccgaagttcatttttttgcatgtggatactcagttgtttaatcaactgttggaaatactaacttgtctgtactaagttgtttgtgcacctttattaaaaattaactggccggatactggtctagagtttctggattctctttgttccattaatgtacgtgtctatccttttaccaataccacagtgtcttggttaatatagttttagactaagtcttgaaatcatgtagtgtgattcctctaatttattctttttttcaaaattattttggcttttctagttcctttgcctttccatgtaaattttagaatcaacttcttgatgcctataggtgatttgggaggaaattgacatctttacaacattgagcctttaatacgtgaacatgatatatctcttcattggtataggtcttcaatttttctcattagtgttttgtagttttcaacatacacattttgcacatatgttgttagatttatactaaagcattttgtagtgtgttgaatgggagcctccctgaaagatatgtctacatcctaacccccagaaactgtgaagatgactttacttgggggaaaagatctttgtggatgtaattaagaatctcaaggtgagatcgtcttggattggtggtcctaaattgaatgacaagtatccttagaagagccacacagaagagagccacacagagaaaggagatgaatgccatgtgaagacaaaggcagagattggagttatgtagccataagcaaaggaattatggagccaccagaagctgaaagagggaaggcagcattctcccttagtgcctccagaggaaatgtggccctgccttgattcagacttccagaactgtgagagaattaatttagattgttttacgccatcaaatgtgacaatttgttacagcagccctaggaaactattaataatatatacttcatgttgttttggtgctattgaaaagataatggccaagaattttcaaaaaataatgaaaggcatcaaaccatagttccaagaagctcagagaaacagcaaacaagctggagaaaaacaaaacaaaacaaaatcctagatgagttatattcaaacttctgaaaaccaaggattaagaaagaaatcttgaaggtagccagagaaaaaaagacatatatatgtggatcaaatgtaagaattatgaagaattctcgtgaaactatacaaactgaaagagtaacatctttaaagtttgaaagaaaaactgccaacccaaagttctgtacttagcaaaaatattttagcaatgatggggaaataagacctttttttcccctccagaaaaaccaaagctgacaattttttaccagcaaatttgtattataagaaatatctaatttctctctcttctccttctaggattccaattgtccatgtgttagagacagtattgtcttgtagcttatggaagctctgttctgttttatccctctgtgtttcagtttgaggaattgatctatctttaagatcactaatttattttcccattgagcccattatagccatacttctctgttactgggtttcttatttctgttgtttccatttgactctttcttataatttctgcctttctgctgaaattctccatttgatcatgtgtgttattcagtagagcctttaccatattaatcatagttattttaaattttgtatctcatagtttcaacatctaggtcatctgagtctgcttctactgactgctttgtctcttgacagtggggtttttttttctccctgcctttttgtgtctcataatgttttattaaatgccaggcatcatgcttaggacagtaaagactgaggtaaatagtcttatcaggagttgagcttagtttagtgttacctaacgtacctaggatgaggtctggttgatggaggattttctcagtcattttcctcactctcacctttcagccagccctgtgggcatgcccctcagaggggcatgcttttttccatgttcttggccctcctccctagataggctgctgttgcttattgcttggtgcttgatattttttttttttttttttttgctgagggttggggtgggccctgttgtcttgacccagcttcagtcttaagcagactctgtctccctgggtctcaaaagtgagacattcttagcggtcctgctccttcctcattcaaaggagaccttgataatctcagctcaggatagtttcctgcctctccctcaagggaagaggtgtttttatatttgcttttccctagtagtttcaggatgctcttctacaggggagaggtcctggcagggcttcatacctttccttactcactctcctctcctaggcctgcacctccaagaacggttttcttccatctactgttctgcccccatttttttttgtcatgaaagcccagtggaggtctgtggaggagaacctgtgcatgggtgcaagctctacttgtgtctgtggcacctgggggttctgcactcttaccctagtctgcgcttggtctccagcagtttgttaaaactgtaacttacccactcgtatggtatttggcgtctcttctcctcatgctttgccataggtgacccacagctgatgctcactttctattttccttggaagtgtctgtctttccttagatttcaggctactggttgctctgtgacttcagctctctgatttaagagaagttatgattcttttagattgtcagtctttttcttgttaggaaggaattaacactttccccagctttatatatcctaggcagcagctccttatccatacttgtatcttgatggaagagggagatcacggtcaattcagagacctctcaagaagtcaactccagatgggttgatttcttgtcacaaggaagatctacaagctgtttcttttgtttttaatgaaatgttatggtttggttcctcatgtgtctgggtagctgagtatcagccacagacatttaggcaattcctactgtgtgtgaagtgatgagctcctggtggtgtatgaaaagcaggcagcagaggaaacaggaactgaggtgggcaacacattaaccaactgtgagaggccagagtcccaccccagggtggcatgagaggagacacctgcagaccccaagtgatatttcccaaagttagagccatctcttgagagtcacctttttttgttttggtattaagatgtttatatttggcaaaagtgaaatgttgttgaattggtgtaggcctatacgagtatatgtgtggattaatctttgttgttattttagtgagcattactttttcttttgagacggagtcttgctctgttgcccaggctggagtgcagtggtgtgatctcagctcattgcaacctccacctcctgggttcaagtgattctcctgcctcagcctcccgagtagctgggattacaggtgcctaccaccatgcctggctgatttttgtatttttagtagagatagggtttcaccatattggccaggcttgtcttgaactcctgtcctcaagtgatccacctgccttggcctcccaaagtggttgggttacaggtgtaagtcaccgtgtctggcctctttgtgttattttattcatgttatacttaactgagaaccaccaggcaaaacccctaggactctttgatgttgaacagacaaaatgctgatgtgacttttgcatttaaatgctgcttgggttattctgccactgtcattactcatggctctggtacgactgtctcttcccactcttgtgtgtcattttcttatctctgctttcttgcttatttgcccagctctcagggaaatgccacagctccagagtgctggcatgcaggtgagtggctacagagctgtgaggggtggggctgctggccctttgctgcagtgcagacattggggaggattcattacacaggaattttacctcggtgggccctgctctttgaggtgttgagtgtttgtggagggcctgctctgagttcagctctgtgctgggcaatcattccagggcagctgggttggggaagtgacgcaaaaagcattagacctaggattcagaggcctccatggggacgttggagaggaactgtgcacatggaagcccagctgcagtcaatgtcacctgccagaggctgtctcatgtccgggaagagcctgcactttgggttcagatcccaattctgttatttgctgggtaacttagaacaagttacttaacctctttgagcccaagggtccatatctgaaaaataaggttaataatgcctattgggaagggccatcataaggatgaagtgaggttacacgtattaagtgaggtgacattaaatgagggcacacagtggatggcaagtaaaccatggcgattgctggactggtggagtgttaagtgctgtggtgttttctgatgggagtgggcaaggaggcagggaaatggctcagggcagcactagagtttgaggctggttacctttagacagtcgttttctgactgagccttagttctctttattgtcaaatggagacagcccatgaaagtgtggtataggtgggaaaacatggtggctgccgcaaccctctgttgtaaaggccacctctccagcttggagtgccatggccgctgtctttaatactcccttggagctggctcagctttggctcatccaggagggtttctattgctaaagtcagtggtactcaccctgcctccctgcagcatccactgtgcttccagaggctgagctcagcactgtccatttctgggccattctgcagaaactcacattttccattccctccttcctaagcagccagcagcaccagactctggcccattccatgacaatgctggctgtgggacagaagagttccctgctcacacccttcctccagtggaagagtgtgtgtctgcactgctagggggtcctctggaaggagtgggcacagcactgaacatttcttaagaaaggcctgctggtagcttcagataagcacctctcacagcccagccgtttgaaggactggcccagtcttcatccctattttatagatgaggaaatggaggcccagagctggtcagtgactgtctgagtcaccattcctcaccactgcactctgctgtgtctcctgacagaactgccttagtctgggggccactgtggtaggctgaagtctctcctggcaaggctggtggacttctgaaatttccttttgggatgggcttctgggtaagcattgagatctgaagcacgttgattcctggaggactggaagagacccagccctgatggccgaagtcttagaaatggccacggaagtggccgacatgctgatgataggtgtgtggacacggtgctgctcatgctgtcaagaacatccctctggctcatgtctcacattcaagttctcctgtagctaccatgagggccagcatttttccaagttcaaatcagcatgcccttgaaagtttgtgatctatgagaatagaatacttacctaataaaggaaaacatgcaggtagggtccatgtgctgaaccacattcccacaggaacaagtccacagaggaactgcaggctctaagaccagccctgcccttggacatccttggctccagcatcccgcccactgaacatgtgcacagcacttcttcggtccacagaagcctttgtgcataaggcaaggagctgactttgctgaatttaggggctgaagggccttacgcagaaacactaagcccctcacctcctggagtcctatctgaagcagcccaggggtgcctttcctgtggagtctgattcctgccagccatgtgccagcctgggacatgcacacagaaatctttgtttttccaggggatctgggccagggtggggttggaacacccctctccccgccacacacacacttccaccaagttctgggccacagcttcttgggcctgggaaaggcatttgtgaagcctggcacacccccatgttgaagggtggggaattagagttgagctgaccaggaagaggagggacttcaggcccaggccaggcttcagcatctctggactcacctggatgcctgctggtgggtgccagctgcttgaagatatgggaggcagctagcttccctgaggggctccaagagcaggctgaggccactcactggcctgcctacctgccctcctccccaggccccttcctgcctggatcacaaggcattctgattccactccccacttaaggcctctgcctggaaaggtatgtgtgtggacccagatgtgggaacaccgccacgctgctgtttcttactgacacttggagcttaccttctcaaatttgctggtggttttccctttcatcctttggaggggctattcctctcacagtatttcttcaagcactggatagactgaggaacttttttctttctgtctttagccagaagtggacttccctgtccccccaggcagaggcaggagtgtggagtctgtgcagagccagccccaggagcccgtgagtgtgccccagacactgactagcacgctggagcacattgtgggccagctggatgtcctcactcaggtaggccacactgtgggttcacccgtcatcccgtcatctgcacttggtcccgcatttggaccgtttgaagttggacaacaggtgctggatttttaaaaacataattataacggacctgttttccagtccatattaatgacattgcagagccttcccggggatcctggctcttggagccattcaagccctggccagaccactagactccaaaatccccaatgctgggtactactggagtgtgctcacctagagctggcctgggccactgaagagctttgaaagaaacactgtgtttgtttattcctcccactctttgctggatgggcactgcaggggcatgccagggaactgagtagtgagtcagggcttctgagaacctaggctatgagtttgagcctggacctttccttatcctctgtgcaaccttggggaaatccctttagttcaccaagccctggtatgtttatctgtaatgtgctggtggttgtgggctctgcctgccacattcatggtgagaattaagggagatgaatctgggaaatgtttggcccatgcctggccctaggtagctgctcaataaatgttagttgtggccctgaccaccctcgtcactgagatggatatgggccctgccctctggagcgtaggttggcagccataacacaggctcgtagtgtagcagtttcagtaagagcaaaatcccttgacaagaggtggtggccagcaataggggcatgcttggcagggccatttcacccgagggaggaagagaggtcctggctgcctgtggctctggagaggccatgggcacgtccagggaatgagtgaagctccaggtggctgtcatgtggatatgtggtcttggggtggggggcaaggcaggatttagaggttccccaattcctcatctccttggctcttgaggccaggctgggactctgcagatcctcctctaccatgccagcacatgggtagagcgaggctgcaagagggacacatgtggcccacgaggaaaagaggtgttaaagccagggggtgggggatggggaagcaaggaagagtggtctccagtccagctcacatgaaggacgcaaaggacccttgatgtcactaacggaaatggagctgagatggcatggtatcctttccccagcttgggatcgtgggctaagtgagaaaagctcttccagggtgtgtcatcatagcccagctgggatggcacaccttgggcccactgaagaaagcactcttgaagggaaaggccaggtgtcatgactgggggctgtgggactccagggcccagtgtacagaccttgctgagaggctgctaagccctgagaagaaggcatgtgctgagagagatgtgagcagcatgcaaagacttaaaagccaccccacttcaaacccgtcagcaactgcctcatgtttttcacagcctcgccaagtgagagattaggggaggtggaatcaattagaactttataggataaaattggaaattaagtctgagaaggtggttaaaaatagcttcattggatccagaggagtataacactaaaaacatttcctgtcactgtgttttaggggtgcacatggaaggttttgttatgtgttcacagttaggagtatgatagtaacttttaaaaaacttgcatcgcagagagtaagtgaaggctggcctgtggcctgtggcctttggcccatggctgggtgtctagatgtctcaatgcttctgtggcaccctggtcctgcctcacaccattcagcccctttgcaaatccaactggcaggccacccccgaccagatgccaacaatatcagccagtcacctgctttgcaaaactgacagtgtctgtgtgtttctggatgccataaagcgaggcatgttcttgacggactcaatgcgtcccgaggaaacttgagttctgcagatgaagcaccagttgaggccttaaagttcaacccattttcagaactgtgcatagcacctttgtgctaatcctggcaagttctccttgggcttgactgttggttgtcttctaggccaacctttctctcctggagatggggctttctctagctgagatgttccagccacagccagagctatctccaccagggggttgaaagtttccctgtgcctttctcttggcattggcccagcagaggcaggcccacagcaggccccgctctggatggtccagactgacccagccctcccctgaagcttagtgccaggcggccaccaccatccatcttcccaagcggcttgttcagctgggcttcctacttggtctgtggatattggtctcgggtgccaccccatcagcaagcactccttgccatctgcccagtcctgaagagcctttgtgttctggaggggtaggatgcccagccaccccaacactgattcctactacaaagtcatccatgtgaattgtgctgttctcctctgttgcctccaccatcccttccctcccccacagggaagtctacttcagagtggcctttgagagggaagctgccttctgggtccttcaggcctccatcctgcagaacatccttctaggggagagccatggggatgcagcgggccgtagccagggatgttttctgagtgagtcacagagtctccagcccctgggtaggacaccctatttcagaggctcacagtcttcaaagcctgccttcctgttcaacaggctggtatggccccatgtggcgaggtcacctctgtggatgtttgtggcctgtctggcaccagtctgagggtcagggacccaatctcagtcctccccagggtgaccccttcagcggctcctctgtgtaaaggaaaggcctggaagccaggaagctgagtgagccaatggagaggagtggctcaggttttgtctggcttccccattgcctagctcagtgaccttgggcaagtcactttgagtctgtgtgccttactttccaaatctggaacacagagctgataataatacccacttcataggcctcttgggaagctccttgaatagtacctgacaacgccgtgcactgctgatgtgttgggtgctgctcctgttgctgccattgtcgttatccaaggcttgggggccagggggatctgcatgacagcaccagaaatagctctcccaattttccactgcctcatgaagctagacccttccctacccaggagagccattccttggccctcagagcagaggtggcaggttccttccatgcacacacattcactgagcccactctgtgtggtgggccctgtgtgagacccagtcccaccttcaggaagaactcaggactgaatctgccaaggtcagagccaggcctccccagaggagctggcaactggaataactggaaacaagtgggagtccagacaccgggtcaaggccatgggtcctctggtgtggggtaacagaagcagcagcccaggagttcaccctcacctgacgggacactaggcaaagtcgaggcctgacccatgctgagggtctggggtagagtggagatggggacacagagaagttgagacgcgagcaagggcagtgctatcatggctccatcccaggggcgatgagacaaacagcactttggctggcccctgcaaggctcctggtctccggagcaagccagcaagtggggcagcttcccccagccttcccaggccaagaggcctttcagatgaagaggaaaccaaactgcccttgggacttgcacagcatcagaaaccctttaactccagaaatggggttggtgttttacttttttatgaaagccttttttataaaatccatacattatttttcaaaagtgtatttatatggggaaaatagactttggggtgaccttgtgagccgagcaggtgcagtcttcaggcctccccacgtagttgttttagatgaaaagtcctcagagtgtggggatcacatactcatcatagttttcatcctcctggtttttatctgaggcctgccactttccaaggacttccctttgtggacctcactttatcctcccacctggcacatggcagcaacatcatgccaggtgcagataatgtgttaataatggcttgttgtgcctggaccagcctcggggtccagccagcctggggcttctccaggaggccaggtgatcctgatctcaaccactgtgggccagagcatccctagcttcccttgccaaacagttttggtgcagttagggatggcttcatcaagaaattctgcaaaccaaacttgacctccctgaaaggtaaggccagaagctcttgcccagggctctgtgatcagagagcccagcaggccgagtcccttaggtcaccagccaaagagcagacacatccttgccctggcctgcccctgtgtggggatgacccctccttgccccagtaaacactgagcttgctgtttggggcatcactggtttcttcgctaagcttctctgggccctgatcccagctgatgccatgctttgagcagctggggtttgttcagctttacacatccccaccagctgtggggagcaactgttcctccttgagtttcagggctgctctgttcacccagtgagccacctgcctgtcagcctgggcacacctccaccattcatcacctgggtgaccttgggcaggtgacatcaatcccagagcctcagtctcctcccttgtaaaatggggagagatgcctcattgggtcctctgagctctgctgtgcggctcttggttaactgagtgtgctagactggtgccagctgttctgtgaagcacagcagtgagtcgatgttctcctgggagcaatatgggaaagcactggggcaggcttgtggcacaggaatgacaggagtggacattccacagtccccataccgctggactcaagtcccagaaatgcttttgagttgccagtgagactctagtgtctggctaggcaggaggataagagaggggagaaagaagtcattccccaaccccgggaaggaggagggcacaggaggtgacagaggcactggggtgcacatagacacttgaaaatcaggcatgggtcatggggcccattagatcagacccttccacctggacctaggcaacagggcccaagatggaagctctttgaagatgtatgtgatacttctgttctttgaatgtagatattgtaatgctttttagggaacatgtatttcctaacaatggaactgaagattttctttggagggctttttgttccttgagccccctatgggaattctcaggagctgctaggcctgaggtcaggagcgtgggcgtcacatgctgcgagctccccgccccactgagagatcgcacgcctctccctcagggtccaagggccctgctctgatcctgtcctgagacccacccctcccctatcccctctggagagagcacacgcctgtcctgtggctgccctggggtcactcacctgctgggcctacctcaagtcttctgagaaagttggcttgaccccagaggcccaaggcttccagagaaaaacccagacaaggagtcagaaactgcagctgctcagacccatctctgcctctttttggctttccaccaaggggagattttaagcgctgcccctctgtctgtctgtcccatggggtgggcagcagaggtcagcctcttcacatggggccaggacttcccctggggccttttcatctgcctgccccccaggccaggctcctccattctgagcacccctggaggactctaggccggaccccgaggctgctaggcctgcctgcccagggatgggcgctcagtaggtgtgcaagcagaggccctgggcctgaccctggtactgtttccccttgtgctcttgggggtgatgccaggtgatctaggggtctttttcacagatgccggaaaacttctccagtgagcagggagagaggctgtttccacaaatagccactgctacatgagctcacctccacgctggctctgtggcttccttcatggaccctcaagaggccagagggctgctgcacagtgctcagctgccctcaggagtaacaggtttcagtggtgtctggaagttgcagaggccctgggccttccttagggcaagggggtggatctctggggtgtggacaatgacccaggagctggggaggctgctgtgagggggcccggcataggcccaacacgcggcttggtggttttgcctcagaagcccacagcaaagttatttttgactccagtttcacgtcttgctgctttttaaaaataccgagccatgaaattcctgctccaactgtttttttatggcacccagtgtttcaggctggccacagcaatgctgtgatgtcacgttccagttcctgtgactcatggaggctgctgggctccaggacttgaaaatgcatgcggtggggagcaggcagggagcaagcccaccagccctgcttgtttgggtctctttggcattcgattttgttaagtgttcaagtcattgcgttttgctgtcctaactcaacaaggccaaggatttttgcctgtttgctttggggatagagaatggcctatttgctttgagataccttaaacctgctcccccacccccacccccatggtagtcctggaagttcctatttgacgggctgctcaggtgaggcatctggttccacactggtggggaagttggcagtgcctggccctgatgtgggccaagctgcctcactactctcaggggctctctgtatccctctttcctgggaggacctgctgttgcttatggaaatagacccccaattttatagttatacagttttccatggggatcggtcctcccacgtgcacccagacagaatttgttgggagggtatagagtgaaagtcacccagtgcgtcttcccatgatcccaggagggcgtgtgcagccctcctaacactgcttccactcgcagacagggccataagggtggtggtgggttgtttctgcaaaaatgggccccctctctgcatcagcacatctagccagctcacctgcttggtccagagtggatgtagccaccctccttgttgtggaccttcatggattgcccttttggccagagtcatgttcaggacaacctgaacttctttgtgggggtttggaaacaagaggcttgttttccttctgttaagaggctacttctgggggacaggggactcaagacactgtctgttctgtgccagggacacacttggtggcagagggactgggggaaatgtctgtctgcctgggcccctggtgattccccagccctgttactatttttggcatttttcccaaaggctcctctggctttgcaaatgtggcgggacaggggagcctgtgtcttccccaagtcgcaggtcagggccagtgccctgcctccttcgtgacatgcagcctgcgaacagcactcaaaaacgggcaagctcgtgtttgcagggggactgggtggcagctcccatgggggtcaggcaaaaaactctggttttctatcttttatcccgtctgtggttgtggcagaaagcacccccttccaaagaggctgcagattgaaggcccctgcctgccagatgggctcgacagtagccgtggttatctctggggcctgggaatgttcatggtcggtcatacgagatttcttctgaggctctgagctggcttggagatgggggagggctgggggagggctgggagatggcgggagggagcaggtggtggagagcagaggctgggagcagggagagaggcccatgcagggacatctcattcgggctgaatctaggcttgctctgagaagaggaagggaggggactccacatgatttgctcttgctcctcggggacctgggccctccaaggaaaggccaaacacaggccacaagaaaggggcctgtgttatgacaggagccccaaactggcctgcaccgctctgagattaagcaagccacagcctacttcatcacagctgaccccgtgacctcttggtgctttcctgaatgaggcaccaccacagcagggccaggaagggctgtagttgggcctgctgcttcctcccatgcgctctgtaaagggccctgatccaggcctgtactatgggtatagaacctcatcatgcccacagtggccatggctgaggaagcagaggaagcacaggaagccttgaacttagcatggcatttgggaagcaattatgtgccccttgcccttctgatctgggcccagccagtggctccagaaagctcgctaagatgattgctcaggttttcccactgtggatcagtggatgcttggcaggatgggggagccttgagactccatccctggtggcttgtgcccttcttcctcccggaggtggccttgttgggtggtagctgcagcccgactcgccaggctatactgagacttccaggcctccagcaagctatcaagatgtctggcttaggatgatcatgtcttgctgggtcttgggaaagtagttaactaactactttatatggattgttggaaaagtcagcctctgaagaaatgggttgcagaaggcggccaaggtcaaggtccacaccccatgctcagccctgtttggactcaccctggagtcagagtccagcaaagcctatggccaagcatgactggtgtcctacaccttggggcctatcccggtcagacacttggcttccctggtggcctgtacatggctggcagagatgtgcttgaacccaccccagtgtcagtggggctgtggctcaggtcctccctttgggtgtgagcaacaccccatgggtcccaggagcatccggttttatgaatggtctgagtggacccactttttatagcttctccttttgggggaaagagtgatatggaaaagagagctgtgttcatttaaaaggagttgtttttaagccatgagcaaggtaaatagccaagattccttaatctggtggctaatccactaatagaaaatagtgtttcgtgtacttcccgaagagagctaatcctcagtagaggttggggctgggggatgcaaaaccgtcagagaaatcctatatccctgagataatgtgaaacaaccgcggaccataggctcaagggaccaaaagctcattttctgttgtttgcagcagactgtggggttagggggagtggttaaaaagacagttgctgggcctagagagattgggaggaatttttttagaaattgtttttttgtgtgaattggctgtgtgatcctgggcatgttagcatgtcagacatcagcatgagaggggagctccattccttcccctctgaggttcaggcctcaaagattttagtcatcatcagaccaggacagaggtgggaaggggaggaactggactgcttcctttactcccgcccccacttcctgccaaagcaatgaggcttcctccctcccaagactagctggtggggcctgcccctcctactgcccgccccactctccctctatcccttcaagctcaccaggtccaagacccacgctggggtgagtgttcctcacaagctgggtgggcccatccctagattagacctgccctttggcctgggggacctgggctggcaggcaccggacctgtgttccctgcatttccatagcactcagggcatttgtccatccagtcagtactcagtgtgcacctgctgtgtaccaggtgctgtctaggagcaggaagacagtgatgagaaagaatagagaacaatctttgtcctcatcactggcatgcaggctgactgatgtccacaggctgctcgaggggcatcgtttgtaccctgtgacatgaaggcccctgagctgcagaccattaggtactggttggtggctgaggccaggaggcagagccttgggtggtgtgaaggtgctgcaggccctgtctgcagagggctaggctggccccctagtcactgctgacatgtggcagcaggctagcaagggcaccaccagcaagtcagggtcctgcgtgtgtacgcacacaggcttacaccaagtgacaaagctggagttggcaggatacaacgcagagctagggtaggcagtggggcccggcagccctgctttgttttgatagctcatgagaccccacagcaaagagattccccttttattgtatctgttttagatcttgagaatctgagtgaagtcaaaaccatgctacaggggagattaattcaacatttttcatctctgcaatgaagccaaaggaaagttagacattcagtgcagcacagttgagaccaggggtgttgagtcaatggccagccccaggacgtttgccctggcctgccacaaatgtcctcagtgtggccgggtgactgcgccctctccctgagactcagagcagtggggaccacaccacctctggcccagttatctggctcctgtgttggtggggaggagactggagaaccccagtcccaccagggagacatcatgggggcgcccacatcaaccacaacccgggaagtgagtaaaaggagcttttcatcacaggagaacttaaagaagcagccagaccaccacgtgcatcaatggctcacaccctcccaaacctgaccacaggctgccctatttggggcctcatcaagccccatctgtgcccatggctcccccaacatcccggagctcagccagggcaatggctagaggagtcatgttccccatagtgcatgcctgtgcccagccagacagagcaagttctacatgcatattagctattaatatgaatattgcagtgactatgagaggtgtgttttacaaagaaactgaagccctgagtctggtaacttgcctaaggctgctcggcgagttagtggtcaagtttccctttgaacctaggccatgtagctgaggagccttcgtgcttaccacgtgggaccaaggttccccactaggaatccctcagtggcattttccaagggcccacacccatgaggggaggaaggcaggcatcctagcagcggggccagggcaaggaggctcctagggtaggagagtgggcgggcctcaggtgggcggggttgggcagggaaggcagtattggtgggcagcatagggcctggagggccacgggaatgccatgccgcagagtctggcctttattcctgagctcttggataggaaaggggcacggagaagcagtgaggaggcagagggtgaagggtgtcccaggagtagggcaaggggagtcaccaggaagcctaggtgtgaggatggggactgagaggagcaggccggaggggcacctgagtgccaagagggaagtgcctcgagccctgcctgggaggccctagtgcaggaggagcccagctggggcaggggatggggtgcctgcctgagtctggcgagggcagagccctgatgtggctgcccctgccaatggtacgccgactaacccagtgtggccgccaggggggcctgggacagcatggtcctgtgtgttcaccctcctactgcctctcccaggcttcacccagctgctgcctctcctttctctcagtcagtgtggctttccatcttgccccatcagccactggtgccttatctcctggcctccctgcaaacctgccaacccaggacagttgcagctccccttgccactgtgtccccagcccaggcagagtgcttggtgggacacatgcctggatgttggctccgccttcacccatcagtctggcccaaccaccctgtccacctccatgccacctgtcttccagctcagaggacgctcccataagaaccagtaccactcaccaaggagggccccaggtaccaccacccagggctctgctaagagcaggatgtggatatggggaagggccctggccaaggtgagcaggaggcccctgggaagaggggctgccccagagctgggggggcagggggatggactggggaagcctcgagtgaagcctgcacttggagaagtatttttaaggatctggccacccttgttctttcctgcccctaagatgttctttgctgtcagtggtggtggagtagctttcctcgcagcctagacaggaccggtgctgcagctgtgtcagtgctcggaagcccccaagagctagggtcccttgtttgctgcctgtggtgggtgcctgacagaggtatgggagtgaatgatgttgttggctgcccccaaggcgggtcgtgagtgtcccacaactcctcagttttggagaagttacggctccagcttccctgccatgtttgcccatgagtgcatgagggaagccttcagcaaaggtggtgacaacaatggtcatgggaggaggagcagctcctggaagggacctgtctctgagggtgtgcccttggtctgtgctctgaagtgccagtctgtccattcacttccgtttcatggactgtaggaccaggtggctgtggtcagttcctaggtcgaggctcttctcccagagtttattctggaaccagcgttctacaaactggccacaggcacgtgggagcagcatcctccctggctgtgcctactcagacctgtgagcctggtgaggcagtgccagggagtggaggcttctctgttcccttctgtttcgagctgagggccctagggctcatatctcttccctgctcaaccacttgaggccaagcaccctggcctcctgacagttccaagagtgtgcttcagggcctttgcacctgctgcacctagtacttggaaagcatttgcattggctcatcctgtgttgctttctcccagaggccttcctgtcagagttgatgctctccttcccaggccgggcagccctggcatcagccccatagcaggtgagccgtggcaggggcctgactccacctggagctcagtcccaggtggccagacacacactctgctcctgtttccctcgccctctcaccaaacacagagtggaaagggaatgaagaggccttgaaaggaaatagaaatgagaactgggagaaaagctaagaaaaaagtgcaggacaagcccacctcaagagaaaaccaggccagggagaaaaagaggctggggctgaaagaaggggaggtcacactgggaggaggtggccagcaggagaaaggagggacaaaggaaaagcccacgtagcccagggagagcgctggggtgtaactagacctgaggggagaaagtgggcatgagggactgtacgtcactccacggggtgtgaggtgcagccaggtcagtcacacctgtccttgtttgctctgtttcgccacgtatgagggtgggggcctcaccctctccagaagcactatgctcccacctcctctgtgcctgtccagagaggaactcttcctgtacctctgcagagccagtgggagtgtcacaccgcccatgcctcttgccagctggagggtcatacagagacctctctgaactctcgtgatgccccagatgcccgagtccccatcacatacctcagaggagctaaggctctccccccagccaccccagaggccagcagagctgcataaacccaggctctgtcccaggcaggacacctgaactggtcagtttgggccattggtgggcgtggaggatgatacggcatctgggctcaactgttccaatctcggagccctgtggggaccatagcaggctttcagcagacacctaattactctatgtcagtagagaaggacgcatctgaggtagtgaggtgcagactgggggtatctgttgagatgtcgccagtgttcctcttctacttggagttgggggcccaggtgccagacatgtctctgaggacttgtatttcagtgcaatttctttgggcatcactacagtttttagggggctaaaaataaaagcctgtcattttaaaatcagttctttttataccatgctcagaaggccctttaaggtgttacataaaacgttttacacgtcttgaactgtgagtgagagaaggcacactcgccctctgaatgttgccccaataggacagatcacagtgtctcccctgagcagaaaaattaggattcagatagaatgccattgttcaccctctcctggggggattttccttggagagctcaggcggatgaatcacggctggaagccctaccacctggtccgagctcctagatccactgtccagctactgagagccagcccaagctagcctgtcaccatgctcttggttttggtccccagcatctcggcatcctccctgttgggtcacctgggttgggcagtccctccttcatccccaccaaggagctttccaggacgttcagcccatcgctgacatcaccctgggtcctgccaaggccctcagctcccctgcgctggactctgctctccagcctgcagggcccttgtgggtccactgccctccccactcccccctcttccttccctcctcacccactggctgccctcaataggatcctcagtaatcccagtcttaaaaatgcagtgcaactctgctgctggctcaggcttctcagaccaccccatgcctgccagaccctctcaacattcttgggggtcctcatactcagcctgtgtaatctggagcccgtcttctgcctctcctgcagggccagtccttgtcttgtgttcttggccttggagcacatctctctcagacccccatctaactcgtcaccaggtactggtgcttcgttctttgtggctatctctggttctgtccactttccttcctggcttctcctgcccccagtccaagccactgtcatcccctctcgttctctcttgcctgcacctcaccttcccacagccatgaacccactcccagactgtccctgtgtagtagccagaggagtctcaaatcccctcagcctagcaccccccagcaccctcctgctctgagggtgaagatgaagctgctaggcatgacttgcagagcccaaccccatctcctgcctcccctgaggccccctcttcttgctccagcacacgtgcctcctatggtccatccctcccgtttcttaaccttggccagctcagggcctttgcacacaccattctttgggtcctgatcctcttcctgcccctcttgcccctccgtcccagcagtgcagcccactgtctatgcgcctgcgtggcatctgcctcgttgaactgtggtgcaccctgtgggctcagccgagtctgcgtattatcatcctgggccaggcacaggccagcgttggggaggtgctttgtgagagtttgagtaagggaagagcgagggcaagggtcagcaaatttaaacagtaaagattttaggctttgtggaccatacagcctctgtcaacctgtcgctggacccagaaggcagccagagaccatacggaagccagcaggcgtgtccataaaaccttatttacacaaaggggcagccggccgtagtttgctaacccttggtctagagaaacaacagaatacattcgatggcaaacaagtgattttaaggccaaggctttcttgagaagggccatggcttccaggaaattgctggtaacagagtaggaaaagggttcagaaatgagcccccaggtgaacctcggcagatgtgactttgaagataaaacttctggagccctgctgaccacaccccatgaggcttcctgacactggccatgagggccttgacttgggaggcggacagtatcgggtgaggagtgacagtgcccaggccatagggtcctcaatccggcttcctgtcactccgatttagggagagagaggtaccttgtttaaagttgaaccttgtcttcaggggatgggccacccagcagtgacccaggcgagttccacagcatgttttggggctgatcacttaatgctgcagtggcacaagtgccagtgaaagaagcgttgacagtgaagtgattggggcagcttctcgtggtgcatccaggaggaggttcttgtcactatgtcctttcggttcctataatattgagttttcatggctcacatgaattatccttatgacctttgtaataattccaaacctaaatgtttagccaggtaagagactgcttttcagggggaggtgacacatgaggcctgacaatgtgagggggtgggtgaccctgggggctgtccattcccactgtggctgaggtaggagtttctgctcatttaattcagagcagctaggccaggcagcctaaaccaggacagcaggtgctgctgctgggtgaggacagggatcccctagtctttcctcaggctgcctgagtttgggcatcagggctggaagtgggatgggacaccagcaggcctctcctttggcattcttgatggggacagagccaagatgcacactacccagtgctttagtgtgctcactgcagccaggccacctaggctcacagcctaggcttgtcactgataagctgtgtaactttaggcaagttacttaatctcactgtgcctcagtttcttcatctgtaaaatggggatgataaaagctcccacgctgaaggtttgttgaagtttttggcacacacgagcgtcccgtgaaagtcagctgccaagagaagcccacagagcagagggtcaatgatcagggtgaaccgccctgagcccagtcccaggacctcctgctggtccccctcatgtttaagctccacaccccaattacatggaggacttaagaatgttcccagggtagcaccaggtccaaggaaagggaatgagctgcctggtttctccaaggtcagcagacagaaggggccgcactgtggaagagttggaccccagcaagagggagttctgggagatgggccatctttcctggccactttgcccaggctgcccctctagcagccagagccctggactcctcaaccccttcgtcagtttccctttaccctgccccaaagccagaagccatggacgcttgtgtcaggcaaagcagtttcccttgttgacacctggcacctgacacagcctgtacctctttggggaccttctgaggggctaggaccagacctctggcccctgctcccctgtacagagcacagggtgagaggcagtgtgatcaaggaactgtttggaaggtcagcgctcatttttccttgaataaatgaaagtcgtggcttccaggccatggagtgtggacccggggaggccgcagaggtatttgcctgcagagcgctcctcctcaccctccagggcaggtgtggccttgtctccagcctggtgaggacaggcgctggtagcaggataattcccgggctggacggagcatgaggcgacgagagcagcctgcttggctgggccccgctgggagttgggccactaggcagcaggtggaaatggcagtggcctgtgtacaccgaggtagcatgtattttctgaaccctcgtatgggtatgtggggatgtgcttactttttgttgtgaaccgacaggtaaagatcatatacattctgaacaaggccacgtgatatggctccaaaccagtctgtgccaggggtactccccacacaccccttctgccacctcagatgctctcctgccctcctcccacagctcccgtgcagctggggaagcacggtggcactgtgatggcctgtcctggctgctctgggcctgtggcccagacagactccctgcaggtggcctgccagccctcctgcctgtgtgtgccaccagccctgagtgtgtctccactttgccacttggatgcccagtggggcatttccatcatgggggaaccccttccttccccttgtagagggaaggcacaccagcagcatttcagatttccatgtttcagccgggcgcaggggctcacgcctgtaatcccaacattttgggaggctgagccgggcggatcacgaggtcaggagatcgagaccacggtgaaaccccgtctatactaaaaatacaaaaatattagctgggcgcagtggcgggtgcctgtagtcccagctactcgggaggctgaggcaggagaatggcatgaacccgggaggcggagcttgtcgtgagccgagatcgcgccactgcacttcagccgggtcgacagaacgagactcagtcttaaaaaaaaaaaaaaaaaaaaaaaaagagatttccatgtttcactgtctatgaggagtcaccattttctgtgaaaatgaggtcctatgctttattaagaaaatttgatttttaagaaaaatataaaaatttttaagaaagtaggattttttttttttaactacatggagcaaagagtgccagacagcattctaatgtacagaaatccaaaaagcatcctgctctcccaggccttctcctggctcagagtgggggcagctgggatcacgtgtgctgggaagggcctggttggacttctttctccctgatggtggccaccacgaggcaccttggcagagaaggaacaggggaagctgagaccaaacacagagatgacacagctcctctgaagctaggctggagggggagaaactgccttgaggggtgttgggcctcataaaagcctgtttgtctactgtgctgtgaagtgatcctcaaagctctcagaggaaggcctcaacggggtggcacccttcatgcagggggctggttgtgaaacaggtgatgcttctcttttcaaataatttagacacatttagtggtcacattcctactgagctgaagtatgggccccctatggaactaagtggagtcccttgtattgacgttggcccagcacctcacccacgttttctgggcccactatctccacgtttgcaaattgggttcctgtgaaaagtttcaagaaaaaaaaaaaggcagaagaggaaaaacaggctcctctgctgcggccttgagtttggggccatcggaaaaagtctggatgaagaatgattttggccctatgagtttcacagcagccagtggaaacttccaggaatgctgccccgggccagccaggggctgtttccgctgccacttttacgagctgcagaccccctccccggctggctggccagcacagggggaatgtgatggtctctttcagctcagctctgcctcttagggtgcagtttgtgttccatgggcagcaatttttccaggctctgtccagtgacagagggttcagagccctcacagccctgattggcccatttagaaggggccagccaccaggcggagcaccctccatggcagctaatgtctgtgccggacgctgcaagaatttatagcagccttaaagggggagactcccttctaaaatgtttcaatgttttattaaatgtatgaaagaaagtttcctttccactggaccaaggcccaggacttcatggagccccagggaagggggcaaaacctcttgggaaagcacacgggtgaggttaatctgaccctcctgatgcctatgggctgcacagtaccggagtcaaggctgccatactcacatgggctcatccattggccagcaggggcctggcatacagtaaggcactcagccaaccctaaagagggaagtgaaatgatgccaaaggcgtcatggccagcatggtccaacccgcgcaagtgatgagtggggcaggcttgctctggtccagcccctctttggggagcatgcaggctcccagacagtgctgcccctctgctgacactctatccaaagccagaggaggagggcagcttttcccagcctgtctgggagctatgtctgcaagactggccctggcccatgaagcacatgcagctccagcagctgggggcctttggcaggccaggcagccaggtccgcaggtgagccattgtgctgggtgtgtaagagaggccaggagagcaagggcccagcttcaggaaggcagcatgatctgcctgacaagcactctgacaagcatggtcagagtgagcaactgctgggctgctgagttacctaggccatgagcttggttgtctttcgcactgggcgaaggaggagaaagtgggctcagagagatgaagttgtcatggcctgtgattgccctgggctgaagtcccacatgacatatcctatagtagtattcgttggacttggacaggcagagaccctcctgggatcaggggactcacctccctgcctttgtcccctgccagcctgggaggctcttccaggtgtgaggggaaggacccaagtggagtgccatcatttgtgggtgcaattttctcacctctggagtggaggtggttgatggtctccagttgtttatggacagtgcctggctcagacaaggaaactggttttgctgcagaactccaatataaatgccaggccaccagggtggggggttcctgaccccttggttctcttgagaaatgaccaaaggctatgggacctgccatctagtttccctcactgtgtccccaccccctgcccacaaacattatagatcagccatccagagccaggagaagcagacataaaggcaagggctatcccaatagcaccagagacaaggggcctggcagaacccctgggtggaaagagccagctggcatttgggcagtggctgaggcagccaagtggggactggccaagggggtccctagagcagcctggcggcccttctgtgttctgacccaaccactgtttattttgcagacagtctccattctggagcagcggttgacactgacagaagacaagctgaagcagtgtctggagaaccagcagctaatcatgcagagagcaacaccatgatcaggggagcaggaatcaggagctcggtggatttgcaggtggcaggccagggatttgtaccatgggacttgggtaaataaaggggactgaactctgtgggaatcacatccatactggagccctggatttttgcagttctgccctccaccttgctatctgcaccaggaggctctccacctggcagccagaggtccccagtgggccgggctcacacacaaatgatgcttcagacccgaatgagaggaccacattttgcttaatgtaaaggagccacttgaaaatgtctgctccttcggggtcctgagattgtggctccccctctggaggaggtggctccacgatgccttgattttcactcatcatttggacatgtgactggcttttcctacctctgccatggtgtagaaattgattgcacattgattggatgagccgggggttttctctaaatctgactaaaggcccaaagtgggcccatctgagtcaggtttgttgagaacaagccctctcaagtgggtggtggcttttcagtggccctgatttctgttccacacgtgttcactggagccaggtgacttcctccttgcgtgagtgagggcacaggaatctcaaaattaaacctgacttcattgc

SEQ ID NO: 63 - DNA, 103218 bp, Homo sapiens
cgctggcgcggctgcggccgctgctgcctacgcgccatggagcatcgcatcgtggggcccgggccgtaccgagctaccaggctggtgagtgagtgtgctggggcctgggcggagcacccggtgccgcgagcccccactcagcgcgcggacagagtgcttgtcagtcttcgcttccgcaggccagcggggctcgggtgtggagcatttcagctgggactactggggctgccttttagtggacgagcctcaaagaaaggctaacggggcccagagctcagccggccgggggttagtgcagctttgtccatgagatgttgactgggttctcggcagtagatggcgcctctctgtttaaagaccccaagaccaggctgttccctgccttttgtcctctggaatctaaccgacccggtcggtaacctgaggggccaccacgtaccccgtaacgctcagcgttcgcggcagtccaggcagggcgtgtctccttcctgagtgacacctgatgatacctgacggggtattcgaataaacggtgcccagaacagaggggcatcgcgctggccgcatttccggcccctggcgtttctgtttctgtcagcaccgatccagatgaagagctggccaggacagatgttttaggagagtctttgccgactctgagttcctgtttttttttttttttttttctgggagaaaagctttggtattgaggtgtacttggtctgctttgacttggaacaataaagggtgacagtttggtaatgtctgtggcaagtttttagaggactttctgtggaagtgtaatggtaatttgggaggacagtaacttgctccttggtctgccgacctctctggccacatttaacatgggaattactctcatagttccatgcattataatgaatacacaggaaaagatgggaactaacatccaaactcttactcagctagactcatggaagaggtgaggatgctgggatacagataatgtaaatagagtttccttttctttccaaagccagccacacactataccagtaagtcaagccagagctgagaaggccagcttctggaagagaaatcatagttggggctgatgggtctttactttttaaatttggctcatagatcgctttgagaatctgatgaagattaaggatcttcttcacagaaaactgcacatggcacatactcatgaaattttacatgatttaaggggatggatcgcttgaggtcaggagttcgagaccagcctggccaacacagcaaaaccccgtctgtactaaaaatacaaaaattagctgggcatggtggcatgcgcctatagtctcagctactcaggaggctgaggcaggagaatctcttgaacctgggaggcagaggttgcagtgagctgagatcgcgccattgcactccagcctgggcaacgagcgaaactccatctcaaaaaaaaaaaaaaataataaggagattgggagagtctgtgacattgttttatttggcataaagacaagcattttatttgctcatcctttggatcagtaatctgggctagactcatgtcaatggttcttttgtggaggtcactcatgtgccacaaataatgtgacttggctattactggatgatggaagatggctgcttgacttggtcctggctgttacctgggccagatatctctaacaggttatcggaggcatcttcacgtagtggtctcatggttccaacgtagctaaaaggaagtttcagcttgtgactttttcttcaaatctcattggtcaaagcaagttaaacagctaaatccagattctagaaattcaactccacttcttgatgggcagggtggcaaagccacagaggtgcatgtggagaggatgggaagaatcattgcactcatctttgcgaacactctatacagtatagacaccagaatgatctggggtcaagaatattgataagtctaactttagggaggaaaataaggcatttgatcattcccttcaccaatttatttacagcacttacacaaggaaaacatagcaaggctgtggttcttgacgtgactagtcttcattcttcctgcattagactaaaaaaaaaatacctcataattggaattgtattttagtctcatattcacagaattgtatgaggtacttcttttcatggatgcagagggtccatatatagatagtgctggattcttgagtcacattaaaatattatcaaaggaatttgtttaattaaaaaaaggtgctctctgctctctagaagtcttcagtccctaacaaataatattcaggctaaatttaggttgattaagttaagaagataaatgacatggataattaatgaaacaaacacctcagtttcaccagaatttcccaggtaatcaattcagttctcaacttcatagtgtttgaggaacataatattaaactaagatgtggaaaacagaaaacaatagccaattttttttttcaaaagtgagtattcctgctgtcagtgattgcagccaacattgaagatgcttctttccattgtaaagtctgtaattgtttccccagtgtaattcagctgtgacttaaagcttttgctaggtaaatcatatatttaatagtttgagactagtcctctttttacttgttggacctagttggcctttcctccctctatctgcagcatacaatttctcccttttcccatcatgctcattctaaactttcttcaggggaagcttggtaaaaatctattgggatacaaaaactaggcctttattttctcctttcatggctcactttactttctcaaagcatgtacagctttagaaaaagctctttggtgctttttctaaagcaccaaagtcttatttgaaaataacattttgtggattaggtaaaatgttatgacaaaagtcaaatgacagccccaactcatgataaatgtgaagctagttatccatttatacattttcactgaaataactttcatctttgtaaacttggtataaatagttcattcaagtagagagaaaaattttttttctagaaactgcttaaatctttgaacttattctgagttatatatatggtctgatgcaactgataaattttaaaagacatacagctttcattgaatctgagagttagaatggcaagatcacacaacgaggttgtggcaagtgcaagtagatctaggagtggttgtcactgaactcccagaccagtcagttttctttatagcaccgctatcataatatttttggtactaagaagaaatgaaatggaatatcctggagaaaagaacaggatgcacagcagtaggtgtatgtcttatagtttgcctcatcatgttaagaaaaaacaattgtgtgattttattttttcctgagaaactaggggactgaaattaataagtagagcaaaacaaaaagtgttttaaaatcataaaacaaatctgttttgttccatttgttgtaaagattctcttcaaatataatgtcatgaaaaaaaaactcaagctctttcttgttatttattgacagaggatattttgtttccaaaagtgactgagaatggtatattgttagattatttaaagatacttatttttctttctgagcagagtagccaaataaccccttagttatatttggaaataagtgggaacagagaccaaagtgacctcagtaggctttaaaaaatctaaagtatttcatatattaaggaaatataacccataatgataaatgccattcaaaatcaaaatgagtaaattcaaaagtctatttataaatgctctttttaaaaggggcaatgagactttgataaagatgttttattagacattttctagtatgaaataaaagtcagtagcaatagagcagttaatccattctgaatcctaatggatttttttttcctgtgtgggagaatgcaatgaattgaaagctcatgctgaagagtaaaattctgagaactgaaaaaagttttccctcacaaaaagaaatgaacttcacaaaaagaaattttcacgctgggtgcggtggctcatgcctgtgatctcagcactttgggaggccgaggcgggtggatcacgaggtcaggagatcaagaccatcctggccaacatggtgaaaccccgtctcaactaaaaatacaaaaattagctgggtgtggtggcacatgcctgtaatcccagctacttgggaggctgaggcaggagaatcacttgaaccagggcgtcggaggttgcagtcagccgagatcacgccactgcactccagcctgggcaccagagcgagactctgtctcaaaaaaaataaaaaaagaaagaagttttcacattcccttacaaagaagacaggggccttgtcctaccagggatttatacttggtattaattgactgtaatgacaactgtatggtattacacaggaacagatagtcgctcagtgggatagaaacaatcaagaagtgtgatatgtaaggttacttaataatatttctgttcatttagaaaagcatggcataattgactcttgatatggtttggacgtttatcccctccaaatctcatgttgaaatgtaatccacagtgttggaggtggggcctagtggaggtgtttgggtcactggggcagatcactcatgaatggcctgttgctgtcctcatgacaatgagtgagtattcactctgagttcatgtgcgatctgattgtttaaaagtgtggcaccctgtccctcactctctcttgttccccccttgctgtgttatgtgcctccttctgcctgcttccgcttcaccttctgccttgaataaaagcttcctgaggcctcaccagaaactgagcagatgctggcaccatgtttcttgtacactctgcagaaccgtaagctgattaaacctctttcctttataaattacccagtgtcaggtatttctttacagcaacgcaagaatggactaacacaactctccatccagaaaaaaatagagatcccctgcctcccaccatataaaattcagttaaaggtttacatattaaaaaacataccctctaaaatattaaaaggaaattttgataaatattttaatacctcaggatagggaagctttcttaagagaataaaccctgaactgataaagaaaatagataattatttccttataaaaacatcaacatctacaacaaaatcattgtatagctagagactatgtaaagaaattgataggctaagataaaacatttgtaacatataacaaaaaggtttaatattctatattcatcagtacatattaaatgggtatactatatgtcaggcactggtctttgttgtgaggatattgagctgaacaaaatcgattaactttcctgacttctgtgccctttaaacattaacagattaaacagttcttaaaattgattttaaaaaagagataacccaatagaaaaatggcaaatctcagaagaagaaatgaatatgactaaaggtaaagatatgaaaatgcaaacaaaatatggatctatcatttcttttacatagattggcagaaatgaaagaaatgataacatctagtgtaggccaaagtgtaaggctttaggctcccacattgttggtggaagtgtgaattgctacaactgatttaaatatgctgatactttttagaagtctatcaaaagtaaacaaaagccttggtactttaggttatataaacaagtataacttgtaacatatttgtaaaaattgaactgggcagaacttggatgaccatttgttagaaaatggcagaataaattatggcacattcttaagaatgggctagatctgcaggtatgacgcagggaggtatctgttaggtgcaaaagcgtgttttaggataacatatacaacatgattgatctcattttttaaaatggcaaacaacaataaatgacacacctacaaaggaaaaattctgtctatgtgtctgtatgtgataggtatggagtaagacatgcaaactcttttgtgtatacttctgtatttaatttgtttgtttcaatgagtgttattacttctgtaattaaaagaacaacagaactgctaaccagactgggtcaattagtggatatacctagtgatatttggaaatattgggtcccagagagccatgccttcattatgtttatgtaatgcataaggtattatgcattaggtaattttagttcatgattatgattgttcaaccaacataaacaaaaatcttttttattaccccttcccccggccctacatacttgattatgccttttcggtacaacaatctaatgataaatgaaagctaggtatcagggcatgtattaaaaaaatcaataatcaatgattaaaaatatgtgaaaattgtttaaaggtatggtaatatccataggtacttggtatagtgaaatgactacttgaagaaaagtccgtagcacaggattccagatcttattcacagactaagtacctgaatgacatttgctaagttgtgtatcctgctaaggtcttgattttgtcccaaagattttttccagctctagaatagattgaaccttataatttaagagatatcctggacattttatatattatccttaaatttgaggaacgcatttttaacaaaggacttttatagtcatgatctcatttgatcttacaataaccttgtaaagtgggtggataggtagagaagttaaatcagcgttcttggactctttatgggcttcctttctactattcattatttagcctttgctctgcttttcctgtttacatactttccctccttcatccactcacttggtttcttctccaacctccctactctcttccacatccagtttaccaccccaaccaaccagttcatatttgccaactttcatgtgggtaataattttagtatgtgaacatgtgcatatgtgtatgtatgtgtttttgtttttaggtgttaattaggcataatgtacagaaaaatgctcaaaaaatttgttgagttgtataaaaagtgtacaactcaacaaattttcataaagtgagcatcccatgtaaccaacattcagatcaaggaatatcatattactagcaccgcagaagtctcctttcccccacttggtccctacctccttatgaaggtaactgctatcattattttaaatatcatggatcgtttggcctgcttttgagcttcaagtaaatggaatcatatagtatttacttttcatatgtggcctgttcatctcaatattattttctgagattcatttatgttatggcatgtagcaatagttcgttcattttcactgcattctattggtgaatatattataacttattatgttgatggacatttgggttgtttctgcctattatggatagtgccattatgaacaatgtgtcttttggggagcatatatatggatttctgttgggtatatgcttaggagtagaattgctgagttataaggtgttcagatatttagcttttgtagatattgccaatctgttttccaaactggtcgcaccaatttacattccttacagcagtgtatgagatttctagttctttcacattcttaccagcacttagtgttgcctaccttttttcttattttttaggtctctaaaaaaaattttagttttgtaagttgtaaactgacaaattatagttgtatatattcatagggtacaaaatgatgttatgatttacgaattcaatggaataattaaatcaagctaattaccatatccatcacctcaaatacttaacatttttttgttgtacacttgcaatttactctcagattttgaaagtacattattattaatatcttcaccatgatgtcaagatatctcaaataaaaaagataatttcctgtctagttgaggctttgtaccttttgaccattatctccccgttccccactcccctcagcctctggttaccaccattctgctttttgcctctttgaactcaattgttttagattccacgtataaatgagaataggcattatttgtttttctgttcctggcttatttcacttggtataatgttctccacttccatccatgtcgttgcaaatgacaacatttctttctttttttaaaggctgaatagtattatattgtatatgtataccacattttctttattcatttatctgttgatggacttttaggttgattccataacttagctcttgtaaatagtaaatgacatgggagtgcagacatctctttgacatcttgacttgaaatgttttgggcaaatacccaaaagtgggatcagtagatccacctgtctttcattttagttattctgacagccatgttgtgatattgacttgtcgagttcttttacattgcactgataattaatgaggtttaacatctttgtatatgttataggacatttgaagatctttttttttatgatatacctgtttaaatttttttttcattttgtaattggaatgtctttttcttattgattttttttgttttgtttggaaatgatagatatatcttatcctactcagtggcttgccttgtttctgtgtgtttttaagttaaaaaagattttaaatttggactaacttaatttggagcatgactcacaacagtgtcaaaagaagtagaaagattaacgtaagaataaaaagctatttcagtttggccaggaggaagacatgactagcaattagtgggattaaatttcttgaggttgagaagttggttaaaaaaagtagaaaaagtgctgggtgtggtggctcatgcctgtaatcccagcactttgggaggctgaggtgggtgcattacctgaggtcaggagttcaagactagcctgactaacatggtgaaacctcatctctactaaaaatataaaaataagctgggtgtggtggcgcatgcctgtaaccccagctacttgggagactgaggcaggagaatcgcttgaacccgggaggcggaggttgcattaagctgagatcatgccattgcactccagcctggactatacggtgagactccgtctcaaaaaaaaaaaaaaaagtagaaaaagtgaaagatcgattaagcacttgcttattgactacctagtgtgggtcacacactgtgctacacatccggggtacatgcatacacaaaccccacttctgtccctcaagctcctgctgttgtatgctcaggaattatgaatgtggctgagaaggttagccatcaaaaataaaagagaaataggataatagtttctcaggtggttgggcagcagagagtatgaagagaaatctggaagaaaagtcatgattagaagggaaaacatgacccaaggttgggcaaaaacaaacaaacaagcaaaacaaacaaaaaacaactctgagatcagaaatacagtttaaagaaaaagatgacgtcagaaaaatctgatttaaataggaagagaggtgagagacaaaagattcggagtttataaagtgacagacttgaaagagaagagtaagagaaaatgagaatatgactatgaattttaaggactttaggaggactggcagggagcctacgttcctaaaaagatgttgaaataattatgtagaaagaaattagaaatatgttacacaataaaagttgccttatattccttcttcaaaagagatgactttcctttatttttaagtttgttgtatattcatttagcttttcatatgcatataccaaagcagataggatcagattatatatagtgttttgtacgtttttcttccactttgttatatttatggtatctatttctgtctggaactattgatagtattttgttttgtggctattccacgcttcagtcaattttattcaaattagttctagtttttctctgattataaaatggcaaattagttctaatttttctctgattataaagcataaatatacttatgtttataagtatataaaatgcttataaatgctttctctgaaaaaacacttcaggtttattaaatataattcaacatgtttaaataaaatttaacttgtaaatacttttatctttctttgagacagggtcttactctgtcgctcaggctggaaggcagtggtgcaatcatggcttactgcagtcttgacctcccaggctcaagtgatcctcccacttcagcctccccgctcagtctgccaagtagctgcagctacaggcacacaccactacacctggccaatttttaaattttttgtagaaatggggtttccccatgatgcccaggctggtctcgaactccttggttcaagtgacctgcccacctcatcctctcaaagtgctgggattaggggtgtaagccactgcacctggcctgtaaatgctttttaatccgttatatttctgcttctacatggtgaatccctaaaagtaaagtggctgaaaaaaaaaaagagatcacatcttatataagcatttattaaacaagtacttatgagattcttttctagagctagctttaaaacaatatggagatgagactattatttccctttaacatttttgtattttcagcagactgtaggtagaacatagatttgttaaaattcaagatacagatttgaatatacaaattggttctaccacttattagctgggtagatttgagtaaatttcttaattccttctgaaagatggttattatgaggattacatatatacaaagacacaatggggacacaagtttgggacatattatatatagtctaatgagaacaaaaaagtcatttatttgcttcctgatttcctcctcactgatataacttcacagatataaggagaaagaagctgaattgtcatgaagttatttgaaagtaacatttaagagagacatctggtttttgtcttcaaggatgctatgagacatggcagttcacctgccgcctagtggcatcttgtagtggaaggaaactggattttttttagttctcaaccatgtgccagggcctgtgcaaccagtatatggcagaactgggatttgaactcaagtctgactccatacctcttgttttccccattcctcagggattgattctgttatcctgaagtggtccagtgtttcttatacttgaagattaggatcattgtgtggtgagcatggccagcagtgtattacagtgagttagtatgtacttgatttgacaaaacgaggttcctaaataaagtggaagcaatgggatatatattccctggacttaactgacgtggatccaatcagtgtgtggtgtgctgtttcttagcagacctctcattttaatttccatgatttttgactcccaaaatctgagattttttgagcttctagggccatatttttatttaggacaaattcctagagaaaagtgttaactgcaccaaagccacatagttattggcagaggctggactaatggccaatggagactccattctggggtctttccaacgtactcactcagctctgacagccacatccaccctgataatattaataaatacagcagcaatgatgctataatggctaatgtttattaagcacttctttcgtgacagacactgtgataggctgcatcaacattatctcatctggtctttgtaacaaccctgtcatgtgggtactgcattacaccgggagtaatggaggcttgtctagcaatgagtcagtttgccctgctggtctgttgtagaataggcctctcaacccagcagtgtttgacttcagagcctgagctctctctacccagtctacttttcagtgtggtatctgaagatgtcatgcacacttaaacttctaggtcctttcaaaggaaccatgaggtagttttaaactaatatatattatttgaggtatctagtagctattctttcaaaaagctttgttttgcatgtaagcaaaaactggctcatcacttttcaaaggtttatctttgtggccttgagctgtttgacatcaggcactgtattatctttttcatctcttttcctcctcctcctacaatgcctttcacataataagcaacctagaaatatttgctgaatgaaggtaaagtcattaaacaggggactccaaaaagcaaagtttgcacagtgggcttagttttaatcattatttactgtatgttctttgtttatgtaaaaatccattaataggacaacttgatggcaatctcctcaataaataatatttcttgaatgaataaatgatgaaccacccttgaaaagctgcattttctttacagttttttttcctatcaatagtttctatttttgaggccgggtgcagtggctcactcctgtaattccagcactttgggaggctgaggcggctggatcacttgagatcaagagttcgagaccaccctgaccaacatggtgaaactccatctctactaaaaatacaaaaattagctgggcatggtggtgggcgcctgtaatctcagatactcgggaggctgaggcaggagaattgcttgaacctgggaggcggaggttgcagtgagcagagacacgccactgcactccagcctgggcgacaaagctagactctatctcaaaaaaaaaaaagtttttatttttgttttaattatggtaaaatatatataatataaaactattttaactgttttttatatatatagttctatggcactaagaacattcacagtgttgtacagccattgccaccatccattctgccaaacttttctttattagagtttgaagcctgtaaataaaacattttcaaggctctacctgttattaaagcagtttaagtggaaaaattgcattctttgctttaattatttgagatgtagtaatcttaaaaaaatcagttgattactaaatgccattctctttctttcccctagtggaatgagaccgtggagctttttcgtgctaagatgccgttacggaaacatcgctgtcgtttcaagagctatgagcattgtttcacagcggccgaagctgtggattggctgcatgagctgctgaggtgcagtcaaaacttcggccctgaagtgacccgcaaacaaacggtccagctgctaaaaaaattcctgaagaatcacgttattgaagacatcaagggaaaatggggtgaggaagattttgaagacaatcgtcacttatacaggtaatggcaacatgtaaacctggaaggtgaggaattggggagatgagtgaatctggtccaagtctgttgaagcttcctgatgtgtaagaatttaccttgttcactgaacagtgggtctagttgtgatttgttgagtggagaactgaatgtgttgctgcaataaaaccagctgggatttttcttggcttcttagagcataccagagctgtgttttgttgcagtgatgtttcagtaaggtaatcttttcatgccttttgctcacctgggaaatggtggccataacttagtacttctcctggagaatctgaaatggtgaaacagtagctctgggttcagcttttctgagcaatggggattggtatattcaggaggttagtagcagagtgtgtgtgatctttaaacagctcagggcccatgtgaagaattatgctagaattccctgatgtctcagattaagcccgacaatgtgagtccacttttctgcaaacatttttgctcatgtttcagtgctattttatcatgtggacacttaccgccagataatccaagggaaaataaaggctgcttgtcttgcacttcacttcttactgcatacttggcagttttattgctggaggtggaggagagcaacctcagatcaggtgtgggagaagactaaagaggaatgaagtcacacaggtccataaaggaattgttgagttatctacacggattaaaagaaggaatggagaatatggacccttattacgtgctttcctttactccagctgaaaaataagtgtgattgcagcatattcagtgagggcattccactgggacacatggctttgcacagagacaacctggctctttcatacctgaaccatttctttgtctccctcttggactagctgctgagaaaggcagagcagggtgagactgtctgtcgtgagtgcatagggtgaagaacagacattgctgtgcattaggatctaacttcctcatggagtttcatcagcagtctcttgagtccagatatcagtattgtcatctgggcaattagtcatctgtccacttggtggttagttttggcgttgctgatcccacttttaattaggatattggataatcttgacctattctgagaccttagtacttaatagcatcaggcagtggaaattttagccctgattctacatgccatactttattgggaattcttaaatgattatttctcttgggaaactttaattgcttgtaccctatcaagatttagctagaacacttctgaaagattctctggatgagtaacttccattctattctattgtgaccttaaattgggtacctcccatcgagtcccaggaggctttatgagtcccagcagagtaaaataggagccgactacccagcactaactgccagaacatgtttcacttcaatattaagacttaaccatgtatccccctttaaaaaatagagtacacaagacatattaaattcatccattaaataattattttttcctccagtttctctaatagaattcttgtgagtcataaatggagcagtatttttttttttttcaccatttactacctgaaagttcattatggctttccattttcctgagtggaagttgtgtaagttaaccaccaacttttgccaattacctagattaagctgggatgaaatccgtttagacatgtaaatcatttgttaaggtgcccgtgccttgaattgagagtgagctaatgagtgtacagccggccgttgcatacatgcaggcttctattacagtgctccacgaaagagcatttggtgtcctacctgctgtgtcttaactgctttccttgggcaaagagtactactgccaagttatgaaaacagaggaggagagtatgagcgagaggcaggttagatttgacaatagccattctaactgaagtgagatggtatctccttgtgattttcatttgcattaccctcatgattagtgatgttgagcatttttttgacatacttatcagccagttgtatgtcttcttttgagaaatatctattcagatcctttgcccattttttaattggattatttgagttttgttgttgagctccttgtatattctggatattagtcccttgttggatgaatagttttcaaatattttctcccattctacgggtttactcttcattgtgttgtttgctatgcagaagctttttagtttgatatagttccatttgtctatttttgtttttgttacctgtgcttttgtagtcttacccataaagtctttgcctagatcagtgtccttgaaacatttcccctgttttcttctagtagttttatagtttcaggtcttacagtttagtgtttaatccattttgagttgacttttatacatggtgagagatagaggtctagtttcattcttctgcataaggatatccagtttttctagcttattgaaaaggatatcctttccccaatatatgttcttggcatcttggttgaaaatcatttggttgtaaacacatggatttatttctgagttcttttttctgttcctttggtttatgtatatttttataccaacaccattttgtttcattactattgctttgtagtatattttgatgtcaggtagtgtgatgctgtcagctttgttcttttggcttgggattgttttagctattcaaggtcttttgtggatacatacaaatttcaggattgtttttttctgttctctagaatgtcatttgtaatttgataaagactgcgttgaatctgtagattgctttgggtagtatggtcattttaacagtattaaattcttctgagccatgtgcatgggatgtctttccatttttttgtgtctctcttcaatttctttcaacagggttttgtagttttctttatagagattttttcacttccttgttaaatttattcctaggtattttttttttgtagctagtataaatgggattgcttttttgatttcttttcagctagtttgttattggtgtatagaaatgctactgatttttgtgtgttgattttgtatcctataactttattgaatttatcagttctgaattttttagtggcatcttaggattttctctatataagtttatgtcgtttgtgaaaagggagtacttgacttcctgttttccaatttatatgtcgtttatttctttctcttgcttaattgctctagttaggacttccagtactattttcagtaagagtggtgaaactgggcatcttatcttgttctaattcttagaggaaaggcttgcagcttttctctgttcaatgatgttagctgtgagtttgtcatatatggcttttattgtgttatattccttctgtacctaagttatggagagtttttgttatgaatggatgttgaattttatctaatgctttttttctgcatctattgagtggtcatatggtttttgtccttcattctgttgttgtgatgtatatatatataagtaaatctttatttctttcactgcattctctctttctttttgagacagggtcttgctctgttacccaggctggagtgcagtggtgcgatcttggctcactgcagcctcaacctcccaggctcaagtgatcttcccacctcagcctcctgcatagcagggactacaagcgcacgccacatgctcagctaatttttttaaaaaattttgtagagacagggttttgccatgttccccaggctggtcttgaacccctgagctcaagaaatctgctggcctcagcttcccaaagtgctgggattataggcatgagccaccatgcctggcagatttgtgtatactgatccttcctttcatccttgagctatatcccatgtgattattgtatattacctttttgatgtgttgttggatttggtttgcttgtaatttgttgaggatttttgtatctatgttcatcagggacattggccactttttttctttttttgttgtatctttgtctggttttggtatcagggtaatgctggccttatagaatgagttagaaagaatttccttctcttccatttttttggaataatttgataagaattgatattaattcctcttcaaaggtgtggtagaattcattagtaaagttgtccagtcctggacttttctttgttaggagactttttattagtgattcaatcttgttacttgttattgatctattacagattttctatttatttctggttcaatcatggtaagttacatgtgtctatgaatatatccatttcctttaggttttccaattcgttgcttatatttattcattaaataggttttctatgccttttgccatctttcactttctgaaatgctcaagatacacatatttatttgcttaatggtaatcccatatgtcatgtaggctttctttattttctttattttttaatttttatttttttaattatactttaagttttagggtgcatgtgcacaacgtgcaggtttgttacatatgtatacatgtgtcatgttggtgtgctgcacccattaactcgtcatttaacattaggtatatctcctaatgctatccctccctgctccccgcaccccacaacaggccccagtgtgtgatggtccccttcctgtgtccatgcgttctcattgttcaattcccacctatgagtgagaacatgtggtgtttggttttttgtccttgcgatagtttgctgagaatggtggtttccggcttcatccatgtccctacaaaggacatgaactcatcattttttatggctgcatagtattccatggtgtatatgtgccacattttcttaatccagtctatcaattgttggacatttgggttggttttttcttcatttttatcagacagggttatttcaaaagacctgtcttcaaatcgagaaagtttttcttctgcttggtctagcctattgaaatgttggttgtatgcttttttatttcatttactgaatccttaattttcaggatttctgtttggttctttttaattataactatctttttattaaatttctcattcagagctgggtgtggtggtgtgtacctatagccccagctacccaggaggtgagagtattgcttgagtaggggagtttgagtccagctagggcagcatagtgagaccttgtctcttaaaaaaaaaaattataattcagatcataagctattttccttatttctttgtattgtctgtctgtgttattttgtatcttattgagcttccttgaaatcattatttgaaattctttttcagacatttcattgatttccttttctttgagatgttaatggggaatgattgcgtctctttggaggtttcatgtttccttgccttttcattgtttttatgtctcaatgttgttatctgtgtatctggtggaacagttgcttcttctagttttatggattggcttttgtaggtaaagacttttttcctgtagatctatctatagtgttggctggttagagtgccttccctttgattttgggtatgcacagtaatttagtctctattatttctttggctgtaatcaatgccagtggtgtctgtgagttcctcaatggcttaggttgttggcagaggctgtggcaaggcttttctgatgatgtagatgccaggcaggctggtcctgccgctctgggtggtgtatgtgtgcccttgggtggtggtagtgggcaaggtgtgatggtcctcaggtccctgggtggtatatgcaggtgctggcattggtggtggggggcctgggtgggctggtctgaagggaaacattttgtaagtagttctgagaataatggaatggacattgaagggttcttgctggaaaggaaggaactaatgttctagagcttctatgttgttccatcctcatcacataattcattatttaactcaacacctgtaggtggaaatggtagtatcctagttgtaaagattgggaaattaataaagccaaaataactaactggtccaaagtaatccaggtagtggtagaagagtcaggatttgaaatgaggtcttcatctctgaagcctatgccaggctgcctctattttcacaacatgaggttgacttagtttatcaaatatattagtgaatgaaagagtaaacacacagaataagcaagaaacatttggtgtaatcaacacgtttatattcacaaagttcttgcaatgcattaagtaccatgtaatacgtattaaatgatgaactgtcttcttcaagaagttcttctcaaataaagaaggcaagggaaacataacctaaatacttatataaatatagcaaaagagaggtggtttcctttatctatttgttagagaaagctacctaaaatataagggttctttttgtatattttgaagagagggaatttgcatatatatgttagagaattttataacaaagatgattagtaaagcccttattttggaatatgtcaaaaatgatttctagatttaagaaatgcatgtcatatttgttctgtgaatgcatttaaatttgtaatttttttttaaagactcaagatgttcagtatagaaaaattgaagggaggagtgaattttagtgtataagaaaggaaagcaagttcataatatctgaatgcctataataataatgagatgttacagagatgtactcagcactatacttctttcctgttaaccaacagcaattactagaaagagttctgggtttgctgctggtgaaaacaattttagatttcactaaatggtgctcatggttgaaccaggtgctgttgtctgtgtcttaaagcttcatgaccctaaacttctaatggatgaggagattgaattatactactttatatgtttataagaaattttggtttatgaaacatttctacttctgtgatgtcatttaatctttatgatctcctctgatctttacgacaattctatgaggtagacagggtacatatttaatcctcagacactttcccctttaaaatgtctaaacaaaacaccaagaatgttctaattaaagaaattctgtacttactgcttctgcccatctgtgtatgtgaacaattacgtaatattatttaaacctaacttagtgggttctatacaaataaaaatgtatattatgataattgttttggattatttaatgagaaaagtgtttgtcctgttgtagccctttagcaggaaaggtttctctggcatggagcctatacatggctcctgacttgctctcatcactggtgctagctctggtgggtggttgaactgggaaggttttcatggcttacaggtagaaattcacagctcagatggtggggattgagatctaacatgtagggaccattttctttttatttcctgcctgtctcattcctttttttctttccttctcttttttcttttttgtttctacctctgtgtgtgtcattctcatgtttcaacttctctttttcttcctctttctttctattccttttctctcatactttcttgcttttctggcctattttcaaaatactgattttaatttgaaactaaagtttgttatgtagctatcgccagatttattgaataatgttactttcacagttcttaatgtaaaaagcagaggaatcatactacccagttttatggcttagtatagaaagccatagaagttaatactatggtgttggtgaagtgaaagacatatagatcagtggtacagaatagagagtccagaaacagatacatataaatatgccaatagatttttttacaaagatgtaaattctatttaatgggaaaagatgagtattttcagcaaattatgttggaataattgggcatccatccatgcatgtgccaaaataaaaaaagaacctcaacataaaccttatacttcatacaaatattagttcaaagtggatcatagatttaaatataaaactacagaacttttagaaaaacaggagaaaaatctttgttttggtattaggcaaagagtttttagacatgacactaaaagcaccaaacataaaggaaaaatatgataaactggatttcatcaaaatgaacaatttttgctctgtgaaagacattggatgagaggatgagaggacaagctacagatggggaaaatatttgcaaaccacatatgtgacagtggagtgctatcaagaatatgtaaagagctcatcaactcaacagtaagtaaacaagcaatccaattgaaaaatgagcaaaagacttgaaaagacatatcaccaaaagtatgcagttagcagatgggcatttgaaaagatgtttgatgtagtatacattagggtgatgcaaattaaagccctagggagatacaactatgtatctattagtatgtttaaaataaaaatactaatgatatctagtgctagtgaggatgcagtcactggaaatcttatacattgctgttggacacctagattgttagtcactttggaaaagttagtttcttttaaagttaataagtacattgactatatgattcagcattcctactcctgggtatttatcctagagagacaaaaacaatgtttacacaaaaactcgttaagtgaatatttatagattgccagtaactggaaataacctaaacattcttccatgggtgaatggataactattgtacatccatacaatgtagcaccgctgggtggcagaagggtgcgactgtaaagggagagcaggaaggagcgttttcgggagtaatggaatagttctgtttcttgattttggtggtagatacacaagtgtatacatgtgttaaacttgatagggctatacaccaaaaaaaaaaattttattttaccatatgctaataactttcttaagctagagatttgcaaaacctgtatttgtacctccagtgaaagaaactcaaatttaagttgtttgagggaggtggcccttaagtcattttctgtggccctgggaaaaattctttcatcactacccaataggtcttttggacccgttttagatacctcacctttaaattaatggactacttcctccctctagtggacatcttttgtttttctaggaaagcacaaaacttgttagtgtgattttatttttcttttgtttttactcatttcatcgtcatgggttgttgtcctgtgattagttggataagttcttagccttactgggcattggttttctcaaatataaactgacagggcaacaaagtgataccctgtctttacaaaaagttaaaagtttagttaggtgaagtggtggcatgtaccatagaccaagctactccagaggctgagtggggcagatagcttgagtcccagagttcaagggtgcagtgagccatgatcatgccactgtacttcagcctgggtgacagagagagaccttgtctcataaaaaaaagaaaaaataaaaaagaaaaaaatgacagggaggactagatctttaagatcctttttagttctaaacttttatgtttccaggtatggagtacctatcacatgttttccaatccgtggcagtgaaggatctaaaaaggaaatataatgtgattctttatctgcctgactttataatctcttttgagagagagagagagagagagagagagagagagagagtgtgtgtgtgtgtgtgtgtgtgtgtgtgtgtctgtatgaaaaagattctgctacttagcagaatcaagacagtatttaattaattacctaaaataacccataacaaataatcagttacactggcagtcattgggttgacatatctattttgtttgaccagtattgtggtttagtcatcaagttttttctatctcctttttatttttaaattttgtatattttgtgaagataatacatttatgtggttcgaaatttacaaagtgcaaaagggcatatgcaatgaaaagccttcctcacatatccctcccccagccactcagttctctttctcatagacacttaacattattaacttctagcacagtgtcttaatacattatgaaccggaaagtctttagatggggcaaactcactccagtggccacattccccaccatttccctataatattataccagactgtatcatgattatgttatctgcctggccattgtaggaattgtgtctgtgatccagttggtgtggactggagtgtttggaaccttatggaacgggagggggatggggaggagaaggagaaggggaaggagacggaggaggagcaggacttcagcctgggtcggctaaacagtgcaggatctggataaaaagaagggatgggaaggaaaaggaaagatggcaagatcaaggctgtcagtcaaaaacacacaaataagcttcctgggagaaaagggaggaggatgacccggctggaacagaaatcttaggtcaggaaatcatgagggatacatttggtggaatttcttacatttctgactatggagtagggttttatttcaaaaggagaagttattaaagcgaggcatagtgccatgcgcctgtagtcttagctacttaggaggctgaagccagaggattccttaagctcaggatttttttttttcattattatactttaagttctagagtacatgtgtacaacgtgcaggtttgttacatatgtatacatgtgccgtgttggtgtgctacaggatttttaaggccagcctggggaacatagtgagaccctgtctcttaaagaagaaaaaaaaaaaaaaggccgggcacagtggctgacgcctgtagtcgcagcactttgggtggctgaggtgggcagatcacgaggtcaggagatcgagaccatcctggctaacacagtgaaatcccgtctttactaaaaatacaaaaaaattgtagctgggcgtggtggcaggtgcctgtagtcccagctactcgggaggctgaggcaggagaatggcatgaacccaggaagcagagcttgcagtgagccgagattgtgccagtgcattccaggcctgggcaacagagcaagactccctctcaaaacaaaaaacaaaaaaacaaaaaacaaaaaaaaaaaaaagaaaaaagaaacagagaaggcagctactgttagtgttttgagcagtgatggagtctttgttctagaacagagttaattgaataatagggacagaatagattgtaaggcagagaagctggtgaggcgtttaaggtaactggtgaaagcgatattgcctagatgagaatgctagccgtggggctgaaaaggaaggaagggcctgtgttttataggcaaatttcaggctagaccctgtaactgctctgtatgtagtccgtaagctttgtttgaagtctgattatttttgaacaaagttttaaacatattgttcattaatctgaaattgctagttacatttagaatctttgttaatgtttagcatctgcttacagaggcttggaatgtaactgtaactgttttcaagccaatgaacagttcttcaaacatacctgcagtgtttagtgggtgtctaagtctttgtgatgggtttgttcctaggtaatctctcaaggattttggagtccctggagctgggtgactgtctcagagtctgtacccacatctcccacaaaggtcaagaatgaatgcccaggttgttgtgggataatgatgaaaatatacatagggacaacttggttgctgccaggcatttcttttctatttctgtttcttgccaaactccttttctattttgtaggaatcctcatttgtgtgggtgttggtgggaggcagggccctgtgccctacagtggaaaccgacaggggtgagacactcctgcttcctacccctggcagtgagggctcaggcatgtcttctccttggtcatttgtatgttcctccttaggactttgaatcttgaatgaggcatgcaaaggggaagggacagcttagaatcctcctgtgacagacgtggtggactgcaggagcaaggacagaagtacacagaggcatccagagctactggcagtggctttaggaccagattgttcctggagcatgaactcacttgtgcttccttctgtgtgtgctgggtggcctccttttcctcctttgtcttatccgccacccccatcttgtttctccagctgtccaattgattttgtgttctatttggtatctccaaattcctttatggttaaatcagccagaatttgtttctgttccttacagttgcaactaagaacccagatggatataacaagcaatggctgtagagtgagcaagactggggcagctttttgggcctaggaaatagcacaatgactattatgtgtttgtgactgcaacagattattaggtgtatgtgaaagcaaagcaacagatcatattgatctgtagcaatcacacatatgggggatggatttgagttcaggatcctttgtaggcactgaagcacaggagcagagtctaccaagtataagtagtaggccagttatatgtggacccaaggttcaaagttatgtattaagctgataagtcaaactgattctggggttatgttatcactgccatctttgcaaaagaactagtacatgtaggtgtgttaaatagaatgttgaaatatattgccctgagtcataaaaggtaattcctggttattgatagacttttgttttataatgtccttttttaggctttttggtgattaactcatgataatttcaaatccttggcttattcttctatcctgatccttcatttggggtcatagttcctgctgatttctttatccttttcctttatatttatttgttttaaacacttggtcttaccaactggccttgaaatttttttttttttaatatccttacccaggtttctttgctgagaattcatgatgcctagttattatccactagtgtccttaacctctttattcctgagtttgcaattttttgaatttttgcaatcagaccttggtggtgaccttgagcagtaggatagagatgactcccacatgcttagcgttccaataatggaacaggaggcataaatgagtttaaatgggaaatggaataaaggactccagaaatatgaaaggagcacggctgactgaaagctcccaatttacacagaagagaacactcttttggagagaacagggattgaacaagagtagttctcagatattattgacctagaaacaaaataataaatatcatataggcattaatcagttctaaactataacttgctgagaagagtggtaacttgccttgagatgttggttgttaagactagatttataaaagttgttgaaagctggggtatactattccctgaatttgtggagttgacaagctctcaaactaggaatgggagaggcccaccaaatgtttcctgtgaacataaggaagcacagtcagcttaagcattttatgcagctagtgcccagtcagcatttccccagtcacttgattaacacttcttttccggcttcttagctcagttttgtgtttttgggtctctgttaattagatcctcacatatgctgcttcttccagtgccccccgctcctcctcctctcctttctcaggcatcatggagttcctgttgtatgccaggcatggtgctaaacacttttgatgcatgcccctatctatagtttagttagaaagacaaacagataaattcgaatttattgtttcacatgctgcaatgtatgtgaattcattgttataggagggctgaggaattaactctgcttgaatcagtcagagaatagtttgctgtagaggtgacacttgagtcttgatgcatcaacaggtgtgtgtcagggaaggaagggagacaggttggtcagggtgatcaagggcgcgggaacccagtaaacaagttaggtattattacacaggcagttgtgggagataaggctgtgaaagaatttgccttttatctctgtgtcctcaacacccagcataatgcccagtatttattgacaaagaagttcaaaggttagtcagtgagttccctttcttactgtgaaggagttaaacaataatcaccctacctctgttccccagttaaggtcgctcagtcctccccatatcaggtgaactgcagttaagtataatgtgagcttagtatggaaggactataacaaacacaggtttagaatgaggcaggcctggggtctaatctcagctttcagttactaccattcatgtgatcttaagcaaaatgctgacactctctgaatctctgtgacctcatctacaaagtaagactgctaacatttctgtttttaggatatactggtcaccaagaatagatgtaggtatgacatgatttgcctctgtgtccccacccaaatctcatgatgaattgtaatccccacatgtcaggggagggacctggtgggaagtgattggatcatgggggaggatttccccctttctgttcttgtgatagtgagttatcacgagatctgatggtttaaaagtgtggcactttcccctttgcgctctttctttctctcctgccaccttgtgaagaaggtgcttgcttctcctttgccttctgccatgattttaagtttcccgaggcctccccagccatgtggaactgtgagtaaattaaatctcttttctttataaactacccagtctcaggtagttctttataccagtgtgaaaacggactaatacaaggtatttaccaagtctactgtaacttgcgctcaaattgaatgagccagttgttggggatacagtgggaacatgacagacagactttttaccctggtgaaggctatacaacaagcaaataagtgttcctttatctctgtatccaccagacccaggtcaacaaacttgatctgaaaagggccagatagtgaatatttgcaggtcatataacctctgtcagaattgcttaactgcagttgtagggagaaagcagccatacacggtgtgtcaatgaatggacatggctgtgttccaccagtaagactttacatctaataaagcaagtggtgggatttggctcacagggcatagttgttagactctaagtttcttgagggcaaagactgttgtttattcttgtatctttgttacctattggtgtctgatatgtggcaggtacttacattgtttgcactgatctgaattcattacacataaataagtacaaactaataggagactccattaattcaggtcctctgagaagagaagcagatgccaagagggaactagatgtgcaagagatttaatgccaggggttggggtggggcaccaggaaaggataaatggggaagggaacaggaggcaatggagtgagcctataggctgtgatgaaggcctgacctcagggaaagcagaggggaaagaattgggtagcaagagcctaagaccacatgccagagttctgaaaatttccccgggctgatggggagttcccaagcaaaggatgctgttagaggagtcttaggtcttctggaaggattatcttggctcattaccttgctgtgctccttggtgggctggaagcagcctggggaagtgtgaaaggtagagcagctgggagctgttggcttcttggagggaaatgtgagctgtgcacccctgtggccagcacagtccatttcttgtgcttcacagatccgcttgcccacacgttggtgctttcttcttgagtggaaacctagaagatggaaattactaggaagactatagcccctattgttgcagttagtctcattgctgcagctggtactcattctctccctccttgactcttcatcctcaatccccttactgtcagccatcaccttggcaggccttgggtgccttacctggtagtgtgacccaaaacttcattcctaaagatctggacccatggtaatcatgcactttttgagctaatgtttctgtacaaacccattcacagttacagtgggacaaggaagtatcaggaagtgccatgtagatctccaggaagtgccacaggtgtttctccctgccccgattgtgtaaatgcaagtctcctgcctgctgatcaggatccatgacctctgccaagatagtgattccttttctcttctcacctgctgctccctggccacaaggagtccgaattacccttactatgtcccctgtcaagaatatgtccctttgagtaacaagactgctaattgcagagcccagggttatagagatgggaagcacagggagggatggtaagtagggccactcctgcttccaccctctggttcccagtacctgtattcttcctagggggatacaatgccatatagagtcctctgacttaattcatataccattccattctacatgtgtagcttgtctccattgaaatcaggtaatgtgagtcctccaactttgttctttttcaagattgtttgggttattctagttctttttctttttcatatacattttagaatcaacttgtttattcctataaaaattcttgctgggattttgagtgaaatcatatatttaggtgcttaatctctcagcattttttttgtagctttcctgagtatatagatcctgaacatattttgttattttttatttttttgagacggagtctcgctctgttgcctaggctggagtgcagtggcgcgatctcagctcactgcctcctgggttcatgccattctcctgccttagcctcatagtagctgggactacaggcgcctgccaccacgcccggctaattttttgtatttttagtagagacggggttttactgagttagccaagatggtcttgatctcctgacctcgcgatctgcccgcctgggcttcccaaagtgctgggattacaggcgtgagccactgcgccctgcctgttatatttatatctaagtagttcatgttttttggtgcaataatcaccccacgtatttctggggtgattatttcggtgcagttttcaccccacctattgtgaggtttggtgcaataatcaccccacttattgtggggttgtgcttttttaagtggttgtagtttttcttgtaaatcttgtatatgtatatatttttaagtcatagatattttatagatttttttctgttgcaaatggaatttattttctaaataactattgttaatttaaggtaggagtgtctttcagataagctcacctctctccttaaaaatgctcacttgatcctttacttacaatggaatctttattcatgtggaataaggaaagatttctgagtttggattttaaagccttccttagtttggtttccagcttcatctcccattctcctttcctcaaacactttatgttcctgacatactttcagaaagtattgtgaaatgtaatcattagcagtttttcagcatttaggtgatatataccactaatgggctcaagaaatatgttgaatgggtttacagagcacagcaaaaccctacaaattgctatggttttgcataaatcatggatttctgggaaatagtagtctcagaaggatcagcccatataataaacaatatctggctgtgtttttttgtattgttgtttgctttttgtttttgggtacaaagtctgtaagttagtaaggcaaggaggcaggctggccaaagctgttgatgttgcaaatttctgctgatgcttccacagtatatagttaatctcttaaaagggctttaaatcattgagagagctatcatttatcaagtttattaagatttataactatgtttctttgtggtttagatgacttagaataattttattgatttattaggtaataaatcctaatttttttacaagtaaattcaccagaggatagttctggtatgaattatttttaaattgcttttctccagccaatatttggcagtggtggtggcactaggagacctgcttgtttggttggacaattagctgtggccagtaacttttctggccttaatttcttcagtgtacaaatgtgtaatttgttctagatgttttctaagggagtttataattctggaatccatgatcatgttaggattaaatttacagtttttaaagcaaaatgaaatttagcccactagagggagctctgctctttttaaatgttgtcagttttattgagaaagacatccttcataaaagaatgtatgctaatttttatttcagtagcagaaaatatttgatgttgacttaaacttttgccaatttgatgtgtgtgaaattctgtttcatgatgttatcttgaatttccttgattactgatgaggttgagtatatttttatgcttattcaccgttcctaattccacatctggaaatgcctggttcatgtgttttgcctttcttcacagaagttttttcttatagattcattgtggtttaaaaaaatatattctgggccgggcatggtggctcatgcctgtaatcccagcattttgggaggccgaggcaggcggatcacctgagggccaggagttcgagaccagccttgccaacatcatgaaaccccgactctgctaaaaatacaaaaattagccaggcgtggtggaacacacctgtagtccaagctacttgggaggctgaggcaggacaattgcttgaacctgggaggcggaggttgcagtgagatgagattgcaccactgcactctagcctgggtgacagagcgagactccatctcaaaaaaaaaaatacatatatatatatatatatataatatccattttatatatatatataaaatatccattttatatatatatataaaatatccattttatatatatataaaatatccattttatatatatataatatccattttatatatatataaaatatccattttatatatatatataaaatatccattttatatatatatataaaatatccattttatatatatataaaatatccattttatatatatataaaatatccattttatatatatataaaatatccattttatatatataatatccattttatatatataaaatatccattatatatataaaatatccattttatatatatataaaatatccattttttatatatataaaatatccattttttacatatatgtaaaatatccattttttacatatatgtaaaatatccattttttacatatatgtaaaatatccattttttatatatatgtaaaatatccattttttatatatatgtaaaatatccattttttatatatatgtaaaatatccattttttatatatatgtaaaatatccattttatatacatgtaaaatatccattatatacatgtaaaatatccattatatacatgtaaaatatccatttttcatatatgtaaaatatccattttttatatatatgtaaaatatccatttttatatatgtaaaatatccacttttttatatatgtaaaatatccattttttatatatatgtaaaatatccattttttgtatatatgtaaaatatccattttttgtatatatgtaaaatatccattttttgtatatatgtaaaatatccattttttgtatatatgtaaaatatccattttttgtatatatgtaaaatatccattttttgtatatatgtaaaatatccattttatatatatatgtattctggatatttacactttatcagttatatggattacaaagatctttctttttttcactttatggtatcttgatgaacagaaaagttcttaattttaatgtagttgaatctatcagtcttttcctttatgttgtgtggtcttaatacctttcttaaaacaagtcccttcattactcaaagtcagagagatatattttcttttatcttagaataagagatatttttgtgccttatgtttaatggttttgcccatgattttttattcatgctgtgagttaggaattgttttgattttgtattgctgagaaacaatctaccccaaactttagtgacttaaagtaaccattttattttactcatgggttttgtggcaagcatttagaaagagctcaactagtagtttttctcttccaataaaggtggtgtcagttgggctagaagatttacttctaagatggcttctttctctgctcacaaatgtgtctttgtgctgcttgacctctctttctacatgaggtttcattctctaggttatctccatgtgggttgtgcttcttgtagcgtgatggtcttagggtagtcggtgccacctctgggctggaggccaaccaacacaaaaccagtcactaaacaaaactacaaccaaggaccctcacagagtccacttcactcccctgctaccctcacctgagcagatgctggtatccatggctgagggacctgaagacagatcacatcacaggaatcttggcagacactccccagtaccagtccagagcccagtatgcactgggtggctagacccagaagagaaataacataatcactgcaatttgggtctcagaaagcccatccttagggaaaaggggagagtaccacatcgaggtgttatggggggggtctttgttcttagagctcccaagatgtggcggttcgctcccaagatggcagcaagccttttgttctctgacctgggattcttggcttcacggattctaaggaatggaaccttgggccatgcggtgagtgttatagctctattagaagcagtggatcacggaagacaactgtggaacccagcaactagtgttcagctcgattagacgaaccctgggcccttagccatgcaggaacaatggcaggcctctagccctatcaggagtggcaatgggcgcctcgctgggttagaagcacagccaacaccctcccggatctggaggggtggaagtcagtggcgagtctgcgacagtggcaaacaacagtggtggacggcgagcgaaagctcagctcgagctgtaacaaacgcggaccagaagagtgtgcagttgcaagatttaatagagtgaaaacagagctcccatacaatgggagggaccctaagggggttgctgctccctgctggaatgcctgggtttatatcccaatcattgtccctccccctgtgctctaaggcgatatatgatttgactatttctttacctcctgctttagcctaatttgtattttagtgagccctctttactacgtgattagttgggtgtgagctgagttacaagccccgtgtttaaaggtaggtgcagtcacctttcccagctaggcttaggaattcttagtcggcctaggaaatccagctagtcctgtctctcggtccccgcttccaacaggaaaacccaagtgttgttggggaggttggccgactaccactcttaactgcttcctgctgaattggggcgtaataggggtcatgcagttgagatttccttgggaggggtgccttcaatatcattaacatcggagcatgggctagcaggccggtccaggggtcctgcggtagatcttcatcatggactgcatctggggctccatttgaagaacgatttgtagttttacagctttgattttggaagagacaaacttaacaaggaggttaaagatacagagattgaaatgtatagcctgaagtgcaggggattatttctttggcacactttacaggccctgactatctgcttcatagttttgaaaaggcctggtccaataaataatgatttggccatatcatgggtgctattaatgcctaagtgaaaggtctggtgaagggttttaagtaattttcattggttagctgcaggcaaaagtattttttcttcttcggtggctagccatcctgaggggaggaaactatgtcctcgtgaggttcccctttctatttcttctgctgagtactggggtttggtttcccagaggggattactccatactaggggtcctctataagcatttctaatggagggtcccaccttgcggctcttttggttttaatatccacttggcggttcccttctatttccctttcctttctgatgaccccggcagtgtaagactgccacctctttaggtttttgtacagccaataataatttcctaatggcttcctgatgtttgataggtgttcccttggaagttaggaattccctttctctccatattgttgcacgggcatggaggactaggtaagcatacttagattctgtatatatatttactctttttccttctcctaactctagtgtctgaatgagggctattagttctgccacctgagcgctagttcctggagtgaggggattactttcaagtattccattgtcactgaccactgcatactccgccttttgaagtcctttttctacaaaggagcttccatcagtacacaagttgaggtcgggatcagccaagggaacctctagaaggtcccctcgagcagcgtaggtttgagcaattacttgttgacagttacgttctatcttttcttcattgtctggaagaaatgtggctgggttaagagttgcacaagtgcacagtcgcagcactggcccttcaagtaatagagcctgatatttaagcaaatggttgtctgacagccacaagtctcctttagcagtgagtatgctgttcacattatgagatggccacacagtaagatctctttccctgtatcattttaactgctttagatactaagactgctactgctgccactacctgtaaacaatgaggccaaccctttgtcactacataaatttccttactcaggtatgccacgggttgcaagctggtctctcggacatgtgtaaggactcctagagctattcctgttttttctgtgacatataaagaaaagtcttgccccgttggcaagcttaacactggggcataggttagggccttctttagggccagaaaagccacttctgcttcaggtgtccattctactaaatgggtattggctttctgagtttccttaattagtgtgtataatggcctggctatttcaccgtacctgggaatccatattcggcagaagcctgttatgccaaggaacctcttaattgcttcagggttttaggatgaggataagccagtataggctggatacattcctcactgagggccctggtgcctttggataattttagccctaagtatttaacctgctgtaagcagagctgagcctttggtttggaaaccttgtagccacaagtggtgaggaagtttaaaagcgcttgagtggcttgatggcacaaggtttctgaatgggtggctagaagtaaatcatccacataccgaaggacaagagtgaccaagtatgagaactggctcaagtcttgggctaatgcctggccaaatagatgggggctatccctgaaccctgtggggtaaaacagtccaggtgagttgagatgttgggtttgaaggatctttaaaggcaaataagaattgagagtcagaatgtacggggatgcagaaaaaggtatccttaaggtccaggactgtaaaccactctgctttctctggtatttgggaaagcatagtataagggttaggtacagctgggtatagagggacaacggcctcattgataatcctgagatcttgcactaacctccactgtccgttgggtttctgtactcctaaaattggagtattgcaggagctattgcttggttttactaggccttgggcttttaggtccttaacaatcttttggagtccttattggtcctcgggtctaagcaggtaatgcctttggtagggaacggaggtggaaccctttagtttaacttgaacgggacgggcattgtttgctcatccatattgtcgttttgttgcccagacttcaggattaattccttccttaagtaggggacaaaaaaacgtgtttcttttcctatgttcaggtgtataatggcccctgcttttgctagaatgtatttccctaacaaaggagtgggctttcaggcataattagaaaggcatgtgaaaagagtgaagttccccaatcataacttagtggctaggagaagtatttagtgactgcctgttctaggactcctcggatagtgacagatctggaggacagttggccgggacaggagagtaagactgagaaggccacgtcagtgtccaggagacagttaacctcctgtccctcaatggtcaagcatacctggggctctgtgagggtgatggcatgggctggcacttgtcctgggcatcctcaatcctgctcctggatcatctggttagtggcttctgactcagaggacttttgtcccctgaggcagtgggccttccagtgattcccttgacatcacgggcatggacgagggggcagcttatttttattcggacagtcttttttaaggtgtccttgtaggctgcactgaaagaaagccctattaggcattcgatttgctcaacctttccctgttttagagcctccaaagtccgcttgcctgagggccatgactaaagcagtggccttctttttatcctatttgtcccgttccacctgttcctcttgatctctattataaaaaaccgaggttgccaagttcaatggggtttctaagttttgctctgggcctacggcagactttggaagttttttttttttgagacggagtctcactctgttgcccaggctggagtgcagtggcgtgatctcagctcaccgcaagctctgcctcccgggttcacgccattctcccgcctcagcctctggagtagctgggactataggcgcctgccaccatgcccggctaattttttgtatttttagtagagacggggtttcactgtgttagccaggatggtctcaatctcctgacctcgtgatccacctgcctcagcctcccaaagtgctgggattacaggcgtgaatcaccatgcccggcctgaagttttttttttaatgtctgcagctgactgagtgataaacttatcctttaagattagttggcctttaatagagttaggtgacaaagaggtatgctttctcagtacctcccttagtctctccagaaaggcaataggattttctttctttccctgtattatggtggacatcattgaataatttataggctttttcctagttttttaaagtccttctagcacgcaagttagtaaatgtctgcagcaccaatctccatgttctgattctgtgtcacaatgagggtctacactgggaactgcctgctggctggtggggaattgttcttttttctctgttgtcatcctatcattgacctgactgagataccagagatcgccaaactctcgggctgcagttatggcggcacttttcttatttagggttagtatctgatctagcagtaacattatatctctccatgtcagatcaaaggattgtcctagcccttgtaaaacatcaatatagccatcagggttatctgataatttacctaggtctgttttaatttgcttcaagtctgagagggaaaaaggtacatgcactctgactgggctgaattctccagaatacatcttaagggcatttttgccttgaggggaacgtttcccgtctgaaaaaagtacatagggatgccaggacccctagtctttttccgacgagcatagtcctagagtgttctctatggtcctaatgcttattcctttccagggtgtgtaaccacccatggacctctgcttatcagattagttacatttaccaatgtagcagtcctgcaccccttttcctgcttttcttgaccacaaagaaagggttccaggcttctggattctagtggtcctttaccagcgtgcccaacattgcctttgtgctctggggtgagtcctagagctgagctgggttcctgagtatttcataacccagctgccccattaagatgtattcccataaacaacagttcttatgcaaatttatttcagagagggtgtaggtaaccttttgagtcaggattgagatagagttttttttgtttttattccgtaagtgctttaaggcttggctgagtgcaaacagcttgcacgtttcagcagaccagttattaggcaattttcctaactctgcttttacaagagtttccctattaattactgaatacccattgtgttttttccttaatcacctgggaggaaccatctgtcctccttttctgaagggagttcctcctaggtctggttggacctttgtatggtaattaagatttaaatcctctgttaggaagtctgctgggttaagggaattttcagtggttagtgttaaatcaccttttttctaacagaatagccccatactttaagatttttgagttagtaagctacctttttgctttttttgacttaggatagttctgaactggtgaggtgtgcttacaatgaggtttcccctaaaagttatttttttactttcttctgctagcaaagcagttgctgctacagattgaatgcatttgggccatccacgggttactgggttaaggatttttgataggaaggctgtgggttgtcagtggcctcagtccttttgggctacgctcttgtttatactgacaacaaagtggtattggagtgttatagggtcccggagaagaccttcagttattaattataggttttaaatttaccctggcttttaaaggaatagggtacacttttttctttactacttcttttctttctctctctctctctctccccccctttgtctctctctcctgtctctttctctctcctctctgtctctctctctgtctctctcctctctgtctctcctctctgtctgtctctctctctcctcgctttctgtctcctgtttttctctctctctctcctctctgtctctctctctttctctctctctctcctcctctctatctccttgtagatggattttggaaacacagtggaaggacgtttgcttgttgcccccatttgccactataggaatacgcgcctccctgtaatttactcaattcattttcatcctgatctattatgttgttgtagatccagttccagttgttaaagtactgggttatcagttctaaggccctgcaagggtggtggggaacaggtcccacataactgcccatgtcaagagctgtatacctaaattggagggacaccggggacaagactccctgggttcatagcttagatgcctaatgatgcagcatagagcttctttagatccctttggagatacaacttgctagagggaatgaaagtctgaaccattagtacctagaaggcagggatcaaaggaagtagattcagaggtaaggagaatttgggggctacactttcaagaaagtcatggttgggacccaggaggtatgggtcagaaggaaaggtggggcgcatacatgggcggctggttgaatagagacttctggctgtgccgtgatctcaactggctaatgccaggagttcgggatgacagctttctgctactagtcagcccttggcttccccaggaaaattgtgaaagtggaagctggttccaggcagaccaatgctcccaagccagaagggttgggggttgttagaaagcccttccctagatagcctcacacctgagtcttaagtccagcagccatgctactgtttttaactggctgacaggtgcccagtattttactccaattctaaggaagtataggacagaatagcaagcgaaagtggtccgatattactcactgctttggagaatccccatatgggccaccagatgttacggggggtggagggggtctttgttcttagagctcccaagatgcgacgggccgctctcaagatgggggtgggctgctcccaagatggctgcaagccttttgttctctgaccaggggttcttggcctcatggattccaaggaatggaaccttgggccatgcgatgagtggtatagctctattagaagctgtgggtcatggaagagaactgtggaaccaagcaactagtgttcagctcaattaggacgaaccctgggcccttagccatgcaggaaaatggtgagcctctagcccgattgggagcggcaatgggtgtctcgctggatcagaagcacagcagacaccctgctggatccggaggggtggaagtcagtggccggtctgcgacagtggtaaacagcagtggtggatggtgagcaaaagctcagcttgagccgtaacaaacatggaccaaaagagtgtgcagttgcaagatttaatagagtgaaaacagagctcccatacaatgggaggggaccctaagggggttgctgctccctgctggaatgcttgggtttatatcctgatcattgtccctccccctgtgctctcaggtgatatatgatttgactatttctttacctcctgctttagcctaatttgtattttagtgagtcctctttactacctgattagttgggtgtgagctgagttacaagcccatgtttaaaggtagatgtagtcacctttctcagctaggcttaggaattcttagtcggcctaggaaatccagctagtgttgtctctcaaagggatcaccccatgggacaaaataatctgaacaatagcccttgatccccagatcttccctttgacataatctacacaaatgaaaaggaagcagaaaaacaattctggtaatataacaaaacaaggttctttaacactccccaaaagattacactagttcaccagcaacggatccaaaccaagaagaaatccttgaattgccagaaaaagaattgtgaaggtagattattaagcttctcaaggagtcaccagagaaaggggaagttcaacttaaagaaatttaaaaaatgatacaggatatggatggaaaaatcttcagagaaacagatagcataaataaaaaacaatcacaacttctggaaataaaggacaaacttagagaaatgcaaaatacactggaaagtctcagtgatagaatcaaacaaatagaagaaagaacttcagagcttgaagacaaggcttttgaattaacccaatccaataaagacaaagaaaaaaagaattaaaaaagtgaacaaagcctcaaagaaatttgggattatgctaaatgaccaaacctaagagtaattggtcttcctgaggaagaagagaaatctaaaagtctggaaaacatatttgagggaataatcaaggaaaacttccctggccttgccagagatctagacatccaaatacaagaagctcaaagaacatctgggaaattcatcgcaaaaaggtaatcacctaggcacatagtcatcagattatctaaagtcgagatgaaggaaggaatcttaagagttgtgaggcaaaagcaccaggtaacctacaaaggaaaacctatcagattaacaggagatttttagcagaaaccctgcaagctagaagggattggggtcctatctttaacctccttaaacaaaataattatcagccaagaattttgtatccagtcaaactaagcttcataaacaaagcaaagatacagtcttttaaagacaaatgctgagagaatttgctactaccaagctactataagaactgctaaaaggagctctaaatcctgaaacaaatgcatgaaatacaccaaaatagaacctctttaaagcataaatctcacaggacctataaaacagtaaaacagtgaaaaaaaacaacaaggtattcaggcaacaagtagcacaatgaatagaatagtacctcacttctcagtactaacattgaatgtaaatggcctaaatgctccacttaaaagatacagaatgtggcagaatggataagaattcaccaaccaagtatctgttattttcaagagactcacctaacacataagcactcatataaactaaaggtaacggggtagaaaaagatattccatgcaaatggatgccaaaagcgagcaggagtagctgttcttatatcagacaaaacagactttaaagcaacaatagttaaaaaagacaaagaggaatattatataatgataaaaaggactgttccaacagaaaaatatcacaatcctaaatatatatgtacctaacactggagctttcaaatttataaaactattactactagacctaagaaatgagatagacagcaacacagtaattgtgggtgacatggtttggctctgtgttctcacccaaatctcttctagaattgaaatccctacaatccccatgtgttgagggaggaaccaggtgggaggtgattggatcctggggacagttttcctcatgctgttcccctgagagtgagttctcatgagatctgatggttttatagggcaattttctctgctcttgtttgctctttctctcctgctgccttgtgaagaaggacacgtttgcttccccttctgccatgattgtaagtttcctaaggcctccccagcaatgcagaactatgatttaattaaacttcttttctttataaattacctggtctctggcagtttttatagcagtatgaaaacagactaatacagtgggggacttcagtactccactggcagcactaaacaaatcatcaagacagaaaatctacaaagaaacaatggactggggctgggcacggtggctcatgcctgtaatcccagcactttgggaggccgaggcgggtagatcacgaggtcaggagatcgagaccacagtgaaaccccgtctctactgaaaatacaaaaaattagctgggtgcagtggtgggtgcctgtagtctcagctactcgggaggctgaggcaggagaatggcgtgaacccaggaggcggagcttgtagtgagccaaaatcgcaccactgtactccagcctgggtggcagagtgagactccgtctcaaaaaaaaaaaaaaaaaaatggacttaaactataccttaggacaaatggacttaagagatatttacagaacattctatccagtgagtgcagaatatacattctattcatcagcacatggaacattctccaagatagaccatatgataggccacaaaacaagtctcaataaatttaagaaaattgaaattatatcaagtactctcttagaccacaggggaataaaattggaaatcaactccaaaaggaaccctcaaagccatgcaaagacatggaaattaaataacctgctcctggattattgttgggtcaataacaaaatcgagatggaaattaaattatttgaactgaactatggtagtgacccaacctatgaaaatctctgggatacagcaaaagcagtactaagaggaaaattcattgtattgaatggctacataaaaaaatctgaaagagcacaaataggcaatctaaggtcacacctcaaggaactagagaaagaagaacaaaccaaaacccagcagaagaaaataaataacaaagatcagagcagagctaaatgaaattgaaacaaaaaataatacaaatgataaacgaaacaaaaagctggttctttggaaagataaacaaaatcaatagaccattagtaagattaaccaagaaaagagagacgatccaaataagctcaattagaaacaaaatgggaaatattacaactgataccatataaatacaaaagatcattaaaggctactaggaacaccttaatgtgcacaaactagaaaacctagaggagatgtataaatttctgaaaatatataaccctcctagataaaaccaggaagaaatagaaactctgaacagaccaatagcaagcagcgagattcaaatggtaagaaaaaaatagccagcaacaataaaaagtctaggaccagaaggattcacagctgaattctatcagatattcaaggaagaattggtaccaatcctattgacactatttcaaaatatagagaaagagggaatcctccctaaatcattctatgaagccattatcgcccttatatcaaaccaggaaaggatataacaaaaaataaaactatagaccaatatccctgatgaacatagatacaaaaatcctcaataaaatactacctaaccgaatccaacagcatatcaaaaagataatccaccatggtcaattgggtttcatatcagggatgcagggatggtttaacatctgcaagtcaataaatgtgatataccacataaacagaactaaaaacaaaaatcatgatcatcccaatagacacagaaagagcatttgacaaaatccagcatcactttatgattgaaatcttcagcaaaatcagcctagaggggatgtaccttaaggtaataaaagccatctatgacatacccacagccaacactatactgaacagggaaaagtggaaagcattccccctgagaactggaaaaagacaaggatgctgactttcaccacttctattcaacatagtactggaagtcctagttggagcaagcagagaagagaaagaaataaaggcatccaaattggtaaagcggaagtcaaactgtcactgtttcttgatgatatgatcgtatacatagaaaaccttaaagactcatccaaaaagctcctggaactgatcaatgaattcagtaaagtttcaggatacaaaattaatgtacacaaatcagtagcactgctataacccaacagtgaccaagctgagaatcaaatcaataactcaattccttttacaatagtaccccccaccaaaaaaaaagaaaaaaaaaacaccaaaaaacttagggaatatacctaatcaagaaggggaaagatctctacaaagaaaactacaaaacactgctgaaagaaatcatagatgacacaaacaaatggaacacattccatgctcagggatgggtagaattaacattgtaaaaatgactgtactaccaaaagcaatctacaaattcaatgcaattcccattaatataccaccatcattcttcacagaactagtaaaaacaatcctaaaatttatgtgtaaccaaaaaagagcccacatagccaaagcaaggctaagcaaaaagaacaaatctggaagtattacattgcctgacttcaagctatgctataaacctatagtcaccaaaacagcatggtattgctgtgaaaataggcacatagagcaatggaacagaatagagaacccagaaataaagtgaaatacttacagccaactgatcttcaacaaagcaaagaaaaacataaagtggggaaaggacaccctattcaacaaatggtgctgggataattggcaagccacatgtaggagagtgaatctggatcctcatctctcaccttatgcaaaaatcaactcaagatggattaaagacttaaatataagacctgaaatcataaaaatcgcagaacatcagaaaaacccttctagatattggcttagacaaagacttcatgaccaagaacccaaaagtaaatgcaacaaaacaaagacaaataaataaatagatgggacttaattaaactaaaaagcttctgcatagcaaaagaaataatcagcagagtaaacaaataacccacagagtaggagaaaaatgttcacaaagtacgcacctgacaaaggactaatatccacaatgtacgaggaactcaatcaaaccagcaagataacaacaaacaatcctttcaaaaagtgggctaaggacatgagtagacaattctcaaaaaaagatatgcgaatggcccacaaacacatgaaaaaatggtcaacattactaacgatgagggaaatgcaaatcaaaaccgcaatgtgataccactgtactcctgcaagaatgaccattaaaaataaaaagatgttgaaatggatgtggcaaaaaaggaacacgtttagactgctggtgggaatgtaaactagtacaactatggaaaacagtgtggatggagattccttaaagaacttaaagtaaatctgccatttgatccagcaatcccacaactgggtatcgacccagaggaaaggaagtcattatacgaaaaagacacttgcacacacatgtttatagcagcacaatttgcagttgcaaaaatatggaaccagcccaaatgcccattaatcaatgagtggataaagaaaatatggtgtgtataaatatacaccatagaatactactccaccataaaaaggaacaaaataatgacatttgcagcaatctggatgaaattggagaccattattctaagtgaagtaactcaggaataaaaaaccaaacattgcgtgtcctcacttataagtgggagctaagctatgaggatgcaaaggcataagaatgatatgatagactttagggacttggggaatgggtgggagggtgatgagggataaaagactatacattggttacagtatacactgctcgggtgatgggtgcaccaaaatctcagaaatcatcactgaagaacttattcatgtaaccaaacaccacctgtccctcaagacttattgaaataataaataaataaaaaggattctacaaaaaagaaaccttataaactgagttcctagccatgatgggatagggggttggacaagcctcagtatgtcccttccttagtaacctttaaccagatttctttcctaagaaataaacagaaaccagctctggagaacaagaaacagatgactcattgctttatcatcttaagccaatcatctgaggctgtgactggactcttcctactttttttgcaatttcacaatacatcccttgctaaaaactgaccaccatctccagaccggttttggctgactggtggaggatacacggtgatggttttgtgtcctctgcttcatcttttgacatcagtgggctgaaaactccattttcagatcatgctaatgccaccattttttgaacatgcaacccatgaaaggtgcatgaagcgcaattgcacatgtgcatatttcttctttcataaatattcatgactcttcctttagcttattaaatatgcatatttggctacctcactcagcataaattcctgttccctttacccctccctcaaagtgcttgctctcagctgctgttggaggctttgtttcccatcctgtgggatggccagcatacaggctgaaaccctttatgagaaataaagctcttcttttcaaatttatccacctcatcattcttaaattggcacaatccacacctggttattgcagctgttataaaagaaaccagttgtcattttcatcattcatcctgggaaatttgttcaccagatccaccttttctagtttccctattaccacaggtgacagttgtactgaaatttatgccactgtgcaacacagatttttttctccaccttccatactgtttcacaacaacttccttactgttctttcaacctctattaagaagtccatctgaggcccttcatgcatccatttcactgcccgatcctgttgcagataccacacatttcttttctagttatctgttgtgtaataaaactatgtcaaacttactggattaaaataaccattgtagttttttttagttttttttttgttttttttgttttttttttaggtggagtctctctctgttgcccagtctgaagtggtgcagtggtgcaatttcagctcactgcaacctccgcctcctgggttcaggcaattctcctgtctttgccttccgagtagctggaattacaggcacacgccaccatgcacggctaatttttgtatttttagtagagacgagatttcacgatgttggccaggctggtctcgaattcctgacctcagacaatccacccaccctggtctcccaaagtgctgggattacaggtgtgagccactgtgccggcccattgtagtttttacataattgtgtggatcaggaattttggaaggttgcttaggtgggcatcagctgcggctgctgaggctagagaatccacctccaggaatatttgtttatttgcagatctggaattttggtgctcctttacctcagtttatttccttgcagtatctcatcttctagggcctcttcctgttgcttaggtatttgacaacatggtgggctcacggtagtcatacttcttataagatggctggtttccaagagggagcttcataataatgagttatacaagagtgagagtttcaagaggcaggaagagagttctagccagttaggctagtgcttcttccttattgtatttatcaaagcagttagacagggctcacctagacttgaagagggtagagaaagacattctgcctcttgatacagtagtggcaagatcatattgcaaaagagcatatggttaggaggtatgattgtaaacacctttggaaatatggcaggctgaaccgggatgcaatttcatttttcccaaatggataaccagttggctcagtactatttattgaacagtccatactttcccactgatctgtaatgtctgctctatcataaatcatgtttctaaagagtagtgtgtatttgttttgaattgtctttgtttaggcccatgattcgcaactgggggccattttgcggaagacatttggcaatgtctggagaaatgttttgttgtcacaacaggtgtgtgtgttgtgtgtagggtgctactaacatccagtgagtagaggccagggatgctttgcacttagcagcatcccccagtgcacaggacagctccccacaacaaagaactatccggccctaaatgtcaacagtgcggagcttgaggaactatggtctctgccatcagtattgccgtattatgttagccttgatatctgataggacaagtcacctcactttgtttttcttctttaagaatgtcttatttttgggcctttgcattttcatataaattttagaatcagttgatcatgtttcttatttttttactttagagatgggggtcttgctttattgcccaggctggtcttgaactcctggcttcaagtgatcctctcatctcagcttcccgagtagctgggactacaagtgtaagccaccgtgcctggtttggaataagtttatgatgtttcataaaaatttttatattaatatttttattaaattttctttgtaactatgtatcttcatgggggaaaattaacattgtatgatatggaatcttattcaccaagctgcgcacagtggcaactacttgtaatcccagctacttgggaggctgaaacagaaggacaggaggattgcttgaacctgagtttaagaaagaatcttattcaccagcataatatagctatcaatttagttcttctttaatgtctttcaataaaattttatagttttctttctttttaggggggcacactgtcttttttttgtgtaaaaattttataattttcttaataaaaggcttgcaaatcctttgtgtaagatggtttgttctcttggccagttgtgaggcttttaaattagttgctttcctcttttgagccttaatttctctgagtgaaaaatgtggcatttgaactggatcatctttaacaggtgaaatattacattattaaaatattaggattaaattgctaactttcaatgcccgaaatagaagtactccactggagggagctcttctgcattttttctcagacaaagttgtcagactgctgtgaaaatagatagcacaccttctattggtaactgcagatattactgacagcaaagatctcatcttcttagtgtggaggaaaaaggtgatttcctggtatttcttcagtcacagttttgcatgtaacaaattctgttttggtctttggaagatactacttttttctggttatgggaatataagaagcatctttttgaacttaggagaaaatttatgggtcatccaatttaattccttcatttgacaaataaataaattattatttagagagacttatactttccaaaagacacatagagagtttgtgagaaagcctggaattcaggtccaaaaatttttatgccatagtcgagggaatgaagtgggagaataaacagagggcattagtggtgggatgggagtagggattgcgtttagttttgaatgaactgagaagtgggtgatctgtgaactccggcaattacattcaatatcctacctgtatgtgagcatatgtgcacatacatatgcataaatgctgtactttgtctggaaatgggcatttgttgggattgttgacttgtaggaaataaaattggacttttataagccaccctttatttataaagaaagatgctttggctatagagattcatttagtttatattttggaatcttttgggaacacctgccttggtaacttgattaccaaactttaaactatctttaacttaatttactgatttccagaactctctttttttaactgacccaaaactgatgtttaaaatagttattggatattcttttcagaaaagatgaaatgcaacttttctccacttgtcattccttttcaaatctattgcgactgtttttgaaatgtttctctatttgaagatgagaaatcatagttttcctcaaccttcagaagttcatacttgggacatattcctgcaagaaaagacagattaacaagagaaaaacaagcaagtttgttaatgtgtgcagtgcacatcccgtgggagaaaaataactagatgcagtgccttagagtcccagcttatatggtcttcaacaaagagcaataaattttagagaagcgtcaggacacatgaaagcagtttaaggcttccaaaggcaggaaggtgtgggaaggtaaatttatggggaaactaatgaagtctgcttagatgcctctggtgtagtctctaagctgataaaggttgtaaaggagaatttacctactgttttgaggcaggaaagagggaaagatagactttttgtatttatattaataatactctgctcttaggcaaacagaggaaagacaaagcacttttccatatttgcttcaaatggcctttagccccaaaaaattatgtcaaagaggaatgttttgaggtgacacattctgtttccttcagtactctcgttggtgagtctccagattcaccttcatataaacttcccttgaacactatagacattttataattctttatttctgcatttgctttgagataaggtctttagttatttgtatgatttttttctgtggataacatgggtaagatttttaagctgtttttttggcttaagtaaataaaaagtcaaaataaaagtcaacaacccgctgccttttatgtcaacattaagaactagagttcttacattgcttttgcagtgcaatgtaatgcattgtatccttttctaacaagactgcagaaaaatattatctgataaaaaatatgtattcaatcacctttcttttctttatcaggtatggtatagagcagtttaaaaaattaaaatttatgtaattattgtataaatattgtacaaattattgtataaattttcagatacaccaaagtggagactattgttaaaatatctgtgtctcccactgactgcagtaatagagaatttcttcttgggttttagatttcctccttcttcacccctgaaaccatatccaaagaagcccccaaaccaaaaggatgttattaaatttccagaatggaatgatctcccaccaggcacttcacaagagaacatcccagtgaggccagttgtgatggtaagtgccatgactgaaagatggaagggctggcagcagggagaatcatccatgaactcctaggcttggtctttctgtggtcctttatgaacaataatttaaaggtactttaaaacaaaattgtacctgccaacagctgggagaccagtaacaaggaaagaatgactcttgcagtttttcactcttgcatgtaaatagttgttgtactgtattgtttagggcagcagtccccaacctttttggcaccagcgatgggtttcatggaagacaatttctccatggaccagggctgctggggtgggggtgggggtggtttcgggatgattcaagtgcattacatttattgtgcattttatttatattattattacattttaatatataatgagataattatgctactcaccataatatagaatcagtgggagccctgagcttgttttcctgtaactagatggtcccatctggggatgatgggagacaatgacagatcatcaggcattagattctcataaggagcacacaacttagatcccccagatgcacagttcacaaaagggttcacgctcctatgagaatctaatgcggccgatctgacaggaggtagaactcaggcagtatgtgaacaacagggagctgctgtaaatacagatgaagcttcactcacttgcccaacgcttacctcctcctgtgcagcctggttccttataggctatggactgataccagtctgtggcctgtgggttgaggacacctcgttcagggaataacaagaagaagaaaatgctacatgttcagtacagatgcaaccatccatttttttcctctgaatattttcaatctgtggttggttgaatccatagatgcagaacccataaatacaaagagtcaattgtatatggcagctgtttttatatgttcagactgagcaggtttctgttaaaactctcttgtaatccccttttcctgtacattctataacttactactcttcttcctctttgtctcttcctcctaaactgttattattgccagttgagggtaagaaggttaggatgtggaatattgtgtactagcccctgaccaaatatataagcaaaggtagattcttctagtcttagaaaaccgaagctcattgtagaattgactgcctctttttttcacattttttccttaaaatacccccagtagaagaccaccaggactgaggtgtaatgctaaaaagcaaacaacaaaaaaatttctgttccttttgccatcttcagctgtccttgtggagccttttgcagatggctaagatttgggggctactttcgaacattgcacttacttgatatttgcttataaaaaatagacagtcctcaaaagtaatacattttaattccattttcaataatcagtctgtacagtgtatgaatttagatatgtattccttaattttgaattgataacattttatttcactgctatttcactgattagttgaaacgtccacaggaaaaattagctagttaatgccatacttactgccatagctcttttgtaattcatgaatattcatttataacatgacctagtcttaagaatcactctttacttctctgaggtccatgtaaagaaagttagtttatatttctaattattattttaaatcaagttacaagtaaccaaatcaaagacatttctcataaaaatcccaccaccttatattgaaatatttattcactgtctttctaccgtttctccttccctcccttcttacatcccccctccattagaattctgagatgtggtacaagcgtcacagtattgcaattggagaggtgccagcttgccgtcttgtccaccgcagacagctgacagaggccaatgtagaagagatatggaagtctatgacattatcatagtatgtacatttgatattaatgagaaattttagagatattgtttcctattttgctacttcttcactctctgcatatttaattttctgaaattatgtataaaaatctcaactttgcattatttgcagttgtgatcagcaaacatagtttaactgaattctggggattatctcctgctatttacataatagttaggagtttaaaagttcttaagagtaataagacacataatagaaaatttggtctcctagatactgatgtactgtatgtataaagttaacaatcatatacagcaaaattttgttcctcatgaagatatgctaatagtagtttcttatcattggataagttagtttttatgttgtagtatttttacttacaaaattactttcttgtcatttggtgtgttactaaatctgtgaagcaaaatgttaatagcaaaaggatatcttttacatttgttttattgtactccatttctaccctttttgccccgcaaagattgggtgcaatgcatgaaaataaagcattataaagattgattttttgtagtaccaggtttttgagtaaatataatattaaagacagaactaattaatataattacttatcttttagcttacagaaaattcttggcctggattccttagaagaagttttagacgtcaaacttgtcaattcgaagttcatcatccataatgtatatagtgttagcaagcagggagttgttattcttgatgacaagtcaagtaagtgcataaatataattttgttacttattgacataatatattggctgcacaggtccatcagctcctttctgacccttccctaaaccctgaataagtttgttccttcattacgtatattctttctaataccttttaacaaattgtttggaataagggaatgtcataggaagatgagtatctaggaatgagagcctcagcaaaatccatccagaagctagttcagtgttagccaccttgggcattaagtggtttcgtattcccagggaaatctctgaaaagtgagaatattcaagacataaccaagagttagagtcagttttcaggtgggccctggggtctgactgcatttagaattctcacgtttttgttttggcttctctgtgttagattttctggaatagtcttggttctttttaataaggtagtttttgaaatgttgatattgctttgattttttatatttcccaccctagaccagtttacaaatcagaaaaaacaaacaaacaaacaaacaaaagaaccatataacagccacctaacatggtttttggtttgtaaaaatgtggttagggtactgatagtggaccacagtccccacactgattttaaatctttctgtggataaggaccagatttggatgggctcattgatttgttcttcctttagttcaaaccctcgatgctgggaattggctggaacttgatgatctttggatgtgggaagatggcataatacttcttgactttttaaaaatatgattaaatttagggctggaggctcctgggaagcagacagaatgtagcagaatagcctgagcagtggtgagaggggaagagatttttctatgccatgtttcctgacaggagcagaacctgtcttcagacctgaaacacttctccttttatagtcactatatgaggaatggaggacaatgagagacaaataagtttgtggtgactttatgagttttgaggttaatatcaacatataaaattaagttccatagaatgaagggaagagtgcagcctttgaaatacatctaaaattcttccacattctctgagtgtagcaaattaatatttttagttatcagttagatgatcaatcatctttcattttattaagtaagatcttaagaaagaagagagcattttacaagactccagttcattagatctaacacaattcaacaagtgtcttcgcagttttacagaaatagagaagatgaagtggcagcctgagtgctagcccatctcatcagatgtctgtggcagggcgtggagggaagagattctgtaccaaatggttcagctgggattttttttgtagcaatgttcagttactattatttaaaggttgtcctaatactaatagcctaacattaatatgtcagtggaactttcttggcctaaagcattttgaaaatggaaacatgtaaaatgatacttatattggacctacagaattaccctttttgaggggctggtggtgtttgatgaacttgtttcacaaatgtgtttgacgactaatattttttcttttctttttctttttgtaattcttaaaataattggtttgtcttttggtttgtttgtttgtttggagcaaactatacatttttttctttttactatagctttaaaaaggtgcattgtgtccttagagaaatctgtaggcattatttatgtaagtgcatgttataacactgctgacaaggaaaggtttccatcttttaaatgttctaataacataaattggtgatttgtgattagcagatatggttcatattacttgggcaagtaatacattcttatgataccaagtatgtatatgatgtcttgagttatatggaattgagtacaaattttctttttccttcagaagaacttcctcattgggtgctgtcagctatgaagtgtttggcaaattgtaagtactaattatctgccagttttgtgaaattaacagaaattagtgccctaaattaggaaaaatttctgctcaatggcctgaacattgatgtgacacctgtgagactggcagttaattattttgggactactgtgcttttagtgataaatttgtgacttagtgaaaggactgaattctagaacagttttaaagggatttagtacttctactttctagtagatccatccacactagttctaattgcttcatcacaggatgaaggatggtttggaaggagaagaacctgccatgtagagaaatgagaaagactgtttcagtaatttggatgttagatgagagggcctggaccagggtggtccctgtgaggatttttataggtatatgaaatccatttcataggcatgtgatttccatatcattgaatatcataggcactgtgaaggcattagttgttatagtatctcagaaacactaccattcttctgggaattttcacaagggttaacccaaagaagggattctaatgattaatggcttaacccaaacaaataattttgatggaaagagttctagttattttggctgactgataatagtgatatttggtctggagtgccttttgagtctcacagataccacaaggtagtagttcattttcatttcttttgtacggaactagcactacagatataggtgaaaattccctttaaattcgtgaattagtaaaccctaaaacatgggtttaactgaaattagttttgtttgattatagaatgaaactaaaataactcttaagcttaatgtggggaatcttagtagtagtatatggaacatgatcctatgattttgaatagccttttgaagatgaatgctattcattcattctatactatccttctgtatatgaatagtaaccattggtttgtgtgaagcccaaggttctctgagtttaactgttaacattttcattggtttttggttaaaatttggagcctctgagatgcagagtactatggtcttagcttggggaagtgcttttttttcttcctgctcaggcatttgaagtcaatgaaatttaaattacatccttgtctagggttgacaatgatgagatagagagtataaatgagaagttaaacttcccatttctgaactggcaaatcaaggttttagaagttcatcaggccaggtgcggtggctcacgcctgtaatcccggcactttgggaggtcgaggtgggtggatcacaaggtcaggagatggagaccatcctggctaacatggtgaaactccgtctctactaaaaatacaaaaaaaattagctgggcttggtggcgggcgcctgtagtcccagctacttgggaggctgaggcaggagaatggcatgaacccgagattgtgccactgcactccagcctgggtgacagagcaagactccgtctcaaaaaaaaaaaaaaaaagaagttgatcagctaggaatgaacataggaagctagtataaccaatctagtctgtaatatgttgtaaaatatatagtaagatgtttatgatgttgaattttcaatgattactgaaatgtagtaaagaacataattttccctcaagcagcatgtgcaccgaaagccaaaaaatttctgcagaaagcttagaataactggaatttcttatcagtggagagcaaagatgtgaggggtgaattactaatgatcttcatgtgtgtgaggtggcatgatactaggtggcaagtgctgggaaaagggaacttgtctcatatgtatcaagtactatgctttatgagtggctggcatatctgtaaagatgtttatttatgtgtcaaacaaataaaggtggccaaagggcaagattaaccttttgagtagctttataaagtcacaatgttttctgaaattcctgttgaccctcagaatctactttgagtccaccaaagtcacaacctgtttcttgtccatcctatccttaataagtcccaattcatgtttcagtcatctaaaagggaacagaaaggataggctgattgtatggtattttgaaggcctattgcctccttttctgaaggaggtgctgctcacctctttctcttcagcccatctgtgtttattgtcacacccgtgtgcacatgggcctgtatacattcattgttggccagcctcaatgctggctacataaatgcaaaaccaagttaactgtgtttttcttctttgcgcatgtccaggattcaataaaaaatagacacaaaaaagtcaaagcatttcttttccagaatctgtcaggaataacatttataaaaaaaatttttaaatattattaaagttcaagatgactgagaaagaaaaggtcataaaaatatggcttcctctcatagggctcaccatgcactgattttttttagggaaacctttaaaatttttttgcatatttttaagaaggatgatgagatgttcacaaaggggtacaactgcttagaatgaaccgtatacttatcctgacagggagtaattctaggcaatgtgtattgcttgctgagacatatcaacctaattattttaattgattaagcttgggatatgtcagagcaggaggcaagcaaaatggcagctacctttgctgctggattcatgctgtaccacacacatagatatttcacaattttcattattttagccaatcaaattattttataagaagagaacagaatattgaaaggtaagagagtctttaaggaggccgaaaaggccatttgatcatgtcacagtgaccttgaaatgtaaagacccagaatgctttaatgtcctttttagcttgatcccctttctttagttatagagattctgtaggaagaatttcctttcaatttatcttggctgctgcttttgatcctctgggggtagaggtctatttgggtacagttgtttagtcttctgctgagccagagctaggcaatgaggatgtggtcctttcttccatgctgtaatggaaatagagaaggctggctacactgttcctcatgggacgacttgctattttcctcaaggtacaggcagctccagttcatctctcaacttggcagtgtaaatctgtggtctgtggatggattggtggagcagttgttgccaactctgtagagaacatttcttgttcctctttgggccagacacaagtggatgttttccttgcttgttgatggagtaggatatggttgggagcaggctgtttcagggtttcagtggttgcttcaactttgcagtatgactttgcttgataaactgtcttttgatggttggtcagtgatcaaataaagagtttataatcagagtgaattaagacaaaatataaaatccccttttaaggatttttttaagtttaaatatttattagtctgaaatagaggcagaaattattttgctcaactctatgactgtaggattttataatataacaagaatgaaataatgaaagtctttaaaaattgctttataacttgtctgttacatatgtgagctaattgttatctcggtcaactttattaagactaggataatgttgagtatttcaaagaaaattattgtttacatttaataaaaatgcctttcagaagaatgtttttttcttaaagaaaggtttcttttaaaatggaagtaagccagtgattttcttcattgttttataatagatttcaatttagacataaagcatatttgtgtaggcaaaatgtaaaatgcctatttaattaatatcagtgtagaatgcctatttaattaatgtcaattttccccataaaaacttttctgtatatgtcaaatatctgaatatctgtacacgccacacatattcacagagaataatacttagaggtaattactccattaatgtttctctttcactctctttttgaaaatagggcccaactgttctgatttgaagcagcctatgtacttgggatttgaaaaagatgtctttaaaaccatagctgattactatggtcacttgaaagagcctctacttacatttcatctttttgatgcttttgtcagtgtactgggtaagttggaatataatgaacatatatctacatcactgatattgaatcgtttcatttttcactattttgagacttccattagccaaaactcatgccattttaaaaataaaaactgatagagtatttggcatagctagagtcttgctctgttgctctgtgaagaagtaaaagaaagtggttaagctctattaagaaactcaaagcaaggaccagtagtttttgtttcttaagaaagaatataatatgttgtatgtcacttttattcaaaagactataactttattggcagaggagaatgtaagtttgacatttactattcctggttaaatctgttattctggctatgacttcatgaatagtcaagtgtgggaggtatattttcatttagaaatctaatttctttttatagaagaaacaggttttttgtagtattttgtaatttgagacatgaaataaatatagtgactttatcattaattaaaacatgtagctattcctcatatagatttatactttagaatttacactgaaaggaacatggtagaaaggaaaaaaatcaacaatattgttatagttcgttccgatattcctttcttcttggaaatcagattttcttgttcttgtaattgttcattaagtattattgttttcttgtcaaaagagctttaaggatgaaattattgtgtgggtatcatattctgttaggtaaagttgtaggaattagcacacttttgtttttgattgttgttgggtttagccatctttccctttcccttcttttcacttgcttactcttcctcctcctccttctctatgtcgttctttcattttggaaactatggatgctgccattgtattgtaacaaagtatcagcaatatgtaaataagttacttgatctcatgagaaatactttggattttatgcttttatagatttcctgataataacaaaatacaacaattatcaatcatgtaaataagagtcagtgttttcccacagaacaacattggaacaaattaaaagagtaggcctattactgggttttgagactactggaccttcttggtattttggctccaactgaggagaattgggggcccatggacttgtgagcatcatggctaatgatgaatatttgctgttgcttagtatgcttatggactaattgggtagattcctattacagcaactgtattaggaattgcattgctatagagaaatacctgagacttggtaatgtataaagaaaagaggtttaattggctcatggttctgcagactgttcaagaagcatggcagtgtctgcctctggggagtcctaagggagcttttactcatggcagaaggcaaaacgggagcaggcatcttacatggcgggagcaggaccaaaaggattaggggaggtgctacacactttaaaataactagatcttgggagaactcacagttgcaacagtgtcaccaagggggatggtgctaagccattagaaactgcccccatgatccaatcacctcccaccatgccccacctcgaacactggagattacctttcaacatgagatttgggcggggatgcagatccaaaccataccagccacttactgcctttatgccactggcaaaataagagttttaaagattgtattaaaaataacttcttagatttcattctcattttctatttttataatgttctatagtaaaagtatctgttttggaaactttttcaaaaacaaattccaatttgtatcagttatatttacgatgtcactgctctattttatcacaattattcattttgatctcagctaggcatgaaagctgcttctaaattagtatcggagtcagctgccctctaatatatcatctttagtggcttcagggtggaaaaggatgggcagattgggggaatttattgcctttaggtatcagcaggaatgcactaatgcatatggatggtaatacattaaccttgcctcatccagtcctgttcaagtgaatatatttgagatatcttacatcgaaaactattttcttagatcctttcatagtggaagaagaaagaagaaggccttctagatacggaagaccacagtttatctgtttaacaaagtatctaacatagcaatcctgttagattctgtgggaaaaggtaaatatctacatatgtaggttggatcccagtggggctgacccatcctttaaaccttttacttactttgattggaataggatatcattaaagtattttaaagtaaataataagtctactttgcggagaagctaaaaattctacagtgttttcaatggaagtgatgttcagcttagttaataaacttcttttgaggtttcttcctttgcttgtggcacggttgggcttggtggcaaagctgtatgagagcagttagtcatcactgatacatgagataggacatctaaagattctttaaaaaagacttggcagttttggagatgaaagacttatttgttacttatattaaaaaaattatttaatttggcccagctgtctgacctgcaagtatgactccattgtagttgatcttcatttccaaaatagcaattccttgtagtgagatcagagctcagctgactcttgaatgtggtgattgagatagagtagcattctttactcacactccatacccaacctagagtctgttgagatgtgtagcatgcaataatttggcatattgaggaaaggagggaggcagataggaagcagaaaaggctacaggagcagggtagactgttttggaaaattgagtgacttgtaggctgtataatctgagaacccacactgttcatctgtaggccaaatatggcccacataaattcaccatgaaaacgtctgatttgacctgtgtttttaaaaagagaatttaattaaattgccaatccttaagaaatgggagattcacatcagaattcatatttctgtttttttaaaaaaaatttagaagatctggcagccctgggcttgaatttttggtgatacaaactgctgcagctgcatagtgagtgctcccactagaagcagcaagtgttcaaggagcgtgaactccaatttgccaaatctctaatactcctcatgcttctcagactctgaagccaagttcacttgactctcttcacttatttatttcatttgtctgctcccgtaggcagttgagcttgcaactcctggtttatttgttaggaggctggaatactgagataatagctctttgctgttccctttctcctaaatgttaaatatagaaaatgccatagacattcactagattgattatgcactggatcatttaactcaataggttgagatcttcgcctgtgatttttaacctagaaacatccttaaggttagggtttccattcattggttcttttgtctagtgacttcaaggagaccctctggagcagtgaaatctttgccttattacctctctgcccttatgttcttcaagttatgtcagggtccctatcccatggtaattcttaagggaaaacaatttttttttgttttgtttttttgcagagagtgcctagtttgtgtgcttgaccagacagagggcttttgcccatgttagtccaaagttcttgccaatggtgctatctgctctcagagcccagggcttatggccggagtttttttttttttttttctcttgagatggagtttcgctcttgttgcccaggctggagtgcaatggcgcaatctcagctcaccgcaacctccatcttctgggttcaagtgattcttttgcctcagcctcctgagtagctgggattacaggcatgcaccaccatgcccagctaattttgtattggctggagcttttaaagatgcagatgggccaaggtaaggatgttgaattacctcaaaacataatgactgttgctgcctaccaagattgtcagaataaagtggagttaggtactcattaaaggtggaaatttagggaaatgcctaggtattacctggctgtaactaaatacacaagctatttatttatttatttttatatttatttatttatttatttatttatttttttgagacagagtctcactgtgttgcccaggctggagtgcagtggcatgatctcggctcactgcaagctccctctcctgggttcacaccattctcctgcctcagcctctcgagtagctgggactacaggcacccaccaccatgcccagctaattttttgtatttttagtagaggcggggtttcaccgtgttagccaggatggtctcgatctcctaatctcgtgatccgcccgcctcggcctcccaaaatgctgggattacaggcatgagccactgtgcccggcctatttgtttttattttttaagagcatttggaatgatttatttccaagattcacgattgcagataatgtatggtcagcaagtggttgcaaaggaagtctgctgtatgtgtctgacttggaaggaaaaaacactgataagacagtgggttctttggcttcctcattcagaccatgcatgccagtgcttctgtttcctccttcttggcccttgcttggtgtctaggcagattaaattcttagaagggtactggtcacccagagattgcagatgtgcaaaagttggcttttaaagtttagcgtcccataattggatttttcactgctgcagactctactgcatgccactctctgccatttgcctatacctgtccatggttgcctcttctgcattttccttggtagtagctttaagtctctgtctcacacacccaacattgtgcttcctggatttgtgggtataatttgcgaatgtaaaggggtgccctgtactatctatttctgaggcatagtttcaaataaaatggtattttatagcctgcattaatgtgaaattactttcaattaggattctgagtaatttacacataatgtttgtaaagtgaaggaaaaatgtcaagcatttcactaacaaatgaaagcaaagctcacaagtctctgccagaaatgaattccaagaacactttctttatcatttctcttttcagctcacaaatctacaggctggtgatttagcctgggcagctcttcaggtctcagctgggctcactcccaggactgcaggctattggtaggggcctcccaggtctggaggttggctggggtgactcagttctgctccacatgtctccctccagcaggccaaccctggcatgttctcacggtgaaggcagagcttctattggagtacttgcctacagctactcttttttcccaagcctccagcatagctttcttgtgtgcttcccaagtctacttcacagtttctccacaagaatccagtcattttacatggagtagagagagagtcttgcagatcctctccttggccagaggaagtcaccagagtaaggaaggagagaagaggcaaggaaggcagcagggccagctcctcttgttaaagtgtgaacactaactgaacagtacctaccatagagaaggcaggagagtaacttcaggggtaaggagtccaggctctagagagaagcagacatggattccagtcctggcttctgcactcactgtgggcaagttatcccctagcctcagattcttcagaagtgaaatggcataatgctattaactattgccttaaggcctttgtgaagttcagatacacacaaagagcttggcacagcagctggcacacagcaggcactcaaggaaatgattgtggtagtacttaggtgagggcataatgcaggttttaaaaggaatctcccagcctgtggcttattctgctggcgtcaggacaaggacagggacagacatttcccctgacttctcttcacttccagaagtccactggcaacttgcctcagtctcctgtccccaacaccaccacagccacctaaaatcccagacctggatgctgcattatccccacagctgtggaggtctccattccccaggctggcttatataaagtggtaccagggacccagcctagagggacccctgctagtttgccagtggtccctggtggtcacatgtccaaggccctgggtgctgagcacttcggaggccatgggcccttgaagcaaggcctgtgctgggcactgcagaaggcagaggccaggtcggagtagccactgctgtccagctttggtcttgtgggggcagatgcacccatggctcttaggcaggagctggatattctgggcaaagttccgtgtggccgctgggcctgacttcgcagagggggcgctctggccagatgggtggaggttgcaggatttggggctgagtgggaccaggctccaatcaaggcaggtggcctggcttgctgctcagtttgcagcagccgcctttccccagcgtgcctgtggtggtggcatcaatgatcctagcacctgggatgatgcctggcagccgatttggggtgaggagtggcttccaggacacgggcatggagtgctccagccaagcattgccatcgccgtggccctgtgtgctctgagtggcctgggctgccccgacagatggccttttagtgcccctggtgccccaggttcaggcagagggcacagtgcccaggcatgcagtctcatagtgaattaatgaaacagcaacaaaatagacaaattgttccactggtcctttatataggttatttccaacagctttggagagtgagggtgtctcttcatcctcatcagcacaggacatcattcatgttgaacagttttgacattacgtacaccaggaatgggtttagtgtatggggagattcccaggatagccagaatggttagaaaaatggcaaagttcagatagtgtgccccacttattaacttaggacagccactagccaccaaccagttttctgttctgtggatgaactctgtgatcctatgaataaggctgaccacaatttcagtgagaccctagaaccctgtgttgattgactattttatagtagatggcaaggaggaaaatagctataattggaggccctgtactgagcaatttattctatgtaatagaagagtggcccatttggagatatctgtgctaataggacccatatgatgcaaatgagacttatcaggatgagaaataacctggagagtcctcctcatcacttatcctttccagaatccacttgctttccctggcagttgatgatatattgccagtgccttcttccttttcagatctggtttccacatggtccttgcagggagctggagagtcctccccatcacttatgctctccagaatccactctgggtcacatgaagttgacaacgtgtgggaacatgtcatttccctgagaagaaatcttcctcatttctgctgagaagatcctcaggagcagctgatgagtcttcgtcgttacagctgccctcatagatgatgtccaggggctaatcatattcattgattcttgaggctgccattgtctttcatgggaccttttccaatgcccagtaatgaggaagctgttccaatatttcctcaatgggaaggttttcacttgcttttgagtctaccttgacctcaaataaggtctcctcctctgacctgtcatctggaggctcctccaccaggtcttcagcctgagcttcaatgaattgttccccagggtgtattctgttatgtgaccagatgtggatttttttcacccactgcttggcgtgggcagcggatcttctggaccactgaagacacattctcatattctcaaggcaaaattctgaagaaatcataaaactgttcccaccacaaaatgttctttgtaggtggttcatgtctgatgcattcttctaacattatccacaatgtagaggtatttctggaggttcacaccctttcaataacaggagcacaatattctgctaggtacagatgtcttcagcagtaggagttcttgcgctcatttgtcttctgagaatattgttgaaaatttgaacatgtctttttgattctcaaagtcagcaagctgtggatcagctcctaagtgctaaagagcccacagttgcagagttcctgagtgggttgagtgcagtttcagtctgtggctggtttttatttgtgcttgcagaatttctttcatggcaaccagagttttggaaacttctaaaggcttttctgcttctttgttttgttttgttttggtttttggttagaaatgcctttctttccagaacagccatgcttttcagggcctgcacagtgcctgttgcagatgtgcaaggcatcccaagaggaagcaaagccctcactgcttggtggggccaggttgcctgctcttggtctccatgtcctccctttccccgtccaaggccgtcactggcttgggctgctccgttggtccttgcagccgtgccgagcgcacatctcctgatagctcctactctgggcaaggagctgactcggcagtggacaaattgaggcaaccaaataataaacacaaatggatagtcaacacattttttgaaagaacatctgaaagacaaaatggggaatggcgagtctgtctaataaaccattttgagaaaactggatattcatataaagaagtataaagaggactgttatgttgcacaatacacaaaaatcaactcaaaataaattaatgacctaaacttaatatcagaaatgatgaaacttttaaaagaaaacatagggtgaatgtatgtttagggaaactcaaatttatgttcacaggttgcaaaaagaaaaatatgagaaaaacatagaggaaaatgattctgccaataaagtgagttggaaataatttttctgttttcacaaaaatcattgctaacaaaagcaaaaacaagtgtgggactatagaaaactgatgagcttctgcataggaaagaaaagaatgaaccaatacagaaggcatccagtagattgggacaaaattatgggggattatatatctgaaagggttgttatctaacatgtataagaaattaccactactaagtaggaaaaacaacaacacaaaacaacaaataaccagatggaaattgggcaaagaacctgaatagatgtttctgaatagaagacatgaatttgactaccaggtaaaagaaaaggttctcaacatacctaatcatcaagaaaatgtacattaaaactcactgagatatcttctccactctaattggaattaatgttacaaaaaagaaacaaattttttacaatgaaatgatcagtgtggagttggatgaaggggtactattacactactacacagtgtagggtggaatttaagtcagtatacacactatgaaaaatagttggagtttgctcaaaaaataaaatacaactatcatttgctgtagtaatcccaccactgaatatacattttaagaaaatgaaatcagtatattgaagagatacgtgaaatcctacatttcttgacacattattcacagcactcaagatgtggaatcaacctacctgtccaggaacagatgaagagataaagaaaatgcagtgtgtatacacagtggaatgctcttcaccataaaaaattcacggaatcatgtcattgcagcaacatggtggacaatgtaagaaaagctccccggagaagctgtacagaagctgcctcctcagcagtcagggccaggtaccggagctgtttttaccccaggacagggccggccccaagtcatcccagagctgccatggcaccccctcagtcgggtcctgaggaatcctacacaagctacttatatcagtgatcactaggataatccatagaacttttgggaaagaagtttaagacctttctcccaccatttcagcaggataaattccaactggattagaaaatgaaatgttaataatgcaaataagtacatatttatatctgtatataaaatacagttgatatttgcctggtgtttaggtgtctaaaggactttctaagcataaaagcaaaaaaaagtcataaaaatgctatagcagtttgagactctatgcaggaaagggcatcatcacgtgcatggatgaatctgtatctaattttaaacaatttccaatggtgcctgtttccttttctttgaaaatctctggagaaatagttcctcttgctgtgtctttctttaggcaagaatttttactaattgatgtgtagtctgaatcctggctaagtataaaccttttattttttatacctgttcttagtgaaaatgaaactgtgactttttttttaattccttttgttggtcaaaaactacaattaactcttctgagtttcttctctggctgaacaaacaatggtcccattggcctttcagggaactccaggccgtctcaaaaaccttcatgtttcatttcttttcagagctcccaaaaagaatagcttgctcttgacgttgtacatgttagtggaatgatcaggactactttgcaaagatgaaaaatttgtgtttctagtgatttgaaaatagaaatctgatgtaactattagatattgggaaagaaggtgacgaaggtaggtatcaccgaaagcacttaacaattctgaataattctgtacttgattgcatttatgtgtatcataggaacagttgggtttccttgagtgttaaattatttattcacttattccacttcaagccagctaaatgattgtttccctgatggcaaaagtctcagattgattgcacagtttatttggttggattgtttatgctctttttattatttattcttatttcaccaatgaaaatatcactaagttctttggtttgttgacctgattgtacctactttgacaaatcactgcctttctggacccagttttctcattaagtggcagtgataacctgtcatacttacagatataaaaacatgaaagttaaagtattgggtaatactttcctcctatcttttttttattttgaaaaagataaaaaattggcataatgtattagttaagatggaataatcatatgttgatatccagccatttcttctctcaaatgataggaagatttttatgtgaaactacttgtgagagatcttaacaatttgtagttagagaaagcactattatatcatttggaaatgcaagaaacaagttacctttggggcaacagaggcccttgtcattttctcaaaagaaggaagcatcagcattttgatgatgatgttgagattgtagaaatgatgaaggtgaaaaagttattctagcttatgtttagcaaaatgaaatgaacccaaataataaaacagttacaacattgaatctctttgggagaaaaaaaaaagatagaatgctaatgtccttcagaacttcttaaaccagaaccttaaaaaaaagagaagcttttaaaaaatcataatagtttatgatcttgaagggtttaaaagtatttgatgaagatgtcttttgaatttatttgtaggtcttcttgtgtatttaaaagctaagttatcttgtaatcatttttttctatacctttgtcagtaacctcttagtgatgaaataaaaaagattaggtaatcatccagcaatggggaagaagttaaggaacaaagagctcagattaaactagtttttagaatctaagcatttctgcatgaatttgaatcatggaaaacaaaatgtagcactccaacatttgatgcaaaactaaaagtggaatactgctttgatatttgaatgaattgaaaaataattaacatccttggaactgtatgtaaagaaggacttcacaagtattatagatacccccaacctcagcccttttcccatgtatctctttgatcacatccctacctcatagatcacccatgtgctgaagactttcagttctgtatgttcattctagatctcctgaactcaagatcagaatatctttctgacttctgactgtgtatttctggatgttatacaagaacctcagctcaaactcagtattccctaaaccattgtttttgaaactttatgttggatgtgaaatctgtattgtagaataacattaaaaaaagaaagaatagtatgcaaaatatcagagtgcattgtatgtagcaagagtaggtattttcgtaaactttttgttttaattaaacacatatatatttattattgcagtgtaaaatgtatttcttaatttggataagtgttagtgaggatgtggataaattggaactcttgtacattactggtgggactataaaatggcactgccgtttggtaaaacagtttggcagttcctcaaaaagttaaacatacagttaacatgtgatatagaaatttcacttttagatgtacacccaaaagaattgagaacatatgttcacacagcaacttgtacacaaatgttcatagcagcattactcagaagagccaaaaagtggaaacaactgaaatgtccatcaagtgatgaagcagtaaaatgtagtatatccgtacaatgaaatattcagccataaaaaggaatgcaatgttgttgcatgctacaacaacttggatgaatcttggaaacattattctaagtaaaagattccatttttatgaaatgtccagaataggcaaatctatagagacaaagataagtggtttccaggggttgtggggaggagagaatgggaaggtgacaaaatgttctggattagataatagggatgggtataacttagtgactatacaaaaaaaatcactagaatcatatactttaaaaaagatattcccataaaaaaaagaacaagcaagaaaaaataactaaatttgactttaggagttaaaaagaatatagtatctcaaatgaaaattttgctggataggattaggggtagattagacactccagaagttaaagatcagtgagcttgaatacacacaatagaagctagtctaaacaaagcacagagagaaaaaagaacaaaacaaacctcccacaacaaaacaaaacaaaagccaaccaaaaatacagcctcaatgacctatgggaaatatttagcagtctaatatacatgtaattggaatccctgaaggaggaggggggtagaatgtatctttttttgtcccctatgactgctgttaagattttattattgatttttaggaattgcattatatcttggtgtggttgtttaaacagaggtatagcttatcaaccaatggtggagctaaaatagaatacttgaaagtacttatggatgcacagaatctaagatggcccccaattttcctgctaccttgtacccttgagtatatgtgggacctgttacttgcttctaaccaataaaatctcacaccagttagaatggtgattattaaaaagtcaggaaacaacggatgctggagaggatgtggaaaaataggaacgcttttacactgttggtggaagtgtaaattagctcagccattgtggaagacagtggcaattcctcaaggatctagaactagaaataccatttgacccagccatcccgttactgggtatataaccagaggattataaatcattctactataaagacacatgcacacgtatgtttattgcggcactgttcacaatagcaaagactcggaaccaacccaaatgtccatcagtgatagactggatgaagacaatgtagcacatatacaccagggaatactatgcagctataaaaaatgacgagttcatgtcctttgcagggacatggatgaagctggaaaccatcattctcagcaaactatcacaagaacagaaaaccaaacaccacatcttctcactcataagtggcagttgaacaatgagaacacatggacacaaggcagggaacatcacacaccggggcctgtgtggggggtcgggggcagggggagggatagcattaggagaaatacctaatgtagttgacattactttggtttgacattactttggtttgtgggtgccacaaaccaccatggcacatgtatacctgtgttacaaacctgcacgttctgtacatgtaccccagaacttaaagtataataataataaaataacatgtatgtcaagggtgacatgtaattaagcaaagctcagtaaatttaaaatgattgaaattgtactaagttttctgaccacgctagaattaagctagaactccaggtccagatggcttactgatcaattttacccaacactttggaatgaataatgacatttgtatgaaagtcctttcagaaaatagaagatgagggaatatttcctgaaccattttatgaggccagtattgacatgggtaataaaaccaacaaatacattacacaaaaaaattgtagcacatgatatccctgataaaaccaaatgcaaaaatacattaaatttgcaaattgaatgcagcagtagataaaaaggacaataatacatcatggccaagtagggtttatcccagcaaggtaagactggtttaacatctaaaatcaatcagtataattcatcatatcgataggatgaaggaaaaaaactcatgtgaccatctcaacgattgcagaaaatgtatgtgacaatattcaacacccattaatgataaaaatgttaaatacattacaatagaagaaaacttcctcagccttatcaagggtacctgtgagaaaattatggataacatttttcttaatggtggtagactgaatgctttcccctatggtcagaaaaagacaaaactcatcactgctatacaacatttcatgagaggtcagcagtgctttcatgccttaaaggcatgaaaatgaaataagtgatttaagattggaaagaagaactaaaactacgtttgctgatatcaaaaatcccaagaaatctgcccccaaaaagcacttatgaattaataattaaacttaacaaggaagcaggatataagaccactgtataaaaatcaattggaaaactaaaacaaaaccccaaaaaacccaacctaataatctgtttccaataacaccaaaaaacatggaatactcagggatgaattataagtagggataaacaaggtgtgtgcaagacctgacaatgaaaactattaaatgttgttgagaggaactaaggatgacttaaataactggagagacatactatgttcatggactgaaagatatgcaatattgataagatgtcaattcttccaaaattgatacatggattatttagcttggtaaaaatccaagcttttttttgtagagttttcaagcattttgtaaaatttatttggaaatacaaataatctgaatagccaaaacaatgtggagaaaaggagaaaaaattagagaacttacattacctgtttttaagacttactataaaatcttactttcaggtgtggtattggtatcttactgtaaagtcttcctgtaaagtatattgatatttagtgtggtgttggcataaggatagatatttaggcctatggaatagaatagagggtccaatagtagattcatgtatctgtagtcaagtgattttcagcaaagaagccaagggaagggatcatcttttcagggtagtgttggaacaactggatatctattatggaaaaagtgaacctttatactgtatactgtatgcactcaaattttactttggactggatcacagattcaaatataatagagatatctaaaaaccttccaaaagaaagtataggagaaaaattcttgcaattttgcatagacaaagatatcttagttcctagaaaacataaccataaaataaaaattacatcaaatagacttcatcaaaattggaaatttctgctctttgaaatatactgttaagaaaatgaaaagacaagaaaattcccattacatagctcacaaaatacttataactaggatatgtagagaacacttcaatactaagacaatgcaataaaaaaacaaaaaaactggacacaacaagaatatatatgaaatactcataagcacatgaaaagattattaacatcattaatcatacaggaaatgcagattaaaaccacaatgagatactaccatgtacacactaaaatggctaaagccaaagacactgacataaatttttggtgagtgtggggctcctggagccctcagacattgctgataggactgtgaaatgacacagccactttggaaaatgagttcatcatttctaactaagttaaacatacacataccttaatttcattcctaggtatttatctaagggataagaacacatgtgttcacacaaattgtgtggtgttcatagcagctttattcataatatcaaaacattggaaacaatctacatgtctatcagcaagtgaatggaaaaatattttgtagtatatccatgcaatgaaatattacccagcaataaaaataaactatgggtacatacaacaatataaatgaatctcaaaaatatgccgagtgataaaagccattctggttccatttacatgaaattctaggaaaggggaatctatggaggcagaaagcaggtcagaggttgctttggtctaggggatcgagaggccttactgccaaacagcaccagtagattctttgggggggcggaagagttttatattttcattgttgtgctgtttacatggggatatgcatttgtcaaaactcactgagctctacatttaaaatgggtacatttttgtagtattttaattataaatcaaaattgaacaaaaaagtaacacatgttatttgaggacttttttttttaaagcatcatgttttatttttattttttgcagacaagggttttatttaatataactcataaattacattgccaatatcctaaaggtaataaagaagtcaaaagcactatttgtgaaaatcagtatatcatatgacggtaagcatagttgctattcaccaaaaacgttcagaaaacatttgaattcattgtctgaaagagcttaggctcaagacttgaattactaagaaaagaaagtagtatataattatacaaagatgagtaataaccaaaaactgttctttaatgcatgtttgtttttcctgaaagccatttctttctttttttcttttaatactttaagttctagggtatactttaagttctagggtacatgtgcacaacatgcagatttgttacatatgtatacatgagccatgttggtgtgctgcacccattaagtcgacatttacattaggtgtgtctcctaatgctatccctccccactccccctaccccaggacaggccccggtgtgttatattcccctttctgtgttcaagtgttctcattgttcaatgagtgagaatatgaggtgtttggttttttgtccctgcgatagtttgctgagaataatggtttccagcttcatccatgtccctacaaaggacatgaactcatccttttttatggctgcatagtattccatggtgtatatgtgccacattttatttttatttttattatttttatttttaaaattttattattatactttaagttagtgtacatgtgcacaacatgcaggtttgttacatatgtatatatgtgccatgttggtgtgctgcacccattaactcgtcatttaacattagatatatctcctaatgctatccctccccctacccccaccccacaacagtccccggtgtgtgatgttccccttcctgtgtcaatgtgttctcattgttcaattcccacctatgagtggcaacatgtggtgtttggttttttgtccttgagatagtttgctgagaatgatggtttccagtttcatccatgtccctacaaagcacatgaactcattatttttcatggctgcatagtattccgtggtgtatagtgccacattttcttaatccagtctatcactgatggacatttgggttggttccaagtctttgctattgtgaatagtgcctcaataaacatacgtgtgcatgtgtctttatagcagcatgatttataatcctttgtgtatatacccagtaatgggatggctgggtcaaatggtatttctagttctagatccttgaggaatcgccacactgtcttccacaatggttgaaccagtttacagtcccaccaacagtgtaaaagcattcctatttctccacatcctctccagcacctgttgtttcctgactttttaatgatcgccattctaactggtgtgagatggtatctcattgtggttttgatttgcatttctctgatggccagtgatggtgagcattttttcatgtgtcttttggctgcataaatgtcttcttttgagaagtgtctgttcatatccttcgcctacttgttgatggggttgtttgtttttttcttgtaaatttgttcgagttcattgtagattctggatattagccctttgtcagatgaatagattgtgaaaattttctcccatcctgtaggttgcttgttcactctgatggtagttgcttttgctgtgcagaagctctttagtttaattagatcctgtttgtcaattttggcttttgttgccttgcttttggtgttttagacatgaagtccttgcccatgcctatgtcctgaatggtattgcctaggttttcttctagggtttttatggttttaggtctagcatttaagtctttaatccatcttgaattaatttttgtataaggtgtaaggaagggatctagtttcagctttctacatatggctagccagttttcccagcaccatttattaaatagggaatcatttccccatttcttgtttttgtcaggtttgtcaaagatcaggtagttgtagatatgtggcattatttctgagggctctgttctgttccattggtctatatctctgttttggtaccagtaccatgctgttttggtgactgtagccttgtagtatagtttgaagtcaggtaccgtgatgcctccagctttgttcttttggcttaggattgatttggtaatgcgggctcttgtttggttccatatgaactttaaagtagttttttccaattctgtaaagaaagtcattggtagcttgatggggatggcattgaatctataaattaccttgggcagtatggccattttcacaatattgattcttcctacccatgagcatggaatgttcctccatttgtttgtatcctcttttatttccttgagcagtggtttgtagttctccttgaagaggtccttcacatcccttgtaagttggattcctaggtattttattctgtttgaagcaattgtgaatgggagttcactcgtgatttggctctctgtttgtctgttattggtgtataagaatgcttgtgatttttgcacattgattttgtatcctgagactttgctgaagttgcttatgagcttaaggagattttgggctgagacgatggggttttctagatatacaatcatgtcatctgcaaacagggacaatttgacttcctcttttcctaatcgaataccctttatttccttctccttcctgattgccttggcaagaacttccaacactatgttgaataggagtggtgagagaggacatccctgtcttgtgccagttttcaaagggaatgcttccagtttttgcccattcagtatgatattggctgtgggtttgtcataaatagctcttattatttggagatacatcccatgaatacctaatttattgagagtttttagcatgaagggctgttgaaatttgtcaaaggccttttctgcatgtattgagataatcatgtggtttttgtctttggttctgtttatatgctggattacgtttattgattttcatatgttgaaccagccttgcatcccagggatgaagcccacttgattatggtggatcagctttttgatgtgctgctggattcggtttgccagtactttattgaggatttgttcattgatgtacatcagggatattagtgtaaaattctctttttttgttgtgtctctgccaggctttggtatcaggatgatgctggcctcatcaaatgagttagggaggattccctctttttctattgattggaatagtttcagaaggaatggtaccagctcctccttgtacctgtggtagaatttggctgtgaatccgtctggtcctggacttttattggttggtaagctattaattattgcctcaatttcagagcctgttattggtctattcagagattcaacttcttcctggtttagttttgggagagtgtatgtatcgaggaatttatccatttcttccagattttctagttcattttcatagaggtgtttatagtattctctgatggtagtttgtatttctgtgggataggtggtgatatcccctttatcattttttattgcatctatttgattcttctctcttttcttctttattagtcttgctagcagtctatcaattttgttgatcttttcaagaaaccagctcctggattcattgattttttgaagggttttttgtgtctctatttccttcagttctgctctgatcttagttatttcttgccttctgttggcttttgaatgtgtttgctcttgcttctctagttcttttaattgtgatgttagggtgtcattttagatctttcctgctttctcttgtggacattcagtgcaataaatttcccactacaaactactttgaatgtgtcccagagattctggtatgttttgtctttgttctcattggtttcaaagaatatctttatttctgccttcattttgttatgtacccagtagtcatttaggagcaggttgttcaatttccatgtagtcgagcggttttgagtgagtttcttaatcctgagttctagtttgattgcactgtggtctaagagacagtctgtcataatttctgttcttttacatttgctgaggagtgctttacttccaactatgtggtcagttttggaataggagtggtgtggtgctgagaagaatgtatattctgttgctttggggtggagagttctgtagatgtctattaggtccacttggtgcagagctgagttcagttcctggatatccttgttaactttctgtcatgtggatctgtctaatgttgacagtggggtgttgaagtctcccattattattgtgtgggagtctacgtctcttagtaggtctctaaggacttgctttatgaatctggctgctcctgtattgggtgcatatatatttaggatagttagctcttcttgttgaattgatccctttatcattatgtaatggccttctttgtctcttttgacctttgttggtttaaagtctgttttatcagagactaggattgcaacccctgccttattttgttttccatttgcttcgcagatcttcctccatccctttaatttgagcctatgtgtgtctctgcatgtgagatgggtttcctgaatacagcacactgatgagtcttgactctttatccaatttgccagtttgggtcttttaattggagcatttagcccatttacatttaaggttaatattgttacgtgtgaatttgatcctgtcattatgatgttagctggttaatttgcctgttagttgatgcagtttcttcctagcctcgatggtctttacaatttggcatgattttgcagtggctggtaccgtatgttcctttccatgtttagtgcttccttcaggagctcttttagggcaggcctggtggtgacaaaatctctcagcatttgcttgtctgtaaaggattttatttctccttcacttatgaagcttagtttggctggatatgaaattctgggttgaaaattctttccttcaggaatgttgaatattggtccccactctcttccggcttgtagggtttctgccgagagatcagctgttagtctaatgggcttccctttgtgggtaacctgacctttctctctggctgcccttaacattttttccttcatttcaactttggtgaatctgacaattatgtgtcttggagttgctcttcttgaggagtatctttgtggcgttctctgtatttcctgaatttgaatgttggcctgccttgctagattggagaagttctcctggataatatcctgaagagttttttccaacttggttccattctccccgtcactttcaggtacaccaatcagatatagatttggtcttttcacatagtcccatatttcttggaggctttgttcgtttctttttattcttttttctgtaaacttctcgcttcatttcattcatttgatcttccatcactgatacccttccttccatttgatcgaatcagcaactgaggcttgtgcattcatcatgtagttcttgtgctgtggttttcagcttcatctggtcctttaaggacttctctgcattggttattctagttagccgttcgtctgattttttttcaaggtttttaacttctttgccatgggttcgaacttcctcctttacctcagagtagtttgatcatctgaagccttctgctctcaactcgtcaaagtcattctccatccagctttgttctgttgctgctgaggagctgcgttcctttggaggaggagaggtgctctgatttttagagtttccagtttttctgctctgtttttcccccatctttgtggttttatttacctttggtctttgatgatggtgacgtacagatggggttttggtgtggatgtcctttctgtttgttagttttccttctaacagttaggaccctcagctgcaggtctgttggtgtttgctggaggtccactccagaccctgtttgcctgggtatcagcagcagaggctgcagaacagcagatattggtgaacagcaaatgttgctgcctgatcgttcctttggaagttttttctcagaggagtacccggccatgtgaggtgtcattcagcccctactgcggggtgcctcccagttaagctactcgggagtcagggacccacttgaggaggcagtctgtccattctcagatctcaagctgcgtgctgggagaaccactactctcttcaaggctgtcagacagtgacatttaagtctgcagaggttattgctcccttttgtttggctatgccctgcccccagaggtggagtctacagaggcaggcaggcctccttgagctgcagtgggctccacccagttcaagcttcccggctgctttacctactcaagcctgggcaatggtgggcgcccctcccccagcctggctgccaccttgcagtttgatctcagactgctgtgctagcaatgagcaaggctccgtgggcgtaggaccctccgagccaggcacgggatataatctcctggtgtgccatttgctaagactgttggaaaagtgcagtattagggtgagagtgacccgattttccaggtgccgtctgtcacccctttctttgactaggaaagggaattccctgaccccttgtgcttcccaggtgaggcgatgcgtcaccattctttggctcacgcttggtgtgctgcacccactgtcctgcacccactgtccgacactccccagtgagatgaacccgttatgtcagttggaaatgcagaaatcacccgtcttctgcgttgctcacgctgggcactgtagactggagctgttcctatttggccatcttggttccatcccccctacttttgagattttaaacttgggatgcctttgattcattttattcaagtattaatttgagtaaaaagtcatgtatgtgcatgaagtattagctgcagtggtggttttgttcttcataactttgctcataatagctttgtttatttatttattcatttatttatttttgagacagggtcttgctctgtcacccaggctgtagtgcagtgacatgatcttggctgacagcaacctctgcttcccaggttcaagtgattctcctgtctctgcctcctgagtagctggaattacaggcatgtgccaccatgcctggctatgttttgtatttttagtagagacagggttttgccatgttggccaggctggtctcgaactcctgacctcaggtgatccacccgccttggctgcccaaagtgctgggattacaggcatcagccaccatgcctggcctgctaataataactttaaaaaacctaacatttcatattttgataaataaatgcagtactcatatccagttgaaagggaaatacaacattatttaataaacatattacatctaaatattaaaaaattcctatcatatgataaattaaaaaaaagagaagagattaagcaggggcttagaaacataaacaaatataaacaaactttacaaaactgaatggattagcagggtgttggggcacatgcttgtagttccatctccttggaaggctgaagcagaaggatcccttgaacctagcccaggcaataaagcaagaccctgtctcttaaacaaaacaaaacacaaaacaaaacagagacaattggaggaagacagaaactagaaagaaagtgtaaaaaaataaaaacaccccaaaactcacagaaattaaagtgatttttaaaagttgggttgtttatttgttaactatgagcatgaccgctctacagtcagaaaagataaaatcaaggctcagatggggaaacgcatggtgctgcttttagaaccatgctcagaaagatttggtggagtttaaacaaacaagttcagacttctgttgccctcttttataggagtgaaagagaaaggaaggaaagatttacaaaggtgtaaatccctttcatcccctggaccacagaggtgtagcagagaatggttcctgtaagacttgaaaactgaaagtacaacataggtgcaatttgtgactaagtatcactggtacaaagaacttaactgattgaaatatatcaataagtaatctcttgggtggtcatacaggaatgcttaaaacctcagacccaattaatggcaaaacaatgaccctacatctgttttttatgtatacacacacacacacacacacacacacacacacacacacacaaatacatatgtaacaaccttttttcatggactgtcttagttcatctcattttgaggaaatagttgttgaatgacttctgtgtgtttctgtgacattgtattaagtattcaaatacagacttaaaaaagtaacttcctcttatggctattatattttaatattcctgaggcagatcattatcgattacctgtcagtctccttggggtttccatgatatccccttgacacatctctattgttgtcttccacattgctttgtgatggcttctgttcgttcatcttcttctccagactgtgagcttcttgataacaagatctttgtctcactgttttgggattctcagatcttagcacagtcctagaacattttatgctcttttcaaaccttcgttgaatgaatacattaatgattctcaagtatatatttcaagtgttgacctgtcccctaaattccagagctgctatcatcatcttcctgttgaatatttccatgagtctactatctttcacaaacccaaactgcttctcttccgtgacaaatcagcagccccttctggctccactgtttttgaagtaggcccccttaaagctgaagattcacagtttatttgtccatagttgccctatcttagcaccctattttaaaatgtgtttttgttatgcagactttgtaagggtcaaatcatggccttcaaatcgatttagagaaattgaaatctcgcaatgaatatctcatgagaagagaagcataatgaagactacaaaaaagcaatgcatttaaaaagtagcatgttgctcctgtgtgtgtatagcacaagagaagcttagaagagtgacgatatctcccagctgtcacacttttattttatatccttcagttatttgtggcaatgatggaaaccagaacaatatgattgacatccttagagtattcataacactattcttagctcgcatgtgaccttgcattccctcagacctttcaccatttctcttttaaacaaatttttaaattttctaacaatctccagtttacaagaacggctatagcacagtccaaagaccttttttttttttttttttctgaaccatttgaaagtaaattgctaatcaaatgttctatcacctataaatacttctgtgtgtttttcctacaaactaggtcacttccctgcaggaccctcagacaagcataaaaatcaggaaagtaacactgattacttactattacttactattcttttttttttttttttttttgagcagatctcaacagtgggcttaaaatcttcactaaaccatgtgttgtcatttctggaacacaggtagaatagatgtagcataattctatttttttttttttttttaggtggagtcttgtgctgttgcccaggctggagtgcagcggcacaatcttggctcattgcaacctccacttcctgggctcaagcaattctcctgcctcagcctcccaaatagctgggacgacaggcacatgccaccatgcctggctaatttttgtatttttagtagagataaggtttcaccatgttggccaggctggacttgagctccagacctcaggtgatccactcacctcagcctcccaaagtgctaggattacaggcataagccactgcacccagccagatgtagcataattcttaagggccctaggatttttggaatggtaaaggagcactggtttcaacttcaagtcaccagctgtattagcccctaacaagagagccaggctgtcctttcaagctttgaagccaaatatcgacttctcccttctagttacaaatgtcctagatggcatcttctcccattaaaggctgtttttgtctacattggaaatctgttgtttaatgtagccactttcattatgatcttagctagattttctagataacttgctgcagcttctacattaacccttgctgcttcaccttgcacttttatgttatgaagacagcctctttcctcaaacctcataaaccagcctctgctagattccaggttttcttctgtagtttccccacctccctcagcctttatagaattgaagagttaggacttttctctaggttagggtggggcttaaagaaatgttgtgattggttggatcttctatctaggccactcaaactttctccctatcagcaacacagctgtttcactgctttatcatttgtgtgctcactggagtggcactttagtctctttcaagaacttttctttgcattcataacttggctgtttggcaccagaggcctagcttgtgacttctctcagcttttgacctgccacccttactaaggtcaatagtttcttttgatttaaggtgacagatgtgtgactcttctttcacttgaacacttagaggccattgtagggttattaattggcccaatttcaatattgttgtgtctgagggaatagagaggcccaaagggagggagagagacaggggaaccacctgttggtggagcagtcagaacacacacattggttgattaagttcacagtcttatgggcatattgtgtggttcccccaaacacttacagtagtaacagcaaagattacttattgatcataggtcataataatagataaaataataattaaaaaattgaaatattctgaattaccaaaatgtgatacagagacatggtgtgagcccatgttgttggaaaaatggtggtgatagccttgattaacacagggttgccacaaaacttcaatttgtaaaaaacataatacctgcaaagcaactaaagtgaagtgcagtaaaacgaggttatacctgtatattaataggtgactccaataaagacttcggtaatctataacaaggagccaactatcaaatggcaactgcaaagatagttctctcactgaagctaacaaaaacatctacaaactttcagctgaaaaatcaaaaaagtttgagttgtataggacattctaacaccagggaatgagacatatctttttgtatgtaataataatgcaagcctgaaaatcttccagtgactcacagagtaataactgtgacagaggctttctgaattacacatggtgaattttacaaaaacataatatgtggatgatgtttacataagtttatatcttcttccatactatgtaatgtggttctacaaatgtttaggtaattagggtttaggagggtataattaaatgatttattattcaataatatgcttgtgttgggacattgtggaattttacctgctattgttgtgaggcccggagccaaatttaatcttatctattagtgcacaatatatttcttaaccagattttaaagaaaatctagccaaagttgtatgtgattcatgttgtatcttcctcctgatgttagttttaatgctttaagatagtagtagctatgattgatgccactgaaacttttagttcacttgactcctctatatagcccatggatacccagtgtagtacattgatttggttttatgactattgacaccattttctgatttatgaaggttgacttgtccacaatcggtgagagctgggatttaatccagatattctggctacaatcccaataagagatgggtcattcttatccttcattcatgtattcattcattcatatcattcattcattcattctttacacagaaatgtgttggtacctatgatgtaccaggtatttttctagccatgggaggcatatcaacaaatgaaaatgataagaacccctaccctgtggagcttacattccagtagggcagaggggaaacaatggcagataacataataagtaaattctgtagtatattaagtggtagtaatgtatacttggaaaaaagtaagcaggtaaatggaattgggcataccaattttatacctctttggagggagatatgaattaatttttcaattttatctcataaattatgtcaaaataataggttttgtcccaagcctttccaagcaggtagcctggaacaagtgttctgctcttctcctctctccccactactcagaacattgctataaaagatagctaaattacaagatcaacttacagagtcctacttaattcattatgtagctcaactgtggttcaaatctagtagtgttatagacctaaccagtccttacagtgggttttctccccagtctggtaaactgtattccatgctccagctgcaggtgacaggaacctcatcctttcatgctgctcttttagctttgggagtaagcaactccctctccttccacattatccaatattgtgcggcagagacttgcttccattaaagatactgatagtggctcctccactgctagaagcaggaggatgatcttggggaatgattatggatttaaaggaggaagagatagtagcataggcttctgttttcacaggaaataggaaggttgacagttggaagaaatcgtagaggagtcccagctgggatcagtgacaggagggaggaaaagggaggccctggtctcacaggaaggttgagttattgggatgtttatgagtcaaggatggtcgcttatcacccagtatgtaggtttctgtagataaattcctgagatgaatttacctatgccttcttgcttgatttcttttttgctttttctttctttctccctttccctttccttttcctttcccagggtattgctcttttgcccaggctggagtgcagtgtgcaattatagctcactgcagactcaaactcataggctcaagtgatcctcttgcctcagtcttctgagtagctaggaccacaagcatgcaccactatgcctatctaattttttaatgtttttgtagggatgggattttgctatgttgtccaggctggtcttaagctcctggcctcaggtgatccttccatcttggcctcccaaaatgctgagattataggtgtaagccaccatgcctagcctcatttaattttcataaagtctgaaattattatctactctaagtttggcaagcaactggttgtttagagtttagtaataattttttgaaaagatataatggatataatttttacatatttgtttaatagcatcctcacaaagaaatttttaaatttcttttatagaattctgatattttacagccctgaggtactcttaattttaaaatatatttcttttttaatacattatttttcataaaggctttataatcagcatgcttttattttttaaaaatattgtactactaatattgttgcataacttcaaaaattatcatttagtagccatataatactggctaataattaacataatataatataataaatataatataatataatatatagtctattgataaataggtatttgagtgtttatctgtttgccttgtattatactaggaaatgtggcttgccaaaataaatgcattatgctttcggttagcttgtagtctcattcataaagcaatgtagatacaatgcagtaaggataaggtgaaatctgcctttgcaaagggatttttaatttggaaaaagaagggatttgtgggacaatgagatagaaggctttacagaaaaactagatggctttgtggagaaagagaatttaactagttattaccagttcaaccgctacgtccccattcagaccatcagcatactgtgtgtcttcctttttccctgctttccccttgcaatctatttgctatacaggtgccacagtaaaaagcaattcagatcaagtgactcctctgttcagaacccaccagtggtttctcaggtcatttataatgaacccctcagtctttaatgatatagcctacaaagttctgcatgatctgcccccttggctgcctctctaacctgatttctgacttgtgttttccttacacacactgtctcttgatgctggacgcattcctgtacgtcacacactcccagcatgctctcacattacaatgtttgtaattgccattccctccaccttgaaagtttgtctctgcagtatttccctggcttgctctcatttcctttggatctctgctcacatgttacctccttagagagggccttcctgaaaatgatagaagtgttttttttggagcacatcccctcactccccagctcctctccagtgtatttttctccatagcatctttctgcctgaccttgtatttctatatctttttgctttttatcttctggaaaacaagctccatgagatcacacagggattttgctttattcctcactgcatgtcccctcctaatacagttcctggaatacaggtgggggttcataaatatttgttgggtaaatgaaagaatatattaaaatattatcataaaccttttttctttccatgatttgatgatgtggaattgaaaacaggtctacatagatgatagtgatataatcaacagcattcctgagtacgtctaggatcagcacttggtctagaaaagatctgtcttctgccctcctttcccgtccatgcacatccactgcctttgggatcaaacccaatctccttcctctggcagtcagggccttctgagacctcatctctgttgatctttctagctttacttctaccaagtcattcccctcataactgcatgtcatactgagtggcttatagttcccctcctgtggcccttgcagatatttcttgcattgcttttcatttgtcacttatttgtttatgggtttctcctcacagtgcataagctcttcaaaggaagaggcctggtatatctttgtatttctgggatctagcgcagttcttgtatattgtagatggtcagtaaatacttattcaatgtaaaagatgttttttgccttccaaagactagtggtaacttgaaatggttggatataggacagataaactgatagaagcagttttacctcattagagggcttggatataagtatgtccagggacaaatatagtaaaaaagagagcaatattataatatcctttaaaaaaaaaaaaagagacaggtcttgctgtgttgcccaggctggtgccattatggctcactgtaacctcaaactcctgggctcaaacagttctcctccttcagcttcctgaatagctaggactactggtgtgtgccaccatggcggctaattaaattttttttttttttttttttttttttttttgtagaaatgggttctcactatgttgcccaggctggtctcaaattcctggcctcaagtgatcctcccatctcagcatctcaaagtgctgagattacaggcgtgagccactgtgcctggctagaatatcctaacttttagcaaaatcatacctgagatgaggaaggatggcatataacatgattgaatcagcacacttaactaagaaagatagcctaagtggaaagaagggttatttgaaaggcattatttagaaagaaggggagccatttggcagtggactgactatgtgggcatcagtcctttatttagtcactgagagtcatgcaaggtggtgagcctgctgataatgaggaaataatacagaggggagaattcaggggagtgatgacacgttcacgttcttgctattttggacttattaacaacgtgagtgttgagggttatgatagtgttagcctggctgctcctggttcgggaaagagtgctatgaaaattgagatatatctgtctagtgtatgggaggagaaaatggctgtatttggttctatatatttgtcatgcctggttgatggtttgtattttctatagtgatttgtgagtgacaatggatctatattcaattgacccagtatagttgaatatgtgaaaatattttatgtaattttactaatatatattttgttaaaatacaaccatatagaatctactaggctataggtgttgaaagataacatttttttttttctaaatcaggtttgttacagaaggagaaagtggcagttgaagcatttcagatttgctgccttctcctacctcctgaaaataggagaaagttacagctattgatgaggatgatggcaaggatttgcttaaacaaagagatgccacccctgtgtgatggctttggtacccgaacactggtaggttgatttttaacatcaggtatgactttttggaatgaaagtcgactgagtaaggtgtattagtttgggtgatcagagggaagtacaaagcagacttgcttaaaagagccacagtcagtgtccacccagacttgtgtcgtgcttttgttctaagtgtcttaaagaacataatgagaaatggagacttgagtaggggcagactctgtagagagatctgctacatcctgttctcccacttaaaattattttaaatttattcttaattgacaactaataattgcatatgtgatgttttaattcatgtatacattatagagtcaatcaagctaattaacagattcattaccataccaacttatcatttttttgtaatgagatcattaaaaatctattcttttctcaattttgaaatatacaatatattattataattgtcgtcaccgtgctgtgcactagagcattaagacttgatcctcctgtctcactggatctttgtaccctttgaccaacatctatttccatgtccctgtatcccccagcctgtggtacctaccatctaatctctgcttctattggcatatgtttttaaagagagtttattttagaatttacttactagcaaaatctcttgattttcctcaaaaaatgtctttgagcaaaactggtgcttcagtggaatgtatgtgctttccatatcctgttaaaacaccgtgtactccctggggattcactggcccagttttagaagtaatagagtgagatcagaggagcacttagtgcccagtaggattcttgatctctatatttttttggagtgagtggatggttagagaggctaatagacctttttgaaaagctgaagaaaactttatatctattctgcatataaaatacacatgcaaaactttgcatgcagtttcaaggcgatcacagagtccctggggtccatggtctccaggcaaaaaattctctgcctgtgtgtctctctgtacatgtaaatgtaagtgaagatcatttgcagtgtgttaatgaagtgttactaagcagaattacatgattttttgcttaaagattttgaaggaagattgtcagcgataaaagtagtaggaaaaaacaaaacaaaacaaaagccagtccaaagaacagtattaagaatggagtagttaggctgggcgtggtggctcactcctgtaatcccagcactttgggaggccgaggcaggtggatcacctgaggtcaggagttctagaccagcctgaccaacatggtgaaaccccgtctctattaaaattacaaaaattagctgggcatggtggcaggcgcctgtaatcccagctactcgggaggctggggcaggagaattgcttgaacctgggaggcggaggttacagtgagccaagatcacaccattgcactccagcataggttacagagcgagactccgtaaaaaaaaaaaaaaaaaaaaaaagaatagttaatttcaattctatggaaattattacattgatgctataatatattttgcatttctgcttgcctcaaagagagtctcatcacttaatgtacttcttgaaaagtcccatggctttgttcaaagatgattgtcaaatatacatcgaaaatcctagagaaaataagctaactaggaaaagatgtaatggttgaggcatgtggactgtgttagcggtttaaaacaaatcaataatgaaattaggataaataataattgactaaatggctataaagtgctttgaacttagtagtgctacatgattcaagtcatggtgataatgattttcaaaatttgttttcatatatttatatgtgtgtatgtgtgtgtatatatatatatatatatatgtatatttaaaatcgtgtaaaaggaggtttaaaaattgctcagataagcatctctctgcagtctcttaacaggaagatgcacattttgtttgttctggttgttgagaccgtcaacccatctgagatggctgggtactcttggtagaatatgcaccctgtgccttagaccatttctcatatttgccttttgcaaattagattgcactcagttcagaaaaatactcatctgcgtttaccccccaccccgctctttttttagatggttcagacattttcccgttgcatcttgtgttccaaggatgaagtggacttggatgagttattagctgctagattggtaacgtttctgatggacaattaccaggaaattctgaaagtccctttggccttgcagacctctatagaggagcgtgtggctcatctacgaagagtccaggtaaaggagaggatattatcagttctatgaaattggcaatataaagtcacgtaagcttgctaggcttcttggggcattttattatgaggattaagtgaattaatgtttataaagtacttacaacaggtcttggcacatagtaatcccctgcatgtgtttgtattatcattgaaaagtttacagaatgcacatttggttttgtgtatcaatccatgtggcatattttttattgctaattccttgaatgagtttgtttagaatctacatacacctactgatggaaatgattttatgtgcagtaagtgtcttgattcataattgccctgtgacctagtttaatattcccactttttgcatgaaaaagctaaggcacaaagaacttaaataacttcgcttaaggccacagagccagaattctgactgttgcagtcagcctctgtaatcagtgctctaaactatcattccatattgcctgtctaaaaatcatagtacagtagaagaacactggcatgagagccatgaatccctggccaaattcctagctgtatcctttctgtcgtgtgactctgggcaagtcccttaaccgctttggattttactttctttcctcaggcgttaaaatgggctattctttctttataaagttgtgaagattagaacactgtactttacaattcctaggatgaatttctgacatatgtcaggtattctttgaaaggtagctgctgctgttgtcatggtggttatataaaaacaatgcaaaagaaatataatatattattatcgtgtggaccccaaagtggggtttgtatgtcagcctgtgggagcagaaacctggtaaaggcaggcagaaggtccacttgactccttctgactgattggacctcttctcatttgagatctttttgaggcaccacaatcaaggaccagtgaactgcctccttctgaggtattacaaaaataattaattgtccagctgtttctagaaggcaattttaaaattaaaattttttctatttttttgcaattatcaacctaacacattgaagaaacttgggaaatatagaaaaaacacaccaaaaagtatcagagttacactaaaatgttcatagtcagtaatatagtctttcagatttttttttctgtgtctgtctgctgtctatgtccatgcctaccttactttcttccctctctcttccctccccaccctcccttccttccttccctccttcccaccttccctgcttccttcttgcctgcctcccttcctgcctgcctcccttcctgccacttacattctgttaacaatgagaaaaaaattcccccatcattaaatattgttgattggcatgagaatggccaagagcacagactcaggagcctttgaattcatgacatgccttttgttagctgtgtcaccttaggcaaattatataacatgtctgtgcttcaacatctgtcccaacatttctttttctcatctgtaaaatgggaataatagtagttaatatttacctcatagagtttttctggggaattaaaacatgtgattaaaatacatgtgggcttaatacatgtgaaatgctcacaataatgtttatcacattgtaaacctacaattagtagctgcctttgttgttggtatcatcattattgttatattattccataataatattattggcaacatagtattccataatatggatataccataatttatttaaatgatactttttggttggtatttagattgttttcatgctttcccccattttggaagcaatatagcagtaaatatttttaaaggtagattttttttggctaatctgtgattattttttaagaataaactcctaggggcagcattgcttggccaaaggccatgaacatattttaagtatctatagcatattgccaaatttagaatgatcatttcaatttacatttctgtcagtggtataagagagtgttcatttctttgcccctttgcctactttggatattatcattaacacttgtatatatctttgccacttgcatgggtgaaaagtgtaattttaactgctgttttagtttaattttttcctctgatatttttatgagccaaccctaaagaaaataaaaatgaacagaaatacttcaccaagtttctgcaaggaaatgttatagcagtgtattagtctgctctcatgctgctaataaagacatacccaagactgggtaatttgtaaaggaaagaggtttcattgactcagagttcagcatggctggggaggccccaggaaacttacaatcatggcagaaggggaagcaaacacatccttcatgaggcagcaggagagagaagcaccgagcaaaagggagaaaagcccctcataaaaccatcagatctcatgagaactcactcactatcataagaacagcatggggggaaccaccctgtgattcagttacctcccatctcccacagcaaggggattatgggaactacatttcaagatgagatttgggtgaggacacagccaaacaatatcaagcaataactgtgttgccctgtatacttgctaggtttgtgtattcacatgcatagcacaggcatatattgtagtaacttagccttgtgagccctttgctattacttgaagttcagaaggctgagctatggtgattaatttaactgcaggtaaacatgatcttgttaagagacactgcagtgtgctctgaataaaatcagtagtgattcatttgtccagttaccttttctctcttgcaagtacatattagaattgccaagcacctgttccattcagccctcagaacctatagatctttgttcttttgattaggctcctaagcctctacactgtatcacatttaggggagtgcttctctgaaaatgcagtgttgcttggattattccagtgattgttttaggacagtttcagggctgaccctgggatacattattaggtaggcaatgtttttgacacaagccttctatgatcctcatctgcaaccttctatttcaaaggactccaggctctgaaattaaatatttttaatgtatgttcatttattcacaggccttggtttcctttttcctcttatttctctcttctcccttatcccttctgcaatgtctgcacctttgttgttttacttgattctcatgggtaagatgttaggaaatgattgtagtacccctctcttcctaaaagcttagctaaatgcatgccactaccatccccaaggcattgagaatcacactcttcagatgtgggaatgcgcctggatagttccagtggatatccaacattatcaatgttttgaatcactttagtcaatgtgtttaatttatgcttgaatttcagatcttgttaaaagagggaatgccgagaccagctcggtcgtggagaccctaacccagtggccctagaggaattaaagacacacacacacacacacacaaatatagaatgtggagtgggaaatcaggggtcttacagccttcagagctgagagctttgaacagagatttacccacatatttattgacagcaagccagtcataagatttactaaaagtattccttatgggaaataaaggggtgggtgaaataaagggaagagctctggctagttatctgcagcatgaacatgtctttaaggcacagatcgctcatgctattgtttgtggtttaagaatgccttaagcggttttccgccctgggtgggccaggtgttccttgccctcattcctgtaaacggacaaccttccagcatgggcatcaaggccatcacgagcatgtcacagtgctgcagagattttgtttatggccagttttggggcctgttcccaacgagggcacaagctttttttgttattgaaatggctcttgggtttacaaaggtaaaaatccaatttaaaaccgtggctttaaataataatattttgaagttatggaaatacttttacttttcaatatagagtttcccccaatcaaattttgaggactaacatggcattgctacggtacaaggagatatcctgtatttgatctaaactaattcttataatttatttgaaaatatgctatattctttcactactaatccttttgcctcagataaaatacccaggagctgatatggatatcactttatctgctccatcattttgccgtcaaattagtccagaggaatttgaatatcaaagatcatatggctctcaggaacctctggcagccttgttggaggaagtcataacagatgccaaactctccaacaaagagaaaaagaagaaactgaagcaggtaaaaggatattctttataagccattttttctcctccctactgtttttatgtttttttttttattttaataggcttcatgtaaatctcatcttctgagccatagcagttttctaagtatattagttcatacattctagaagtctcactgatttacacacttgtggtcagtatcctagatctttattcttcagtgtaaatctgttaccattgccaaactcttcatttttggagctattctctaatatttgtcctttgttttggtatgtggcatgatgtgaattagcagagcatctgctttaatctcagagaagctatcagtgagggtggatttcttttcatgttttcaaaaggcaaatcagatggaattcacaggtgtaaaatgtttagagtttaaaagccgttggttttagatagccactatcaaattagtttcttgcctcaggtatcagtacaagtttttagttcctcttatgttagggaacacagcttagggttccagcgaatcgtttttaactcacaatatgttacttttgactattcataaaggttgatccatgatcaggtgagtggtttttgtttttaaagactgaactctacatagttggattcagggaacaccgtacatgtgggattacacacagagcaccagagttctgggcttctgatcatattattctcagagtaattttggaggagagtttagtggtaaagatcaacagaaagtatactgcctctcttttaagcttttcacaaagtaatatacaccagaatattccctcttccatttgagcagaagctggtggggctgagttggagaaacagagaaatgatgaaatgtaattgggccaaaattttatttaactgtgtagaacagaagttattttgaagtcagagttacttgtgaatatataaaaagtgaggtctatttatagttggcagtggggggaattttcagaaacatgattaaaaggggaacttatttgaagcttagatcaaaggaaagatggattagctctatagaaattggaatgaaatgttttaacaaaaataaacaaaaacaggaaaatacaggctcagaaactcttaaaatttggctgccaaattttattggcttttatgtgtctttttttactcttcttggaccattcatttttttagtttcagaaatcctatcctgaagtctatcaagaacgatttcctacaccagaaagtgcagcacttctgtttcctgaaaaacccaaaccgaaaccacagctgctaatgtgggcactaaagaagcctttccaaccatttcaaagaactagaagttttcgaatgtaataatacttccacagcaacaggtgctagagaccactgttgttgttttgagtgaatggtggttaggagaaagactttggtggtggaagaaagaaaagcataaaacaaagactactgaaatatagataaagattgccttagtttttaaaaatgtttggccattagtatttttataaaactcaatgctagttttaaagtgtataaattggttaaaatttatgagtcaaatatatagtgataatgttaacatgtttgtaattgctacagaatttaagggtatttttatctctgtgctttctttttcatggtgtttattaaataattgtgtatatacatcctagctactgatatctttattatagccttaagacttaattttaagtcttaaaaatagcgtgtatacttgaataagaaagacactgggtactgttactgtgatgctattgacttagtagccaattatcatttctcctgtataaattccagtttttattgctgcacataaattttttaatgtcttatattgtgatagctatgtcttttattgcagatttattggatgttatgacagattttactaaagctagtgtttttataacatatatattagttgatgtttacctataagtggagtagattttcatctgcctgcaatggtataatttcagtcttagctaaaaatggaaagttgaactggataaattctttgggtacccttagacctctgattctaagtcaaatgcaaatgggttaaataaaatgagactacttcctttataaatatattttcatccttttgaaagtaagtgaaatgtaaataaacttattttttttaaaaatgcca

SEQ ID NO: 64 - DNA, 61383 bp, Homo sapiens
gagaccagaagcgggcgaattgggcaccggtggcggctgcgggcagtttgaattagactctgggctccagcccgccgaagccgcgccagaactgtactctccgagaggtcgttttcccgtccccgagagcaaggtgagcgtcctgactgggtccggatcctggccctggcggcgggcggtaggcggcgggcggcgtgggggtgccgctggctttttgccggcgggtactgggcggggaggcctctgggatcactctcccggccctgtaggtgccggggaccgccccctcccacccgaccgaactggagaatccgccccgggatgtggttcgtaggggtgtctgcgcccttctgctcgggttcaaactggtctcggattagtgtcccagaccctactcggtcacggactcacactttaggggatcattttcttcctccgtaaaagaattggagatgactaggtatttccaagccgccttcccagtcccgtaaccaaccttattgaaattcaggccctggtcctttgttttattgagtagatgtaagcttgagttttgatctggttggcgacgtggggtgcctatggttagttacgcgagcatttctctttcccctctcttcttcctcccgtccacatttttttttttctttttttaaatagagataggcctccctatattgcctaggctggtctggaacccctgggctcaagggatcctcccgccttggcctctgtaagtgccaggattacaagcatgagccactacgcccggtcctcccttccacatttatttgaacgcgcctgtgtgcccggctcggctgtgtaatgaggacccagaaataaaaggcatgggtcgtgtccttgagcctgacctagaggagaaggcagggttatcattctcagacccagccttggtacagtgcacggggactctggctttttggaggaggtggggaattctgacaacgggaaagcagtggtggaggtggggcaggaggaggtcacacaagagcttccttggggactaagggactgggtagttcgggcatgaagagtgccctccacgtatttaagagataaagatacagcattttctggaaaggacaatagtcctgcaagtcctccatgcaggaaccttcatccagggcttttcttcactccccacctcgattccctgttcctcaaaagtaaacttctgggtttatttttttgttcttttgccccaatggcccaatacaggtggctgatagctgatcccttaatgggccaaaatctgctctaatcacagttagcttggtctacatctatattgttctctatcttagactttggaatggaaaagcattcagcttgccagtcttctttatgtttattcccctcattttctaatcatctttctaaattgctcctttttatattctgttggctatagcatcttgatgtaatgatttcagttgctggctgaattgtttagggcaattacagttgtgtgtctctgggtacagttctttgactcctgacaaactagattggaatggaggatattgagacagggtcagttgtcctttgttggttgagaggcatgtgactcctttcagtagttttgggataaatgggagtggaatacaagatgctgtgttccaagaactgagagctagaaaaaaaaacaaaactggtagcaaaacacagctttccagggctttgatatccaacttatatgttgtctaagacctttgcttctccctcttaattttttttattgttcttagtactttcatgaactgcttattgttttgataaaaagtttcattgataaaatcgattgaaaaaaaccattaaaatggccgttaactttatttagtaaaaaaacaaattctcaaactcttgcctaagtaactggaaaatgaatgatttttctttttgtttatgttctgaaggctaaaataaaggaaagttgctatattttcttccagctgatttctatttcctaagatgtggctgagaaggaggtaggccacttcaccctttgtaccataggctgaaatatacaagtgaaaaagtgtttttaaaaagtatgtaatagctaacatatatggaaagcttaccaggaaagcttactgtttctaaggccttaggaagtcaccatcattattatcctcattttacaaacaagggaaacaaggcatagagcagctaaataacttgcccaaggtcatacatccgtaagtgcctgagctagaagaatccgctttgtttttttttttttttaaattttaaatctttaatttctgttttcacgtattttcttcttgcttccaaaaggaaaggagtgcgtagctctgttgcctgtacatcgtccacagcccctgggttggagcggggtcccctgggccgcccgggggtccacatgcagcccctggggggccggcgcggggtgaggtccgggggctgccttattgctgaggtctggccggttggtgccgccgctaggcgagctggctggcagctcctgggagatgaagcgacgcaggccctccaggtactggctgtagagctcgatgtcgttgtgcctggtgccctccacccacagcggctccaccgccttggggcagcgctcgtagagcgccagcccgtgcgagaagtcgatcacctcgtcctccgtgccgtggatgatgagcacgggcgacgtgatcttggacaccttctcgatgttagggaaggcgtcgaagcagtaggtcttcttggtgtcggggaaggcgacgcgcatgcccgaggtgagcggcgaatgcagcaccaccgcggcacactcgtagcgcgaggccaggtccacggtgggcaccgtgccgatgctctgcccgtacaggatgatgctgtccgggctgatgccgtacctggaggcgccggagcagggtcagccgcggcctccgacgcgcgcgcacccttcccgccagcgggcgtccccgggcccagctccggatgcgaccctccagtctccccactcagccaagtcagtgggtcaggcccaggctccacaccagtcccgagggccacccccagccctcaacaccgcggcggtgggcgaagccagcggccccaccccgttccctggcgctgccgttccctggcgtttcctagctaggatctgtagggatcccgcctacggagtggccctggggcggaggtaggggaggccctggcgcctctcctcctgatcacccctaggtgcacactgggaactgtgtgccccccacatcctgaatgcttcacgccttcctgcccgggttagaaagccgttcctggtgcactggccaggacagcggacactcttcctccctgcagcccttgcccacccccttggccatgaggaattcaggcagctgtgtccccaaatgtctccacccaattttggactctcggagtccccacgcccaatgagatgccagtgcaacccaggtcagcatcgagggtcgtggctgcggaggtggcaccccctcccaccagcaccttcccttgggagtggacaagtcctcggccacctcagcatcaccagctcccacccagggccacccccacccccaggtcactggtgtgcagcccgtgacccagctgatccagcaccagttacaaggcctcctcgtgcccagtcccaaccacgcgggacccacctgccaccctgcccatgccgggaccccacaactctcctcccacacgctccaggctctgatcccaggcagatgccctcttgcaaggcaggagcatgggcaggtgtgcgtcccctctgcctggcattcggactccaccagcagggctgtccccctccctggcctggaatcccagcctcctggcagcactccacagctcgccactcacccatgccccaaaggatgctgcctggcttgtgcctgtggccccagctctgccttagcctccctggcctgctccctggcagccatggtcagtagtgtgctgagccagcccagccctgtcacctgctaccaggcaggagcccccagctgccacctggatgtcaccactcaaacgaacaggacacatccccagtggaggccctgggcatgctctggcctccccctcacagctctgggcctaggttcctgcaggacaaagtggcagcaggacagatggccgagcagacagagctcagagctggccatggcgggtgtgactctgccagtggcccaggcagtagagacaggaggggccgaggaagtcgcatgaagtggttggtgtcagcgccccacactgctgggaggcccctggagccagggtggtgccaggggaccagctcccaggcccacagcagggactgcctgcaatatcaccaaggcaacgaggaccccacctccccagggcctctgacttctcagagctatgcctggtccctgcgggagcaggtcagaccagtgggctgggcagggccaggacgagacagccccagtggatggcgagcaggaaaggtcaccagaggcccacccgggtctcctcatccaaagcagcactggcccgggcggtgctcaaacaccagtgaaggccccaggcaagcgcagggctggggacctggatgactaggagggctggatctggaatggaggctggcccagaccttggatgtgtgctgggggtctgcacctgaccctgcaggccctgccccaggatggccaagctccgcagccacagggcctcatgggccaggcctcgggacctggatgcagcagcctcgcctcacttggccccaagtgctgcctcggccgatggggccccagccacacgtgcacagacccccagacaccacccactccctcccgccgggtggcatccacgcccctgtgacaagctcagccccttcccgtcctcaggccaggggttcccagggagcctggctccacaggccagggtgtggaaggaccgcctggccacacctcagccatgtggaggctgcacctgcacacccaagctcgcctgtccggctctctggccctgtgcatccactgtggctcccctcctgcagagccgcccaccttcctcccagggaagcccgccccccggcccccggcctggtcccctcttgggtgtgcccaggctgagctgcccccagggttgccctcacctggtgcgcagggcctgccaggcggcgtcgatgtcggcatagaggttcctctcggaaggcctacccgagctggcaccgtagccggagtagtcgtaggagaagatgttgcaatggaggcgggagcccaggccaatgtagaagctgctcatctggcccaggtccacggcattgctgtgcgagaagaggaccgtgtacctggcaccagtcacgcagcgaacatacatgcaggagacgcggttgcggcgggcgctcttggtggggaagacctcaatggtgtccagctcgcgctggctgtactggaagtcggcgcgctccgtcaggtgcagcttccagcgcccgggtgcgcccgaggaggcccgcagggtccccaagggggcggccccggccccaccaggccccggctcgggctcagtcaccaaggaataggtggcctccggcggcaggaaggcgagcttggcagcgatgcggccggggcagggcgggcagcagaagaggcagcagagctcactcagcgacagcccgttcatggcgggcgccgcccgggccaggcccccaccggggccccagccaacaacgccgcccggcctggcccggcaggggaggggtgggggtgctccgagtcgcgggcaggggggagggcgcccccccagctacggccccagacggcagccccgttaggaggccagggcccagccccatcgcggtccaagccgagccccagggagcctcgcaaccacaggtctccatgtcacgccgtgggaagcccaccccggcccgcgcccctgggccccagggccgcactccatggcgcctggccgcctgcccgtgcgtccgtcggtccctccgcgccccggccggcctcctgcatcgccaccgccgcagctccccccgaagaatccgctttgaatctctaaggttgtactgtatatgtctttcctggtcagtgtctgtctggagcatgactttaccaccttttgcagtgattctagtactaatacggcattcactcttcattcatgcatgcattcattattaaaaaatgataactgcttggaaggagatgggctacctgtgctgtgagtaactatgatgggaaactatggccgggtcagggatctcagaaaagtttcccagaggaagagggacaaagtgtgagtggtaattaaccatgtgaagagggaaagaggagcatatgcagaatatcttgtcatgcattttctttgtttataggacctatttcacctgaaaaccttatggcaaaatattatttttttcttagcttttatttttggttcaggggtacacatgcaggtttgttttacaggtagactcatgtcatgggggattgttgtacagattattttgttgcccaggtactaagcctaatactcaatagttattttttcttctgctcttcctcctccaactctccaccctcaaggaggcctcagtgtctgttgttcccttctttgtgttcatttggttttctgttcttgcattagtttgctaaggataatggcctctaattccatccatgttcctgcaaaaaaccatgatctcattcttttttatggctgcatagtattccatggtatatgtgtactacattttgtttatccaatctgtcactgatgggcatttagattgattgcatgtctttgctattgtgaacagtgctgcaatgaacatttgtgtgtgcatgtgccttttttttttttttttttggtagataagggattttgccatgttgcccaggctggtctcgaactcctgagctcaagttatccacctgccttggcctcccaaagtgttgggattacaggcatgagccactgtgcctggccatgcatgtgtctttatggctgaatgatttatattcctctgggtatatacccaggaatgagattgctgggttgaatggtagttctgtttttagctctttgaggaattgccatactgctttccacaatggttgaactaatttgcactcccaccaaaagtgtataagtgttcccttctcaacttggccagcatctgttattttttaactttttaatcatagccattctgactggtgtgagatggtatttcattgtggttttaatttgcatttctctaatgatagtgatattgagctttttttcatatgcttgttagccacatgtattttttttttttttttagaaaagtgttcatgtcctttgcctactttttaatggggttgttgtttttctcttgtaaatttaagttccttatagatgctggatattagacctttatcagatgcatagtttgtaaatattttctcccattctttaggttgtctttttactctgttgagtttcttttgctgtgcagaagctcttcagtttaattagatctcatttgtcaatttttgcttttgttgtgattgctcttagtgtctttgtcatgaaatatttgcccattcctgtgtccgggatggtattgcctaggttgtcttctgtggtttttatagtttggggttttacatttaagtctttaatccatcttgaattaatttttgtatatggtgtaaggagggggtccagtttcattcttctgcatatggctagccagctatctcatcatttattgaatagggaatcctttccccattgtttgtttttgtcagctttgtcaaagatcagatggttgtaggtgtgcggcttatttctgggctctctattatgttccattggtctatgtgtctgattttgtactagtaccatgctgttttggttactgtagccctgtagtatagtttgaagtagggtaacatgttgctgtcagctttgttctttttgcttaggcttgtcttggctatttgggcttatttttggttccatatcaattttaaaatagttttttctagttctgtgaacaatgtctttggtagtttgataggaatagcattgaatatgcaaattgctttgggcagtatggccatttcaatgatactgattcttcatattcatgagcatgggatgtttttccatttgtgtcactctgatttctttgagcagtgttttctaattctttttttttttgagatggagtttcgctctttgttgcccaggatggagtgcagtggtgcgatctcagctcactgcaacctctgcctcccaagttcaagtgattctcctgtctcagcctcctgagtagctgggattacaggcgtctgccaccacacccagctaatctttgtatttttagtagagatggggtttcaccatgttggccaggctggtcttgaactcctgacctcaggtgatctgcccgcctcagcctcccaaagtgctgggattacaggcgtgagccactgagcccagccttctaattcttattgtacagatctttcacctccctggttagctgtatttctaggtgatttattcatattgtggcaatcgtgaatgagattgcatttttgatttggatcttggcttggctgttgtcagtgtataggaatgctagtgatttttgtatattgattttcgtatcctgagagttggctgaagttgtttatcaactgaaggagcttttgggccaagactatggggttttctagatgtaggatcatgttgtctgcaaacaggggtagtttgacttcctctcttcctatttggatgccttttatttcttcctcttgcctggttgctctggccaggacttccaatagtatgttgaataggagtagtggaagagggcctccttgccagttttcaaggggggaatgctttcagcttttgcccattcagtatgatgttggctgtgggtttgtcatagatggctcttattattttgaggtatgttccttcaatacctaatttattgagagtttttaacgtgaagggatgttgaatttttaatgaaagcttttctgcatgagataatcatgtcatttttgtctttagttatgcttatgtgatgaatcatatttattgatttgcgtatgttgaaccaaccgtaaatcctggcgatgaagcctacttgattatggtggattagctttttgatgtgttgctggacttggtttgcaagtatatttttgaggaattttgcatcgttgatcaaggatattggcttgaagttttctttttttgttgggtctctgccaggttttggtatcaggatgatgctggcctcatagaatgagttgaggaggcgtccctcctccttaatttttttggaaaccaggggtacagacaaagtaccctgtacacccaacagtaatcccacaggagaaggcagaggccccaggccatttaatcagcagcaaggtgattatgtgatatgtcttttcacagttgagttagatgtactccaccagttatgatgggaatcaatttaaatatactttcttgatcccagaaattcaagtatgtggacaggatgttacacatggcaggatgattgttacagcgcaactaacatatttcaaatggacaaaaaattagtataatttacagtatcttaagataaatttcctttgaatgggagcttcctttctagtcctttgaggtctacaaggcatatctagaaaatttactactgtggaagatgaagactgtttaaattgaatggggggcaggaaggggaagggcctatggtttttctttttgattaactgctgtaaccctgtccttcaggcagctgaaggagtgtcacattttctttagacatcattaggcaccaaagctcttgtaggacaactttgatgctacatgaattctgccattttgctagcactgatatggctttttggtccaccactccattacaactattaaccctatttatattaatttttgttacaaatcttacaaaggcagggtgcttctgggcatttaggatacattctattttaaggctgtatacttgattttcgtaaatcattcttggaggcccaattatcatccctgtccatcttgtcccaggtcttcatcatcttctaaacaccagctaactatgccacctcctacctttttctggccttcttcgagttcttccatcagttggaaacttcgagagacttttactcctgatcctgtggtgactgccatcttgcatcactgttgccccatgttttgtataatgaaaaaactgagcaatagaaagcaggtagtgatataagaagtcaacaccgagaaataagaaaaacagaaagcaaagggaaactaagcaggacagtatgtacttcagaatcaattattggttgccacctttcagaggatggagaagataggtattatactttgttatcttttgaaatgtggtcttgaaacttgatttttaggggtggttagatagattcattaatttctgagactttgtttccttttactgtggtaagaccaacagtctggttattcttttcagtttatttacaaatgttggagtaataaagaaggcagaacaaaatgagctgggctttggaagaatggaaagaagggctgcctacaagagctcttcagaaaattcaagagcttgaaggacagcttgacaaactgaagaaggaaaagcagcaaaggcagtttcagcttgacagtctcgaggctgcgctgcagaagcaaaaacagaaggtacccctgaagctctggtatttgtagctgttcactcattattgacagagaagtgctggtatttaaaactgttcactcatttttggattaattatttcatcttctttacatttagagaaaaatgattttgctgtcttcaggtggtaattcctctcccctcccccacccccaccccaggccccaatccccttctttttttttttttgagtcatttttattttaattgcttttaattttccccatttctgtcctcatttctgcttacctgctaatatttagggctattgagttccatttcaacttccatgtgggaccatgaattggagattgcttttgcactgcatagcaacaaggcaaaaggtgtctgctcctaatctggggacagtattagagcattttgcagttaaatggttgtggctttcttagactgggctttttaccttggtattcctcaaccttttcaggtctagaaaatgaaaactaaacagtactttttaaaaattacctctctattagccaactaaatagtgatacagtcattgcttctaaaaggattttgcttgtgggagaattttctggtttctaacaataactggttttagcagccaaacttgaaaatgaattgttaagggagatttataggatttatttcctattttttaatttttgaaaggatagtaaagactccctttctaggatgggtgtgtctggccaaagatgatatactacatggcttcaaagaagtttcctatctattggcttcaaagtgtgatcatctaaaatttctgtgttcatatggcttattgcagctgtatctcaggaatttagtagtcaatgttagactcaggtttaccaataatacttggtaaattcacaaaataagggagttattgtcttctgaacaattctcattaggttgaaaatgaaaaaaccgagggtacaaacctgaaaagggagaatcaaagattgatggaaatatgtgaaagtctggagaaaactaagcagaagatttctcatgaacttcaagtcaaggagtcacaagtgaatttccaggaaggacaactgaattcaggcaaaaaacaaatagaaaaactggaacaggaacttaaaaggtaatattttgggatggtatttatagggatgatatttgtatgtattaatcagatgcgtttgtcttttcctttaacaatataattattatactttgcaattttttttcctggtagaataagtaatgattcggtctctgtaccgtaacttgaaagagtggaagattaaaaacaaacaaacagtgatttggttttatcattgcatagctcagtacgatataaatttatcaaatgtttgctgcattactcatgtattcattcagtatatgtttattaagctgtaccatgattcagacactattggtcactgagtaatacaataataaatagtactatcatactatcaaattgatagtatgataatactagttacatagcattatttgatagtatgatagtacttgttaaaataaaactatcgacagctgttaccgaaaagatggaaattagttgaagcatactgatggctcgtgttttctctgggtggaaaagctgctgtagagaatgagagggagaactagggaattataaaaggacggaatagcatggagggcccagttgagattggagacagaatataagcaggcccaatctgcaaggttgtgtgataatttaaaaaatgtttccttttggctgggctaggtggctcatgcctgtaatcccagcactttaggaggccgaggcaagtggattacctgaggtcaggagtttgagaccagcatggccaacatggtgaaaccccctctctactaaaaatacaaaaattagcgaggtgtagtggcgggcacctctaatctcagctactcaggaggctgaggcaggagaatcgcttgaacctgggaggtggaagttgcagtgagccgagttcgtgccatatccttatagcacatttggttttaaaatattcttcttatctagtagactacaaaaactactgaatatggttttaaaatttacactgctaacttccaaatgcattgcagaaacttattttttccatcagttgtcactgattaggtttctggaaggtctccaacaagtgaggttgaaccgtttggaatgtttgttaaaactgtggagattggcaatctcatatagttcaacctagtagaagatgcttttagctttgtagtgcttttttgatgatggtgtttgtgtttttcttcttagggggaagaagaaaaaatggtttatgaaaataatagcagggtatacttttgtttaagtaataaataactttgtttaaaatgaaaggatagggaaaagagaataagatacgaatttaaagtggaaaagaaacactggttttgcaagattcttcaaaattcacctcgaatcagcagatttgtgacatctttgctaatctgtagacctgcaacgtccaatatggtagtcactggctacaagtggcaattatgatgtacttcaaatgtggctggtgcaaattgagatgagctgtagtgtatgatggatgccaaattctgaaaatttagtatgaaaaaatgtaaaatattttattagtaactttcctattaattacaagttgaaatgagagtatcttgaaaatagcaagttaaattaaatattaattttacttatttctcggtgctttttaaatactagtggaacatttccattggaccttgctgtttcctactgtaagctcagatgtggtggtttgatttgctgagaagtcatttttagctcatacattgcctcttctcagattaaatttggagctaaatggagctaagggctttctttctttctttgtttctttctttccttccttccttctttccttccttcctctttctttctttctttctttctttctttctttctttctttctttctttctttctttctttctttctttctttctttctttctttcttctttctttccaccctccctccctcccttccttccttccctccttccctccctccctccctccctctctctctttctctctttctttctttctttctctttctctttctttctttcttctttttctttttctttttttctttttgacaaagtcttgctctgttgcccaggctggagtgcagtgctgtggcacagtttcagctcactgcaacctccgcctcctgggttcaagtgattctcctgccttagcctcccagctggggctacaggtgcacaccaccatgcctggctaatttttgtatttttagtagagagaggttttcgccaagttggccaggctgatctcgaactcctgacctcaggttatctgcccgccttggtctcccaaagtgctgggattacaggcatgagccactgggcccggcattactttctttacttcctgttttaagtaatatgtcacggcaaagagactggtgcacaccattagccattctaaaagagctttcattttattttttatgttaaactgaagtcagagacataagagagttggaagaattgagccctcttttaatgtgggttttttggttttgaaaggtgttcagagcttacttgcatgatagttctgaatacctttatacagggtgtacatatatacaatatgtaacttatgtttcccatttcttgtaactatttccagccatatcttttctagatgcattatattgatttaatttttatatctgtgttttaaaaatgtcatataatatatgatctgtatatcaagtctatgtttttgaaataactgactaacctaagtaatgtcatctattctcacgatttgagcccatgcttcaatgacaccactttcttcccatgtttctgaagttctaggttcttttatgtctctgtctttggcttagaatatgaaatttgcttggaatatattccaatcctccaactcttctttgctgtctgtattagtctgttctcaaactgctataaagaactgcctgagcctgggtaaattacaaaggaaagaggtttaattgactcacagttccacagggcttttcttttccgctgggaaacttacaatcatagcggaaggggaagcaaacacacccttcttcgcatggtggcaggaaggagaagaatgagaaccaagcataggaggaagccccttataaaaccatcagatcttgtgagaacgcactatcacgagaatagcatgggaaaactgcccccatgattcaatcacctctcaccgggtccccaccaccccaccacacatggggattatgggaactacaattcaagatgagatttgggtgggaacacagccaaaccatatcactgtcatagtggttattatagatcttccttatagcctttataacattgtacttactggtttatgtttctgtttcttttactagactgagttcctttgaagacacaggactgggtttatgtctggcacataagttagaccttatgaaatgcctgttggataaatgaaatggttaagaattcttagtggatgggtttctttgtaagtttattactctctgggaatgtaaggcattgatattctgtagcctttgctctaactgatttgtctgcctcttgggtccttttctaacaggtgtaaatctgagcttgaaagaagccaacaagctgcgcagtctgcagatgtctctctgaatccatgcaatacaccacaaaaaatttttacaactccactaacaccaagtcaatattatagtggtaatgcattttcttccttggtatagacagctttttgtttagcttgagattttaattctgcaaaataaatgaattaattcaactttgaattaaacttttaatgtatatgtttaaaaactgcagccacttgttacatatccatttgcatatctgttgaattatgttgagctactggattgagcttttaagctttttactttatccttctgtggcatattttcaaagaaattcaatttcagaatatttaaaacacttatgtttttatgtgttttgatatttgagtaatttgatcaatagtttgatctatttccctaaccaaaatgttgtttctactaagatactcatttctagactatcaaaatcgttgttgatctgtgaattccttcatggaatcaatgactgaaagaaaactgtatttgattgtctgtttctaggttccaagtatgaagatctaaaagaaaaatataataaagaggttgaagaacgaaaaagattagaggcagaggttaaagccttgcaggctaaagtaagttaattatgggccctataatagagtatgcagttatagaatactttgatatagaatagaacaaggttagagaaaaatctgttttacatagagctggcctttttgtgtgtgtgtgtgctgagaaaaggttttgggctcagtggaggtgattattttttagttttaaaaatagggtggaatgaataaaatagagtggggaggttagtttatccctaaatattaaatgttcatataatgtacacttaattatttccctattaagacctagcgatcagggctattcttggagacagtggggccagagaattagtcgtgatgctccctgcctggctttatcacctggaggcagttgcttcctatatagtccttttgatctattgaattttacctctaccatttttgttcacgtgttatttgctgaaaacagtttccagtttggcacttactggtggctttccactaaacataaggacttgatgagatggcacaattcagcaagccatttaaggctgaatttataagtaggtaccttaaatgctgagaatgcagaagtacctctggcttagagctttaacaatttttattcttttcatgactttaaccctcattttgatgtcattaggattctgatatgtagcaaaggcattgcttatcaagatgaataaaaattaagtactcattctctagtttgtcctagaaatatcatgtgctttgtcatccagttcagtcatttgtatcaattcttctcttgacattgattcctagagatgttttatggaaaatttgagtctctagtaaacattaaccctcttcctatggcaaaaaaaagtgcttgctgtaaaaatctaatgctgcattcacctccatgtcttgatatttgtcagaatggaggcagagagaagcatagaaagaacaatgcaaagcggtagatcatccacaaatgtatattatatactattaaacactcgatgtgactttttttgggatagtgatatggtggaatgtgagatttttgaaagagttctttagtgtgatgtttaactttgattctcttgggcaaagctatagggggaggtaaccaaggacaggcaaagaaaagccagttttggaattcagaatgaaagtgaatactcacatatgtttaatgggttctaagaaggatgcagaataaatactaagacttagcctattttgaatagattgggcatgagatggtagtagcttattccttcaatgctaagaagtcgagcattagaacattccatcactgggtattagacttatggtttacttgacttgatgaatgttctttgttggtatgcagtgcaactgttaacttcttgggattatggctttatattctatctgaaaataaatagccttgagtatataagatctttaaaggcctctaaagagattctgtttctacagaaagcaagccagactcttccacaagccaccatgaatcaccgcgacattgcccggcatcaggcttcatcatctgtgttctcatggcagcaagagaagaccccaagtcatctttcatctaattctcaaagaactccaattaggagagatttctctgcatcttacttttctggggaacaagaggtgactccaagtcgatcaactttgcaaatagggaaaagagatgctaatagcagtttctttgacaattctagcagtcctcatcttttggatcaattaaaagcgcagaatcaaggtaacattgagctaagttaagtttaaattcactttgcttgaggtaatttcacaggtgatttcagatatttttaatcccataaagtgcttatgtgttttgttaggcacatcggtgttcaacatcctagactggttatgtgaaatatactgtcttttcaataatgataaaaggcatcatagtgttggaatgtagttttatttgtattgaaaagctggtgcctggaagcctctaaagtacgttgagaggctttgatttatctttccagatgcagggcgagtgggttggttacagtttacactccccatgcttctcatctggctccttttgtgacccacagaaccaggctgtggtctgaccagctttggccagaggttgtgtgtgtgtctgcagaacagctttgctgtgccctgccaggttgtccatatgggagcaaacctgtaaccttggctgctgtgccacgctgcagctgacagccaagggtaccaggtggtgttttggaatctactctgtagaagatgataatttccagtgctgtgatatattgaaaatcactgtcagtgttcactggtgagagctgtcacctagccaatgccattggaaccaatgttgtgcgtatgtgggaaaaaagtggaaaaaaaatcattgttaattttggcagtatgggaggttcacactgtcttgatgtttactggaggtaaaactaccagagaatataggagggtgaacttttcactgcttagcactgatttgcattgatatgggcaaaaaacaaatatagtttgctgttgtgtaaaactaaatggtaattttaacaaagggtgtcatatgtgatgtacttttcacagtctcaataagaagatagcgttcctgattttagaaaagcattccccccaccaagtttctttgttaaaatgtaagaaaatctgtttctcctgctttctatagagtatttgaatgcaaatgacaatagaaactaactattgaaattaaatccaattaaagtagcttctgtatttagtgtaaatatttgtttcgtcaaagatttcagaaaagaataaaacaaatgataagttatgaacattttgggaaagatatatatgaattggagtgtgatttttgtttgtggttcaagagctaagaaacaagattaatgagttggaactacgcctgcaaggacatgaaaaagaaatgaaaggccaagtgaataagtttcaagaactccaactccaactggagaaagcaaaagtggaattaattgaaaaagagaaagttttgaacaaatgtagggatgaactagtgagaacaacagcacaatacgaccaggcgtcaaccaaggtacttgacttttcgtgaattactggagaaatcttcatcttttcatacaattatttagaaagagtattttatacataagtttatgaaatgtcagtaatgttctttgttaatatatattaggtactcttgatgcaactgaactagaaagctgttttaagttgggcagatccgggatcaagcctggtgccgtactttcccagctgagtgacgttgggcaagtcactgatctcttttatgttgcagggggtaatagagaataaagaaaatgtatatatagcatctagcatgatgtgtgccacattaaaataggcacttaatggcactttaaaggagttttaggacatttgataggatttaattaatctgctcttgggatcgtatatatagttggtccattgtacccatgagttctgcattcatggattcaaccaactatggatcgtaagtatttagggggaaaaaagatcgtatatatagttggtccattgtacccatgagttctgcattcatggattcaaccaactatggatcgtaagtatttagggggaaaaaagatcgtatatatagttggtccattgtacccatgagttctgcattcatggattcaaccaactatggatcgtaagtatttagggggaaaaagaaaaaggccgggcacctgtggtttacacccgaatccccacactttgggaggttgagacacgcggatcacttgaggctaggagatcaagaccagctagcccacatgacaaaaccttgtctctactacaggtacaaaaattagccaggtgtggtggtgcacacctgtaatcccagctactcgggagtctgaggcacaagaattgtttaaacctggaaggcaaaggttgcagtgagcagagattgtgccactgcactccagcttgggtgacagggtgagattctgtctcaaagaatggctttgtctgtactgatcatatacagacctttttttccttgtcattatttcctaaacaaatacattattacaaatattttacatagcatatacatagtattaggtattataagtaatctagagatgatttaaagtgtgtgggaggatgtgcataggttatgtgcaaacactataccattttatatcagggacttgatcatcctcagattttggtatctgcaaggagtcctggaaccagtccttcatggatactgagggatgactgtacacccaccactgaatcttcttaagactccaacggaggccaagcttcttagcctgttattttgttgttgttgttgttgttcttgttgttgctttggtcccagcctacctctctagccaggcttttcttctcttttttctattactcattcatttactgactcatttcacaagcatgtattgatatttgtgcctgctatatattaggcactgttccagacctggggctggaacagtgataaatagacaaaaatctccagacctggggctggaacagtgataaaccaacaaaaatcattgctttgtggagcttcatcttaatagagggaggcagaaaataacaaaaataaagtaacatagatagtatggtatatggtaataagtattgtagagaaaaatgaattatttgacttttaataaactctttagatatttctgaggctttaggtaaaaaccattgtagtagacatacttctattatttgctttcttggggcaggttctttcatttgtttacttaaaacttttattttaagataatcgtagattcatatgcagttgtacaaaataatagcttgttaatgtggtgggttgcactgattgattttcacacatttgaatgagccttgcatatttggaataaaccctaatttcttacagtgtataatttaaaaaatatatttctgaatttttttttgctaatgacttattaaggattttttgtgtctgtattcataaaggatattggttggctttctttttttcccctgccatctttgtttgatatttgtatcagggtatcctagtttcacaaattagagagtattccttcctcttcagttgtctgaaagagactgtgtagaatttttttttctttctttatatattaagtagaattctctagtgaaatcatttgaatctggagatttcttttctgggagttttaaaattacaaattcaatttttaaaatagttatagaactattaaaattatccatttcatattgggggaattaggatagtttgtattttcatctaagttgtcaactttatgtatatagagttattcactgcattctcttattcttttgatatttgtagtgatattccttgttcatttctgatgttggtaatttgtgtcttctctctatctctgtgtcagtcttgctagagatttgtcagttttgttgatctttactaatctttctaaataatcagcccattggttcattgatttttttttttctctgttttcaatttcattgattgctgcttgctttaggtttatattgctcaaaaaaatgtcattaggacctgttggttgatgatgttgttgagtttgttaatatacttgctgattttctgtttagttgttcaattcattgttgagagagaatgttggagtccccacctataactgtgatttgtctgtttctcctttgatttcttccagtttttgcttcacatattttgcagctctgttggtgaaggcatatacatttgggattgctgtgtcttggtggattgacccttttatcactatttagtgtccatggtaattttctttattctgaagtctactttgtctgttattaatatagccactccagctttcctttgattgttagcatgatgtatttcttcctctttactttcaacctattttgttatattgaggcgactttcgtgtagacaacatataattgggccatgtttttcaatatactctttcactatctgtctttttttttgagacggagtctggctctgtcacccaggctggagtgcagaggcgtgatctcagctcactgcaatctctgcctcccaggttcaagtgattctcctgcctcatcctcctgaataggagtagctgggactacaggcacccacgaccatgcccggctaatttttgtatttttagtagagacggggtttcaccatgttggccaggctggtcttgaactcctgacctcaggtaatccacccgcctcagccttccaaagtgttgggattacagacgtgagccactgcacctgtcctccactgtctatcttttaatgggtatatttaggctatttatacttaatgtgattattgatatattgtgacctaagtctgccattttattttttgttttccatttctttctgctttttcatttgttttctttttttttcctgcctttgcgggttgtttgaacattttttaaaaatccattttgatttgtctatatatttttcagtgaatctctttgtagagcttctagtgattgttctagatattacattatttatacacattttatcacagtctgttggtgtcttcatttcactagttctagtgaattttacagactgttttctcccttttcgtctttttaccctccctcatttataatagaattgtcttaaatgttttctgtacatacatttagaactacattttgcttcaactcttaaacatattttaaaaagctgaggaagagaaggaaagcctattatatttgtgtgtgtatgtttatatatacgtgtgtgtgtatatatatataaaatcattgctaagcctgttcttccttccctcctagatttccttccagtttcctttatttcctttctgtttagagaacttcctttagcccttcttttagggtaagtctgttggccacagatccttagttttcctttatttgagaatgtcttgattttcttttcattcctgaaggatattctgttgggtataggattctgtgttgacagtccttttttcccagtgccatagtgtttttcttcaggtcctcagctccttagtcagtctgccttcttctctccacctttcaaacttgtttgttttactataatgtccagggtttttatttgttctagttaggaggaatagggaaaagtgtgattattccatcttcctggaagtaaaaatcaggttcatttttatatattctcctagtgcagtgccttatacagagaaattctggaaaaagattgattagatatataaaggaacaatggtgcttcagtggaactatgacctcctttgatccatgcatttaatatcctcatgcagtctcactacgtaatagtaatttggtcttttaagttagaaggacttggatttgaacctggctctgccacatctcagttttattgctttttgagttatttaatgaacttctgagccccagttgtctaatcagtaaaattgtgttaataatgcctgtgtcatagggttgttgtaaagattgagataatttttgtaaaggctttagcatagttcctggcacatggtgaacttataataatattagctgttattatcatggcttattttcaagttcctagttaattaagctaattttcagttgcatttctgccaagctaggccttcctgtatgtaagaattacatttctccttttacactttacttatttggttttggagtgacaagttcaccaaatccttgttctgtctgacacatataatgaagtttcttcacataaaatcgtgaattaatatttttgactaggatactgctgagaatacagctctggttttctattagagtcttccctccaggttcttgtttttgttttgagacagggtctcactctgtcatccaggctggagtgcagtgaagtgatcctggctcactgcaacctccacttctgggctccttccacctcagcctccctagtagctgaggctataggcgcccaccaccacacctggctaatttttgtatttttagcagagacgaggttcaccatgttgcccaagttggtattgaactcctaggctcgagcagtttgcccccctcagtctcccaaagtgctgggattacaggtgtgagacatcgcacccaaccccctcaggctctttttttttttttttttttttgagatggagtttcactcttgctgcccaggcttgagtgcaatggtgcaatcttggctcactgcaacctccgcctcctgggttcaagtgattctcctgtctcagcctcctgggtagctgggattacaggcgcatgccaccatgcccagctaatttttttgtatttttagtagagacagggtttcaccatgttggccaggctggtctcaaactcctgacctcaggtgatccgcccaacttggcctcccaaagtgctgggattacaggcgtgagccactgcacccggcccctccaggttcttaatacttgtttgttctgtgctttttgggttctttttttcctttgagctagaaatccatttaactgaaaattcagtctactcttttctgtcttgtccctaaggatagtatgtccttgtcaaatgtgtaactgaaataaaattatgctatgtttatgctggttccagatctaacattagacttatctattaaatgaaatggaattactgtaacaaaaatcaataccgtgttcttaagtgaacatatgctgtttgtagagtgtcttttccaagtatttacaagttgtgagatacaaggcttgaattcatggagaaacagagtgttgagctggcagcagacctggagttcagcacccacagttcacagataaaaaggtccggagtgagtgcccagggtcatgttgtgctacatattttcaaggacttgagctctgggcactgttttagagtattatggagcattcatgacacctagtggtcatatactcttatatgaattaggtatcactgataatagaatgttgtttaaaattttttaaataaaatgtaagtaccttctaaagactcttgtaaccttctgtgtttagtagaaaaggattcttgattccaggacccttttagtggactgtattgcagtttgaaggagtgccagtagagggcgccacgggttcatttcatttactctgtggtgcaaggttttttttttttcctgagatttgttaaactttgaaccatcatttgagcagtgactttttgttttgttttgttttgttttgagacagaatctcgctctaattgcccaggctggagtgcagtggcacgatcttggctcactgcaacccctgcctcctggatttaagcaattctcctgcctcagtctccccagtaactgggatttacaggcaagcgccaccacacccggctaatttttgtattttagtagagacggcgtttcaccatgttgcctcagcatttggaacattgtggaaagaagcattttaatatttaaaatttcccacaaaatccattatgcttgaaacagactatcatatgagggtaatgggcaccctctgatgattttacagcttttaaattacataggctaacaccattgcattttaacctctcatttccatgcaacaaaatgttagatgaatcgttagacatgccgatcttttttttcatggcacaaattaggaagtatttatttaagtgggctaatgctttacatccttgctaatagttcctaaacataaattgtgtgctaaaacaattatagcagtttttctaaaacacaaaatatttgttcatttatgtgagtaatatttattttgtcttgaacatttttattcattattagtatactgcattggaacaaaaactgaaaaaattgacggaagatttgagttgtcagcgacaaaatgcagaaagtgccagatgttctctggaacagaaaattaaggaaaaagaaaaggagtttcaagaggtaaggtaaatggattcatgaggtgtttgtctgaaaggctttttatgggcttttcatagtttgatcacttggaaaggggagttgttatcacaatttgggaaattctcttagaggagaaatgctttgtgagctaaaggtcatcttattttctttcacatcttcacttttgcgctttttttaaatctttcagtttttgattagagaagggaattagtattcagaattcatccatgttttctgatttgtttgagatttgatattcagtaggaaaggatcacttttcttcttttggacattttctctgctgtggaggaaattgtattacattttccagtaggcttttaaaatttttttttctttcactctatttcctttataactccagtatttttttttttgagacagagtctcgcagtgttacccaggctggagtgcaatggcacaatcttggctccctgcaacctccacctcccaggttccagcaattctcctgcctcagcctcccgaggagctgggattacaggcatgcaccaccacacctggctaatttttgtatttttagtagagatggggttttgccatgttggctaggctggtctcgaactcctgacctcaggtgattcacccaccttggcctcccaaagtgctgggattacaggcatgagccaccatgcctggccaactccagttgtttttaaacctgtgggttggtaaataaattaggagggtagttgatgtggtggggaaagtggttggcagaagagtgagggtggaaggtgcccttccataagtatctgccaatttggttctttcaggtgatttagcctgaaaaagtaccatacggattaagagtctatagattttaaataagaatgcctggaaatgttagctgatatctttctgtggttattaaagttaatgggtagcatatatttcctgtccttctacatttaagcccatttaaagtggtatacagttttttgtgttttaaacaccgtttttgagtatgtttggtttcttagttgagctttgactgttgtagctcagttcttctctcttgcccctgatccttcaaagtagaggtaattaatttaagactgaagatgaggtggaaacaggctactttccatgtggtcaactgataagagtccttcccctttccctcagagacctggatttgatgcctgagggcagcatggagcaccaaggctgactatgttcatcgttaagtggacagttggctcagctccctgctgtctcctgtgctctctgtgcagtcgcctgttaggatgctcatgcctcaccctggagtctccctagcgaaccatcatcaggctgatgcacctgccctttgtttttcaggagctctcccgtcaacagcgttctttccaaacactggaccaggagtgcatccagatgaaggccagactcacccaggagttacagcaagccaagaatatgcacaacgtcctgcaggctgaactggataaagtaggggccgtgtctctctctctctccttaatcatcccctcttgttccttgtacttgttacttctctaccataactgacatatgatactttcaaagaaaaagcgctccaccttcactttccctatcaaagtggagaatgtacagaaccattctggctctaggtttcctcatctagagaaacagtgggggtgagttaggatttcagatccgaaagtctgtggagctctctcataatctgttggttcttggttccatgaccaggtgggagctgtcccaagtaatttatgcccccaagtagttaaagcactgaaaattataatcactttacttatttaagactcactcccaaagtggtctcatccagttttgtggctttacatatcatctatgtgatgatgactctacccagcctggatgtctattctagacttcaggtgtgtggatgtgtgcttgacagtccactcacatgtctaaaggcacttcatagtaacatgctaagaattgaactctaggtatttttctttttcaaaactgttcctcccttagtcttccttaccctgctaacttgcacttccattccccgcattgctgggaccaaaacctccatgtcacttctattcttctttttctcttacacttgaatctgctgcctctactgatggatacttaggttatcaacattttcttgttccctgtggcactgtttgtaatatcacggggcaggtatctttgtgtatgtgtgctgatgtttctataggtcagatttctgcatgtgaaatttatagcctaaagaacatatgcatcccaatatttgtgtgttttgtttgtttgtttgtttgttttgttttgttttttgagacggagtctccctctgtcacccaggctggagtgcagtggcacgatctcggctcactgcaacctcatcctcccgggtttgagtgattctcctgcctcagcctcccgagtggctgggattacaggcgcctgccaccacgcctggctgatttttgtatttttagtagagacgaggtttcaccaggttggccaggctggcctcaaactcctaacctcaggtgatctgcccaccttgacctcccaaagtgctgggattacaggcatgagccgccctgcctgggcagcatcctaacatttgacagttactgccaaattgccctccataaaagctgtagcagttactctcctaccaggtacaagagagggcctgtttcctctcatccttgctaattggaggtagtctcggtttttaaaattgttgctaatcaaggagtgaaaaatactgtcatatcattgttttaattcacacttccttgattaccattgaagctatctctttcaatagccatttgtattttttgtataaagttttctgtttctagccattgcccttttgttcaatcatagagcgctgtatatgttgtattacagatatactgtcttttattctgttatatatattgaaaatgtgttctcttagcctgtttcttatctcaacttattttccttttggttatttattaatacctagctgttttattttttgtggttaaatctttttcctgtgtggtctccttgccacacccagcctctttcatctcctatatgcagccgctgagtgacgtcgcaaggtcacattatggtattttaagacatatttagctgtgacgtatactgtatctcagccaaaatagatggcatccattttgatattccatgaccattttattgtttaagaatacatgattaatgaaaaagtaaagaacatgaaaatgaaacttggtctctttttctttttgtagctcacatcagtaaagcaacagctagaaaacaatttggaagagtttaagcaaaagttgtgcagagctgaacaggcgttccaggcgagtcagatcaaggagaatgagctgaggagaagcatggaggtaagggaggaggatgccgaattttctccacttatgtaagaaccaagtgcaaggggaaaagaatattcctattccatttgtcagttgcttgtcatgactgtgtgcctttttcttttctattcaccagaagtaagtattacagaattttctgtatataacccatgacagaatatgattgcttatttttctactctctattctgtatataattactaatatgcatctagcaattatagcatatctagcaatatgtgtctacaacatgacttgtattaagaatatgtagtccttccttaaagattgttttagacccccagggaggtggaaagatgggaaaggaaggaagggattttttaaatggaaagaaacaaaattggaagtatcatctaaatcccttttctaactgttggcatttgtgtctttcaatattaaaaacacgtggaaagtcatagatttaaataaacaaaagtagtgacagataaagagtttctagattaaaaattcttataaaaacatcaagcaattgtcaattatatgactctggcttcaaaagtggacactgaccttaatgttcagcctgtgcatgccctggttgacggtgtctttggagactttgttttgtccacaaagtggtggatgagggttcctgaatggcatggatgccctgatgggattttatgcatacatacttcaatttggcttctctctgaatttatttagtggcctggattttattttaaagggcttaattaagaaccattcagtgacagttaatagactgaaacaatttgaagagagccataaatcaacattgtaattttaagaagaggaacaacacaagaatggtagaaatttcttctccatcaaaccccacaggaaagaatgtttttctgtttattctttaaatgttctatgatcactttttaggctgtaaagattaagaaaactttgtccataaagaacagttatttgttcaggtgaggaaagtctaaatgtatttatccccaccgctttgcagagtgtatcatgatggtaaaatcagaacatctgtcagtagcagacaggtgattgttaaatcagctaaccccaaaggggcaatactgctggagatagggggctgcagctccagccacaaagtggaagaaaacttcaaatcagatgatagtttcatcagcaaacgttttcaaatggaagtgtttgtttcagcaaaacaaatgtttgccttttggccagtggggaccaaccaacagatgcttctgctaacatttccacaggcagactggcatcgaactcttccctctgtgagcttccctttcagccaggaactctcccgcgactccactggctgcctggtggaaacattttgtaaaagcaatcatctggttaagagagtccaaacactttaaaaactgcttgcttggccaagtcgcagtagtgggctggacattgtcttgcaggtgtttctgaagacttgttcatccccacgaggtctggtccgtgagctgtagcgctgtcctcagttaatcccagcctgtactgaggtgcatgcatcacatttcactggtatatcattgatgtctgtgtcaaatgagggcatctgtgtgaaagtgtctagcaccgggcctggggatgaagttaatatttgtcttaatttatggttatgtttatgtatgtgtcatcttttgagggtgatagcaagatttcaaagagtttggctggctcttgtgttttgcattgggattgggaccagataactgatgaacccagttagagtggtggtgtaacttagtgggaaaatggtagtggctttagagtgagtgagatctgagattgtgttgcttttctgccacctaccacaatgtgacctttagacagtggcttaccctttctcagtctgactttcctcatctgcatatagggacaaatcattctcctgccttttcaaggctgtattcttggttaagttaaatattgtatgtaaagtgcttagcccagtgcccagcacataagtgctcagtcagttattgcagtccaacacctgcccattgccttggtcttcatcactgccatgaccttttgatgttagcattgtttgctgtcacctacaggcacagaaagtgtgatcaggggacagtgcacttgagatttctcatatttataattttgcctgttctattactgtgtcactctgggtatctttctgtgtctaattatatgtaagcactaacaaatttaggacgcttataggttttggatgccgaaataatgtgacagttgtactgaaattttccttgtctgtgtttagtaaacatgctgctcacaatgagaaattatcagtactggaaatgtgatttaatggcccaatcaagggtaaagttaacatttagtatcaaagtgaatggagggtttagataagctgctcgtccactatccagtgccagccccatagcattggggttaggcaataaaataccatcgtttgacagtcaagatgagggaacacttgcctggggacctttccaagcatagggatctgtattacactaggtcctctaaggagctggctctggcaagcaagagagatgaggaggaaagggaaaaacacattctttgcatccatcccttatccaagtatataggcttcgcccagcaggggacgtattaagctatattcatggatgggatcatgaaatgccacacagtagctgaaatttgttttgtctggccctaggaaatgatgcctcccttgctgctcctaaagcgaagttgatctgggtggaattgcttgctaagctctaatgctggcttgtggttatagggatttttgttgtgcttttccagcatagtacccaattttgcaaatcatgtgaggatgcaggagatgcctaggaaaatgtatctttgtatgcttaactcattgttgataatgagatacccaatcaagtcttaagtggctgtagcctcgtggaaaactaattgctgatggatggcagcttgcacatccattttcagatgttcattttctaaattctggccttttaaaattcttgggttggtcatagccatagcattataagcctgctgggtcccaggattggctgaacatttcttcgttagacacaaatatttacggagctaatgccagaatagagaaagtcatgttaatctttccattgagcttactattcatttaaatgtctccagttatggacagacatggatcgagaccaacaaacacataaacataaaattccccatctttccctggtgccctctctctcttcttttttccttccttcctattgggacgcacctagttttgcacagtgtctttccagctttcttgtcaagcctccagatgcaggtgtcatttgatttgattaaaaaattttttttttagagtaagaaaatattttttcatttgcaaaataaaaatgctaagtcgacccaggtaattacattctagttcctcttctatgttgacctcattcagctgatcttagcattgattacagagatctggctactgttaaattttgggaggaaatactactaataatgctacattgcccctgtcaaagtgctttaagatgtttgtcctttcacatctgtgatctcatttgaggggtgattattctgagtctgaagaacaaaccagtcattatacgttccataatttaatgatgctaatttaaatcaataacattgttgcaccttaatgatcgtgctttgcaaagtttaacactgactagtgtgaatgttagcctatcaatcttgagatcggttggagctgccctttagttctgattgatatcttaattcgatagagtgtcagtttagcagcagggaagcaggatcaggacacggtagatgggagtataataactacaacaggttctgtcttattttaatgatgaaatgaacgcatatacatgaacggagcagctgccagcaagttttcaagtactttctactagccagattctccctcttcttgaatttggctttgctacatcggtacccatctgctggtagtaaccagactgataattgaaggcagccttccaacacagtattgccacggccatctgttttctaacagtgcagtagggttttggaggatgggtcttaattgtttctttaagattcagaatttttcctctacttcacaaaggggtaattttggtaggtttgaaatgcagtttagaaaaaagttagctttatatgatttttccccgcttgaggatgtgaggtgcttggttctcttagcttgtaatgatttatgccaattccctgtggtccaaagggtggcatacagtataggttgagatacttgtttgttatgtgagtcttatgtggttaataagcaaaaaagtttttctttggcatgtaaatattgcttgcttttaagattcagaacatataggcctccctagtagtagaatggaactacacatgtacctgtgttactttattgcatgctgttgcgtggatgtctcttcaatcagatgcccaaagaacctgttttcactgtgaaagctcagaagctagaattaattcttcctctgtgttccagccctctgatttcccatagcacactcaatgtctctttagtatttagcatatcctattgtgtattaaatgattagtatcacatcttcccccactggaggatgtctgccccaagggcagagactctgtcttatttatatttgcattttttgtaatgcacattccagcatcttgaatattgttggttttcttgataagcatttattgaaggtaatttttcccacagaatcattcctgtaacagcaaaccttaagatggttttgcaatgaaaagtaaacatatgtgctgagatttttttttttttttggtttattaacaaatcaaatgtttgcaaaggtatatttggccattcaggtgtgataggaacttggaggttttgtcttgaggatcttgtagataggattttccttttgagcttactctttaataggcgtatgaacaatgagaaagttcaatgaaacttcttgaaagaaaaaattatcttcagatttgggtttgatgctgttgtcttctgttcataacattatttaagtaagaatgtctgacttcattaggtactcaaacggggaaattgtgattctttccctagtgagatacacaaacagttctgctagggacctttattaaggcagaagtcataacttacttgagcattcgttttggctataaccaattaaaatgtgtgttttaggaaatgaagaaggaaaacaacctccttaagagtcactctgagcaaaaggccagagaagtctgccacctggaggcagaactcaagaacatcaaacagtgtttaaatcagagccagaattttgcagaagaaatgaaaggtaagtaaacttagtattttagagttacctttctaagctgctattcccgtgagaggggatggatggcattaacatattagagaaactctttggattttttttcatatattccctcaaaaagatgtgcgcagttgatgtggaagagttttccctcttctagtttttagtttccagagtgagagtgggactttttttaattggaacatattgagtcccaaacgcctgatgctcagcactttgaaatcagaagggtaaatattttccacacaaagctaaattgtcagtgctgtctctcacccccgagtgctattctctgtgtctctagtgtgcttgttagttacatccagacagctcatctcctgactcattaccatttcccttataatggaaaaaccctatattaaatgcatgttttccaagctcctaatgaccattgttttttgatgacttacttgactgaatgattttattttcttattttaaagccaaagaattctgctctacacatcaaatgaatccactcttggtttcatatttgtatgtttgtgccggatgtcttctacataccctttattttctcacctggggtgtttgcatatctagaatttctttgaactctgtcctgtggaatgtgtgtcacacttctctgtgactatttttttaaaaccccaatcttggtgtggtggcgggtgcctgtagtcccagctactctggaggctgaggcaggagaatggcatgaacccaggaggcggagattgcgccactgcactccagccagggcgacagagcgagactccatctcaaaaaaataaaacaaaacaaaaacccaatcttcccaagacagcttttagtttttccacagcagcagatagaaatgtcagttttcagctttcttgaagggaaactgtaagaaaaggaacagttggggcatttttcagtgttgatcacccaggtgattgtttgagttgctcacagcaaagtgggatgaagcccttgtggtgctgtctacataagcccttaactataagtaggtagattgagattgacagcttagaagttcgtactgctttccacttgatatgatgtctgagattgtaatacatgttacctttatcatctactgtggaggttctcaactttcaatctcccccaacatacttgagcaacatgaagccttcttatcactgtttaatgaaaacatcgtggttattcccaaccaggaggggccagtatgtatagatgagtcattaggcagaagacagggggtaacggagtttgaagaagcttccaaatgactgtgacattcatagacactgccacccttactatgaggggctgggatgggggtgataatgttcctcaggaatattcacatataggccttgagaattactgatatatggcatcatttactcttttctacttaagtctaatcctgtggatgttttagctaaaatggtggagtacttatttacttttctgagacatcagaattactctacaataaagtgggatgttcccatttcagtgctgttcttgtcccagttttctctcttggaataaatatttgaaaagatggtaaaaatatacacatatgtaaacacatacaaagaaaagaaacagtgcttaggaaaatcatcccttggtattttattcaataacatgttcttaagctgctagaaagaagatgaacaaatgtgttactctccttaagataaccatttttctcatttttatataagataattaccaagtgatccactttctaggaggtacccaggcaataatgccagtttttccagggcttgagtagttgttagtttgtttggattttgccagggggcggggggaggggttagcgtttctgtagaataaacatttattacaaacattgacgacttttatttatttttaaatagcgaagaatacctctcaggaaaccatgttaagagatcttcaagaaaaaataaatcagcaagaaaactccttgactttagaaaaactgaagcttgctgtggctgatctggaaaagcagcgagattgttctcaagaccttttgaagaaaagagaacatcacattgaacaacttaatgataagttaagcaagacagagaaagagtccaaagccttgctgagtgctttagagttaaaaaagaaagaatatgaagaattgaaagaagagaaaactctgttttcttgttggaaaagtgaaaacgaaaaacttttaactcagatggaatcagaaaaggaaaacttgcagagtaaaattaatcacttggaaacttgtctgaagacacagcaaataaaaagtcatgaatacaacgagagagtaagaacgctggagatggacagagaaaacctaagtgtcgagatcagaaaccttcacaacgtgttagacagtaagtcagtggaggtagagacccagaaactagcttatatggagctacagcagaaagctgagttctcagatcagaaacatcagaaggaaatagaaaatatgtgtttgaagacttctcagcttactgggcaagttgaagatctagaacacaagcttcagttactgtcaaatgaaataatggacaaagaccggtgttaccaagacttgcatgccgaatatgagagcctcagggatctgctaaaatccaaagatgcttctctggtgacaaatgaagatcatcagagaagtcttttggcttttgatcagcagcctgccatgcatcattcctttgcaaatataattggagaacaaggaagcatgccttcagagaggagtgaatgtcgtttagaagcagaccaaagtccgaaaaattctgccatcctacaaaatagagttgattcacttgaattttcattagagtctcaaaaacagatgaactcagacctgcaaaagcagtgtgaagagttggtgcaaatcaaaggagaaatagaagaaaatctcatgaaagcagaacagatgcatcaaagttttgtggctgaaacaagtcagcgcattagtaagttacaggaagacacttctgctcaccagaatgttgttgctgaaaccttaagtgcccttgagaacaaggaaaaagagctgcaacttttaaatgataaggtagaaactgagcaggcagagattcaagaattaaaaaagagcaaccatctacttgaagactctctaaaggagctacaacttttatccgaaaccctaagcttggagaagaaagaaatgagttccatcatttctctaaataaaagggaaattgaagagctgacccaagagaatgggactcttaaggaaattaatgcatccttaaatcaagagaagatgaacttaatccagaaaagtgagagttttgcaaactatatagatgaaagggagaaaagcatttcagagttatctgatcagtacaagcaagaaaaacttattttactacaaagatgtgaagaaaccggaaatgcatatgaggatcttagtcaaaaatacaaagcagcacaggaaaagaattctaaattagaatgcttgctaaatgaatgcactagtctttgtgaaaataggaaaaatgagttggaacagctaaaggaagcatttgcaaaggaacaccaagaattcttaacaaaattagcatttgctgaagaaagaaatcagaatctgatgctagagttggagacagtgcagcaagctctgagatctgagatgacagataaccaaaacaattctaagagcgaggctggtggtttaaagcaagaaatcatgactttaaaggaagaacaaaacaaaatgcaaaaggaagttaatgacttattacaagagaatgaacagctgatgaaggtaatgaagactaaacatgaatgtcaaaatctagaatcagaaccaattaggaactctgtgaaagaaagagagagtgagagaaatcaatgtaattttaaacctcagatggatcttgaagttaaagaaatttctctagatagttataatgcgcagttggtgcaattagaagctatgctaagaaataaggaattaaaacttcaggaaagtgagaaggagaaggagtgcctgcagcatgaattacagacaattagaggagatcttgaaaccagcaatttgcaagacatgcagtcacaagaaattagtggccttaaagactgtgaaatagatgcggaagaaaagtatatttcagggcctcatgagttgtcaacaagtcaaaacgacaatgcacaccttcagtgctctctgcaaacaacaatgaacaagctgaatgagctagagaaaatatgtgaaatactgcaggctgaaaagtatgaactcgtaactgagctgaatgattcaaggtcagaatgtatcacagcaactaggaaaatggcagaagaggtagggaaactactaaatgaagttaaaatattaaatgatgacagtggtcttctccatggtgagttagtggaagacataccaggaggtgaatttggtgaacaaccaaatgaacagcaccctgtgtctttggctccattggacgagagtaattcctacgagcacttgacattgtcagacaaagaagttcaaatgcactttgccgaattgcaagagaaattcttatctttacaaagtgaacacaaaattttacatgatcagcactgtcagatgagctctaaaatgtcagagctgcagacctatgttgactcattaaaggccgaaaatttggtcttgtcaacgaatctgagaaactttcaaggtgacttggtgaaggagatgcagctgggcttggaggaggggctcgttccatccctgtcatcctcttgtgtgcctgacagctctagtcttagcagtttgggagactcctccttttacagagctcttttagaacagacaggagatatgtctcttttgagtaatttagaaggggctgtttcagcaaaccagtgcagtgtagatgaagtattttgcagcagtctgcaggaggagaatctgaccaggaaagaaaccccttcggccccagcgaagggtgttgaagagcttgagtccctctgtgaggtgtaccggcagtccctcgagaagctagaagagaaaatggaaagtcaagggattatgaaaaataaggaaattcaagagctcgagcagttattaagttctgaaaggcaagagcttgactgccttaggaagcagtatttgtcagaaaatgaacagtggcaacagaagctgacaagcgtgactctggagatggagtccaagttggcggcagaaaagaaacagacggaacaactgtcacttgagctggaagtagcacgactccagctacaaggtctggacttaagttctcggtctttgcttggcatcgacacagaagatgtaagtacctgggatttaaatgccatttctcggtttacatgactagtggacactcagtaaatgtttgtctaattgaaatgtacattaaacctaagttaaaatatttttagggttcaaggaaataaaatacaccaaaatattttcaaaacaaaccagaacttgaggaaaatgagtaaacgttatttgaggaataaatttctatagggattagatttacatagcattatatagaatattactaaagatgtttttaaagtctggagaaaattatattatggagtcagaaagtctttagaatgtgtgtttccaccctttgtgcattaataaagtatactgaaataattaagaacttacaaatggtaatatgtaaatttttaatctctcccacttttcagactatttttgatgttatggcattatcgtcatgaaactaaatacagcagattctttatgtattactaaacagttttctctctaacaatttactgtggtacaaaaatatgatttggtataagtcatttaaaagggcttttaaaaaattgaatacatatttgtttaattgcttgtaactttgtcctttctagcctgctagcttaattaataatgctatatagtgtatgcatgtcacttgatttcctctgtctatctctgtgaggtagagaaggcaggtcatggtgaggtgatggcaggtgtaggtgcaacagcagatccccagtttacagatgagaggaaagtgaggctcaaatatgtaatttatccaataatgtacagtaagtgctggattggggattaagtccttggactgggaatctggttatgaaactttactgccttattaaagagtatcataaatgctgaaggtggaagctgagcattttgttagcctcttatttaataattacaaagagatttcatatttaggctacctgaatattcttagcaagggaaaaatatgaaatttaaatacattacaaattgtaattgagccgaagggtttgtcttcaagataaatgcctaaccccagtgtcttgcccataggggccacttactgaacgtataagtatgttgaacatttgaatgaagagagaaagatgtagtgggaaattcaccactttaagagatgtgtttagcagaggccacgcatcagtttctaaaaagtaataactaaatctattctattttgattctttttgaaaaataaaatgcatgcttgttatgtattataattacaggctattcaaggccgaaatgagagctgtgacatatcaaaagaacatacttcagaaactacagaaagaacaccaaagcatgatgttcatcagatttgtgataaagatgctcagcaggacctcaatctagacattgagaaaataactgagactggtgcagtgaaacccacaggagagtgctctggggaacagtccccagataccaattatgagcctccaggggaagataaaacccagggctcttcagaatgcatttctgaattgtcattttctggtcctaatgctttggtacctatggatttcctggggaatcaggaagatatccataatcttcaactgcgggtaaaagagacatcaaatgagaatttgagattacttcatgtgatagaggaccgtgacagaaaagttgaaagtttgctaaatgaaatgaaagaattagactcaaaactccatttacaggaggtacaactaatgaccaaaattgaagcatgcatagaattggaaaaaatagttggggaacttaagaaagaaaactcagatttaagtgaaaaattggaatatttttcttgtgatcaccaggagttactccagagagtagaaacttctgaaggcctcaattctgatttagaaatgcatgcagataaatcatcacgtgaagatattggagataatgtggccaaggtgaatgacagctggaaggagagatttcttgatgtggaaaatgagctgagtaggatcagatcggagaaagctagcattgagcatgaagccctctacctggaggctgacttagaggtagttcaaacagagaagctatgtttagaaaaagacaatgaaaataagcagaaggttattgtctgccttgaagaagaactctcagtggtcacaagtgagagaaaccagcttcgtggagaattagatactatgtcaaaaaaaaccacggcactggatcagttgtctgaaaaaatgaaggagaaaacacaagagcttgagtctcatcaaagtgagtgtctccattgcattcaggtggcagaggcagaggtgaaggaaaagacggaactccttcagactttgtcctctgatgtgagtgagctgttaaaagacaaaactcatctccaggaaaagctgcagagtttggaaaaggactcacaggcactgtctttgacaaaatgtgagctggaaaaccaaattgcacaactgaataaagagaaagaattgcttgtcaaggaatctgaaagcctgcaggccagactgagtgaatcagattatgaaaagctgaatgtctccaaggccttggaggccgcactggtggagaaaggtgagttcgcattgaggctgagctcaacacaggaggaagtgcatcagctgagaagaggcatcgagaaactgagagttcgcattgaggccgatgaaaagaagcagctgcacatcgcagagaaactgaaagaacgcgagcgggagaatgattcacttaaggataaagttgagaaccttgaaagggaattgcagatgtcagaagaaaaccaggagctagtgattcttgatgccgagaattccaaagcagaagtagagactctaaaaacacaaatagaagagatggccagaagcctgaaagtttttgaattagaccttgtcacgttaaggtctgaaaaagaaaatctgacaaaacaaatacaagaaaaacaaggtcagttgtcagaactagacaagttactctcttcatttaaaagtctgttagaagaaaaggagcaagcagagatacagatcaaagaagaatctaaaactgcagtggagatgcttcagaatcagttaaaggagctaaatgaggcagtagcagccttgtgtggtgaccaagaaattatgaaggccacagaacagagtctagacccaccaatagaggaagagcatcagctgagaaatagcattgaaaagctgagagcccgcctagaagctgatgaaaagaagcagctctgtgtcttacaacaactgaaggaaagtgagcatcatgcagatttacttaagggtagagtggagaaccttgaaagagagctagagatagccaggacaaaccaagagcatgcagctcttgaggcagagaattccaaaggagaggtagagaccctaaaagcaaaaatagaagggatgacccaaagtctgagaggtctggaattagatgttgttactataaggtcagaaaaagaaaatctgacaaatgaattacaaaaagagcaagagcgaatatctgaattagaaataataaattcatcatttgaaaatattttgcaagaaaaagagcaagagaaagtacagatgaaagaaaaatcaagcactgccatggagatgcttcaaacacaattaaaagagctcaatgagagagtggcagccctgcataatgaccaagaagcctgtaaggccaaagagcagaatcttagtagtcaagtagagtgtcttgaacttgagaaggctcagttgctacaaggccttgatgaggccaaaaataattatattgttttgcaatcttcagtgaatggcctcattcaagaagtagaagatggcaagcagaaactggagaagaaggatgaagaaatcagtagactgaaaaatcaaattcaagaccaagagcagcttgtctctaaactgtcccaggtggaaggagagcaccaactttggaaggagcaaaacttagaactgagaaatctgacagtggaattggagcagaagatccaagtgctacaatccaaaaatgcctctttgcaggacacattagaagtgctgcagagttcttacaagaatctagagaatgagcttgaattgacaaaaatggacaaaatgtcctttgttgaaaaagtaagtggctatatctgtttatgtttaaatatgtagtcatgaggcaggaaaccatattttcttctagacactgtgaattgtatttacttctagaccgtgtctgctatattggaccaaactttgtaaaggctttatgtttactgggtcttgaattgcagaaacactgagttggctctggcagtagtcactattctggctgattctttgggacatgttcatggattggaccaggtttttaatgtggcacctacataagggcaaagctttggtttatgcacagttccttgttctagttatatttccttttcttagagtacatcagaatagtggcctccccatatccagttgagactcactgctatagagagtataacagacattatctaggatcggaaaggatctgcctgccttactgtgtcttttttgccttcaggacaaagcacttttaaagatactgatagatttgtaaccaacagagcactcatggcttctagggtgtgttttggggatttcgtgctttcagtccctcttataccttctctttgtgcagtcttctattgtattagttgatgattaaagggaagatctgccatcaagaggctcaattattaaagaaaaattaagttttggcccagtgagcttacttagtgatctaggaaagtgattttgtcacacttaattcttgctgaacaaatattaaagaataaaaggactatccacaaaattcatctccaccctgtattttctaagaattttggggttttggataccttgcaagagatggcagtcagtatagagatgatgagacaaaccatagcaagctgtttcacttcaagggacaaatgcaaacaatagctttttaactgtttttcagtaatcataagcatgtttattgcagattagtatggcactgggggattagtagagatccaagaagtgataagatactgcctgataatgataatctttgatgtttaagtttaattcaaattaatacctttgtgaaagattttaagacttagggatattatctttccttgtcattccttcccttattactattcttctattaaatcttttctgggaagaaaaggtaagcttactagtaggttttgagaatgttgagttgagtggattagtaaaggcgggattagccagcttccattttatgattgaaggctaaaataaatggcatgaatatgttgtatcagagtggtcgatctgatcaaaacagaccaccaaaaagcagattctaatgaaagatgaaatttcaggtaaacaaaatgactgcaaaggaaactgagctgcagagggaaatgcatgagatggcacagaaaacagcagagctgcaagaagaactcagtggagagaaaaataggctagctggagagttgcagttactgttggaagaaataaagagcagcaaagtaagtttctttgtgacaagtgttattatgatctgttaattcattgtgcacactctccttattggttcctgtaagaccttctgttgtttacctaacttatttttagctcttgaaaaaaataaccctgtgcttatgtcataatctgatttatagtaatctctaccatccagcactatcaggagcccacaaggagtcgtgagaagcctctgaacacatgaaagtatctgtctcagagcccaaatacattttcatggaagaggacccttggaccacattaacgcacaacagaagtagatctcatgccgctttcaacaagtttatctgcctccctagcttgccacagattacagggtggaatgttgctagaaacacattcattgatctgctaagaactaacaaagtaacagaactaaagtcatagttttaggcagggttaatgtggcacacctatagcacttgggctgccactgcccactgccatttccatagtagatattactaattcataccctccctttttcctgagtctcctaacactgtgtactgggtagctgctaccatgcagagagagctggcagatgaaatgaaacctgtttgtcatacctgattaaattataaacatccctatagctgtttagtcctcatgcaacttcatccctgagtagtatttaaagaacagcaaaataagatagtcatgattgcgaccctgaataatcacagaaatttgaaatgatacatgtaatattctgtataaagagttggagagatttgttcttttctttaaatatagtatttaatctatgaaaatggaaaggttttggcatcaaatctcaggaatggacttagaccatattctggccatactgcatggaaggagttcctctgaatgatatttgtgtattgcgtctgctgaaatctcttttggtgttgagtagcttgggagtgtcccaagtgcgtcattattgtattttatgtatgggcactactgagaggagtagtttggcctcagccccatacatatgagtgtgttagtttgcattggctttattcattcatttattcattctctaaataataagtgctagtaaggtcaggggatagactattgaaccatacctatcctgtgtttcctgcactcatgcagcttacagtctagacacataataaatcatgaaataggcaacatgtaacaaataagcggataaatactataaaggaaacaaataagattctttgctgtggaataattgggatgtggggatatcagggtaggaaacaacctaatttagatagggtggtcagcagatttagatagggtggtcagcagatgtcacttgcaagatgacgagtcagctatgcaacgaccaggcagtggtggggagccttctaggtctagagagcagtgtggtcaaagctctgggactagaaagatctttgtattttttttagaaattgaaaggaagccattgtggctggagccagatggaaaatgacatgcacaaagattggaggggtaggaagggtatggagggggtgggaaaggtttggggtgggaatattcacttggctagttcaacatatagggagtatttagaaattatgggaatggtagaaaatgatggagaagagaaggcggctcagggcctagcctggaggaactctagcacacaaggtgagatggaggaagaagagccagcaaagaagacagagagaaggcttgataaggcaaacacccaggggggtctcatgttctggaaatcaagaggaaggaatgtctcaagaaggagggagtggctggatatagtggctcatgcctgtaatcccagcattttgggaggccgaggtgagctgataacttgagtccagaagttcaagaccagcctgggcaacatggcaaaactctgtttctacaaaaaaacagtaaaattagccagacgtggtggcacatacttgggaggctgaggtgggggatcacctgagccctggagattgaggctgcagtgagccatgattgtgccaccgcactccagcctgggcaacatagtgagaccctgtctcaagaaaactaagccaaaccaaccaaccaaccaaacaacaacagcaacaacaataataacaaaaaacaaaagaaggaaggagtggtcagcagccccagatactacttagatgtcgattgagatgagcttagaagaatgtgcctttagtttgcagcatggaggttgctgatgccatgaaaagcttttttaggaagagctgggacgaattgattggagcaggttaaagaattggagatgaggaagtagacaccacacatacagaaacacatacagagacagctactcagggtcaggcacggagaagacaaatgcttccagggttggagtttggccagttcttcacagtgaagggatggggcaaaagattggagggcatttggaaggaaattcttatagtgacagaactggagtctaagctggtcaaggaagaaaatgcaagtccggaggggatttggtgtgaagatggtagtggttctgttgatgaggtcaggaattattgcaatggaagtactttaataaacaaggttggaagcataggaaggtgtggtcccagagtggtttaattgaattcaaggtttcagagtttctgtggtctctggatatgaccttgcgaggtggttgggctggagcagaggaaagtgttattggaggtgaagtcacaattaaaagtgaatacattgctaaggattatagcactattctgtacagattttatcttgcccataaatattttttttctacacagtacacattatttcctaaaaatatttccaggttcttaattatgaggaggtgctattatgattttattatttttctgtttaggatcaattgaaggagctcacactagaaaatagtgaattgaagaagagcctagattgcatgcacaaagaccaggtggaaaaggaagggaaagtgagagaggaaatagctgaatatcagctacggcttcatgaagctgaaaagaaacaccaggctttgcttttggacacaaacaaacaggtgaaatgtggggtttggttactgggggagctggagagtgtattttgatcatggtaaggcttttttttttttccaaaaaaaatcaatattctgggttattactatgctatataatcttttaaaaggtctcacattaacttcacgatcttttccccaggtccctctcttattttatcagttgattttttttttttttttttgagatggggtctctctctgtcgcactgcaagctccgtctcccaggtttgcaccattctcctacctcagcctcccgagtagctgggactacaggtgcccgccaccacgcccggctaattttttgtatttttagtagtgatggggtttcactgtgttagccaggatggtctcgatctcctgatcttgtgatctgcccaccttggcctcccaaagtgctgggattacaggcgtgagccactgcgcctggcccggttgattttttaaaaaggtatatttccattttggagtagaataataggagagctgcaaagtcgaaatagtccttggaaaggcagggttttgtttttgtttttcttttctttttttttttttttttgagactgagcctcactctgtcacccaggctagagtgcagtggcacaatcttggctcactgcagcctctgcctcctgggttcaagcaattctcctgtctcagcctcccgagtagctgggattataggcgcctgccaccacgcccagctaatttttgtatttttagtagagacaggggtttcaccatgttggccaggatggccttgaactcctgacctcgtgatctgcccaccttggcctcccaaagtgctgggattacaggtgtgaaacactgcgcccagctgttttttgtttttctgactatttttttttagctgtgcctcctggctaaagtaacattttggttttttttgtttgttttgctctagtatgaagtagaaatccagacataccgagagaaattgacttctaaagaagaatgtctcagttcacagaagctggagatagaccttttaaagtctagtaaagaagagctcaataattcattgaaagctactactcagattttggaagaattgaagaaaaccaaggtatgttcactttaatttgcttcatgatttcgaatggtttatacaggtggtagtgattttaatggtatagcattaaacgttttcattttcattttatgaaaatttttggtagtcaaaaatgatgtcattcatcagttctctgctgagttatctttaaaaaaaatcagtgggtcatctacagtctcatagcttgaataagctatccattgcctcatgcatcctctcaaactagaggatgttaaagacttcttgagatagatttgaagatccagccacacagcagatgagggcaggcctcttaagctatagaaaacagtctgacgggcaattccaaaatcttgaatgagctgtctccaacttcactgtcaccatactcacttttctgtggcttacggggagatcaaagtgtggcagagcaccttggtcaggcagacgtgtggatattctcctcttcctcttcacgcaaggatcatagaactttttttttttttttaggaacaatgaaggtgaaccctagtctcaggattgctagtctcaagatggtaccactgtaattctacctggaaaaggaggtgttttcattcctacagatatttttcataagataaatacccacagtgtatagtaatgaacctggataataaatatcttccagaaaatattttacttagaagacgattatattttttaaattttgagattaattgaatatatacaaacagaaaattaggtacaaatttattatgtttatggctcttatacaactatcaaggtaaaggaaatttaccaattaaatacaaagtagtaaaattcaaaatcacaataattaataatgttctgctgctacaaaatgagatgttgggtttaataatagaaggaagtagcactgttgaaatagaattaaatgggtcttgaattcatttgtgattggaatcagaagtcgcaagttctgaaagggtaaggtttactgcaacattgctaataaataatttcaagatgaaatatacaaagatgagatccaagctctaacatttacttgcaacatgaatatggtactgtgttcttctccgtcccccatcctcattccccctcctcctcctgctgctgtttggtcttcctttggaaattcatgatgccatatcagatggttttagaattctgcactttaataatgtaatgcatatgccatatataatatcccagagggatctgctataatattgcataatcgaattcatatttctgcagcaaaatgtgtggatactctcacaaggcaggataaatagagactatatatactgggccaggtgtggtgactcatgcctagaatcccagcactttgggaggccagggcaggaggatcacttgaggccaggaatttgagaccagcctgggcaacatagtgagacctcatctcttaaaaaaaaaaaaaatagttggttgtgatggcacgtacctatagtcccagctatgcaggaggctgaagtgggaggattgcttgagcccaggaggtcacacagtgagccatgatggtgccactgcattccagcctgggtgacagagggagatcctgtcttaaaaataagtaaattaattaattaataaagacatgaacacctttatatctcttcaggttgggttttgcctctaaatcattttcatagctctttttttttgatttgggaattgtgaataagaatgtgaacttgtaccactgagaagcgtatgaggacacaattctcccatcattctgttgtctttctactcgagccacaatgaaatttaaatttgtatagtgagctagaatatcatttggccttcacttggtatggctaaaacaaataccaaggcaggtattgaaactgtaacagtgtgattacaaatgggaacacaattctgtcattgagaattttggactcaccaagaatatgttcgttgtctccctgtccagtaatccaatgcgattcccattggataaatacagacatagtgggcacttaatagacatctcaggaactgtagtttatacttgtgatactaagaaagagaatgacaaaaccacattgtcagttggggggacttaggaaactgagtagagaacgtgaatggttttgtgcatctttagatgttttgtattgaatctaataattcttaaatttacaatatatgaatcttatatcttataattatttttccatatgcttataaaaagaaattcaaggttttaaatggaattacttttattttgtagatggacaatctaaaatatgtaaatcagttgaagaaggaaaatgaacgtgcccaggggaaaatgaagttgttgatcaaatcctgtaaacagctggaagaggaaaaggagatactgcagaaagaactctctcaacttcaagctgcacaggagaagcagaaaacaggtgggtgttaactggggcacatcaactagccagaactcttttccagtagtgaaataacatatggtatgcgtgcataggaactatttttagtgctgtgttctattactgagtgctgattttttaccattaatccattttccaatttctgaattttgtgcttatcttgggatcattataggactcagaatgaagcctttttttgtttcgtttttgagacaggatcttgctgtgtcacccaggtgggagtgcagtggtgccattatggctcattgcagcctcgacctcaaagcgatcctcccacctcagcctcccgagtagctggaacaatagacaggtgccaccacacccgactaatttttgtattttttgtagagacaaggttttgccatgttgcccaggctggtcttgaatttgtgggctcaagcaatctgcccaccttggcctcccaaagtgctgggattataggcaggagccaccatgcctggcctgaatgaagccattttgaaatagaattatcgcatcttccattctataaaacatggaaaaaactggtggaactttttgctaatgagccattctaagaagagttttttatgtcgatgtccagttacgtggtttctttgtcaatagattggcatcagaattggctttggtaatttataaatagctgattctggttatcctcagtccattcgtatgggtcaactaaagggaacgggtgagggtgggaggcatatttttagttgtgcaggcaaaatagaaaaggaaagaaatgataactctccttgtcacttttatccacttatacccctggagtggcatgtgcttaccgtgtggatagatgatgacaagcataatctgactggcttctctggtctgtagtgtagcaggatgtgggtcaacagtcttccctgttggaaacagtgctcagggtagattggggcttcaggggatttttctaatggatttaatacacccatggcagctacaagttgaccaagattcccacctttatagtgttcccccaaaccctttttcatcagatcctccattgccttcagatgctttcagagtgtttttttggatttgcctggtcatctgttagaatcttgtctcccaaagccatacaacagaagcttcataatctttgctgacttctgttcatccacttatggtagacagaatggactggggaaaataaggatgtaaaaaaatgaatttatttgattggatataactgacgctgcaagaacgtttaatgagttggctgaaatatgagtttgagactttggtggattttatttaagctgtcccaatgagtgtcacaggactagaatatctgccttgatatgatatacctcccgaacaagagttgtttgaactataagaacatatacagatatatctccccaacctcttaaaaaaaaaaatcaaagaaagaacacgtctaagattatctgcttcacgatgcccattgttaactagagaagcatcaagttgcacatgatgtgttgctttactttggacaggtactgttatggataccaaggtcgatgaattaacaactgagatcaaagaactgaaagaaactcttgaagaaaaaaccaaggaggcagatgaatacttggataagtactgttccttgcttataagccatgaaaagttagagaaagctaaagagatgttagagacacaagtggcccatctgtgttcacagcaatctaaacaagattcccgagggtctcctttgctaggtccagttgttccaggaccatctccaatcccttctgttactgaaaagaggttatcatctggccaaaataaagcttcaggcaagaggcaaagatccagtggaatatgggagaatggtagaggaccaacacctgctaccccagagagcttttctaaaaaaagcaagaaagcagtcatgagtggtattcaccctgcagaagacacggaaggtactgagtttgagccagagggacttccagaagttgtaaagaaaggtatgcctaatttaaagacaaaattatttgtgttcttttgaaattccatataatggttcacatataaaaagacaaaagtatttgcttttttacattattgtgcaataatctcattgacgttcataagcaatagtctgcttttaaatggatgaggcatatgttttcctctaggatctaattacttgtgtcacattaacaaaagagctggtagattggaaaaatggctgtctaaaatctgtttggaatttgttatttgaatgctgaaaaaaattattaaattaaggactcccgtcagcgtttcctacccgttggtcatgtctgacctagctagcaggtgagctggagggtgcaccctgtgatgctggccccctgactggagccactgactacactttgttttgtttttgttttgttgttttaatcttggttttcccccaagtctggcccaaggactggtgccattctaggaactgtttgttattggttcccaactgaaacaatgtattgtaattaagtaggaatttagaaattttcatagcaacttgatatttttgtaacatccaagcacatatcatgttttctattgatttgttctcattatattatacaaaaatattattccacagcacattggaaattcttcgaaccccctctgcccccaaatatcaaaactgatgctttgccattgatggtttgaaaagcattgttctgagtaactctagcccaaaaatagttatctatctctcactggtaatttttatatgtagttaaagtgtgaaaaaaacaaaaacaaatgctgctttagttagccctgaatgcagttctggagtgtgtgttgatacactaactcttagtatccctgggattgactttctttcctgggtcatccaaagtcatgtcacttccttctgtggaaagagacaacgtgagtgagtgtgaaatcacctttagaaaggtcagtttctctcctcccacctacatgagagtgctggcctgaagtagctgttaccattttacatttcccccctttccctttctttttttttttatcttttatttttccattataccctccttttttccccaacccaattttacaataaggcctgctggcattctttagatcttagaaaaatgcaaaataaaacatctacatagaagatagaagcagaaaaaattttttctgtgtagtgttattttccccttcttctcccattgttgttttctatgtttctaataagagaaaaacctgttaagttatttgattcaatttggtgactcccagggcaactgtgaagtgtaatccattgaccacagtggctaggacaaagtattttttggagtttgcattatccttgttaaaaccacctaatgaatatcttttccactgtagatagaattggacctagcagtgctgacagttattttttttgcccttagggtttgctgacatcccgacaggaaagactagcccatatatcctgcgaagaacaaccatggcaactcggaccagcccccgcctggctgcacagaagttagcgctatccccactgagtctcggcaaagaaaatcttgcagagtcctccaaaccaacagctggtggcagcagatcacaaaaggtaaactactgtcaacatccgtctactgtttgagatccagaaaattgcagtagtacctgggtgaggattggacactgcacccccgattcaggagcgctttcaaaaagtctgaccttcttggtgtggtgtaagtcagtcagtagtgagcaagtgaccgggtgagcattacagtatcagggtacatgatctcatccttcagtcaacaggccgcttatatgtagtttgatggaaaatggcattgttacatcaaaactcagtggatttctaagaaagtttcaggcgttactgatgaaggatttgaagaggtaattttccctttcgccactggtattagtcattgtttgtttcaaactttactctcacttatctgcccccagctgctaattctttattgtttttattaatcctttactttcttaaaaaaaaaaaaagcacatatttcaatagatatctaaggaaaggaactctgtttatagatctctctattttgattgttgaggatacaacaggatcttagtgacttctgtgtaccctacaacatcccagaaaatgttatgtagagcatagagaatatttgcttaacagatctttattcctgttactatgatccataccagcagctgccatttaagtatgcaaagtatatgcattttatttatctttctcattttattgaactctcacagtaagtggtattataaaagagtgaagaacgtgagactcataaagatgtaacctcccagtgtgaacccctacttcctctcaactccacagtcttgatctttctacgataccagtgtttctcagactggggactagggggatatttttggaagttgctggaatagcttcaaagagtttgaacagtctgtgattttaccttgattgctcacttgtcagagtttgatcaagtatgcgagctgataaccttgaaccagaaaacaaagctttgaaagtgtaataacccctatttgtgtaatgtgataattcataagtgagcaagcacgttcttaggatttgggataccaaatatgaacacattggtggttacacgtgggcgatctaaagagtacaatatatttagatttcttgatctaaacatcacaacaacagatttgcaaatttctttttgttgatgtataagagctataagcattaaggaattatacttagtaataaatttgttcatcatatacattatattaaaatttttcttcaagtatgaagaagaatgctctgagattttctttcactaaagtggacccatttgttactcttattagaaatagtctaccattttgtgcaaatttttctcccctcccctaccaaattctctctgttactcacattcggatttaactttggcatgctgccaacaacaaaatactgaagtatatactggagaatatatatttaatatactgaatatactgactttccaatgaacatgagaacagcttctcttttaagcaactagtgcccctaaaccgtggagctaccaagcttgtccaaagctgtcaactacaagatatccactggatactgaatacaggagaagtcaggtttagggtcccgatatgggccataccattttctcagaagggtgactgggagccaccctttcccaaacctcagtaaaaagtaacatccattcctgtttgtctcacacttctggagatcaaacgaagtatttgactctcttagaaaaccatgacatatagctggtactctatgcctccactgtctttaggcagctcactttattgtaatctcttgtttaaatatctgtcttctgatttgcaatctgagttctgtgaggttactgattacatctatagtttatgtctatgcagtgtctgacattcaacaaatattcactgaatgaatggaactgtgaatgtcctgaagtgattgcattaatagatgtttataaaggcatgctaggaaatggtcttatgaaatcatcacaagtcattttttttctgttgcgaagaactgatggtaaaagcagtttgcatgcggcgttcagacttactatctaggaaaaagagctttgcacgctagggggcctgctctcctcactgctgttgaatctgctgagtagggagtagtaaccatggtttctgcagattttgttcagtgcattagctacatgctgttcagtaggcaccagcagttatgaattgctaagcaattttgtgcacttgcaaatgaggagagggaccttttgagagcagttataggagaattcatgattagattcaaactcttcaaaacctagcccagtaatttttaatttaattcagcattttctgagttgccctgtaaaatgcttgctgcctcatctgttaagcgtattacatcacttagttttaaaaatctagaatgaggtattatttcccaaagcagttgcttagaaactcagggttgtgagttctcctttgaggtgactggctgggttatgagagacagtttcctaggtcatttagcaagacctttagtaacatctgacaagttcaaaggggaaaaaactggcaaaatgcacattaggtaaggatcattctctattatgtcactgggatggattagctcaggaacccctcgtttgttgggaacaagggagacagcgcttgtagacctgatctcctgaacctgggctttgtgatcagttccagaggactggccagtaagctgtagagcccatcgtggatggtggtgttagttttgtggggatcttgcattttttcctacttgtgagggtcattttcactgaactacatgcatatttgccctctctctgttgctactgcagaatcatttatgagacaattagggtatgcttgcactttttttttttccctcccctgtgttattctaggaggatgtactatcttaatagattaaatacttggtgaatttgactttgtctggttatagaccattctgaagctaactaaccaacaggagggtcaaatccacagtttaaattctgatcacaactaaagtgtcctcaattcagtatcagaaattgagtctagaggggagaagccagaaagagtggacgttagccatttgattgggataaagaggcttataggctcaaactttctgtttcctatgggctatctgtctctctctttttaaatggcaaacctaaagatttgtttcttgtacatctggtgggttccagggaaaccttgtctttggaatcactatttctctttaaaaaaaaaaaaaagtaccagcaaaactttgttttatttttttccttcaactttccatggatggtaattttccattaagtcctgaccttccaaggctgcgtcttttcagtgtcctggacacactctgagggagaagtgagctttcctgggatttgatctgttggccagatttactatgtttcatgtaatgaaaagtatttaactgcctttttcaaatcacatgcttcctatggaaagaatataaatgggaaaataatttccattcccttttcttcttgcatcagaaggagatccctggaagtcagttgctcagggagtgtctgtcacgtagttacttcccagcaactgtgctggacacagatccttgtgtccattatgcaagaggcccttctcctttctctttgaaagatcttcctacttgaatcttccactcttgcctttaactttgcttaggtgaagctttcctatacttcatttttcttgcacttttttctcttttttgaccgtgtatcttttttcactactatataaatttcaatttttttttttttaaatcttgctctgtcccccaggctggagtgcagtggcactatcacggctcactgcagcttcaaactcctgggctcaagcgatcctcttgcctcagcctcctgagtagctggaactatagatgtgagccactaagcctgacccaatttcaaaaaatcttcactcaccagttaccttactctctcatctacttaaagtctcaaattttctgagatatctctttcctttaaaaggcaggatgtttgagaggggatttattctttccggactttattgttagatagctgcccttctgctctagtccaaattcaatatggaaacagtcagccataaagggagaatgattaaaataccctgaactggtccttggtcattttaaaattttccaccctgtggaggtagtattactcatttgggttacacttgttttaaacaacaggaatggctagttaggacaacagaggcaggtttttcacttaggaattcactggatgtgtaccatgtggtcaagcatgttgtgggctctagggatacataggtaaatagggcatagtctttgccatcagaggtgccaagggacgtctgatgactggttagaggttgtacctggtatcctcctaagttctctgttagatggggcctgttctcaaggaagaggaaatacttcaattatatataactcctagagaagaagaacttaatttaaaacttagtgacatagtgctttatttttcatgttgtggaaatgtgaatgtgattgaacctctaacagagatgtttgtgttgcaggtcaaagttgctcagcggagcccagtagattcaggcaccatcctccgagaacccaccacgaaatccgtcccagtcaataatcttcctgagagaagtccgactgacagccccagagagggcctgagggtcaagcgaggccgacttgtccccagccccaaagctggactggagtccaacggcagtgagaactgtaaggtccagtgaaggcactttgtgtgtcagtacccctgggaggtgccagtcattgaatagataaggctgtgcctacaggacttctctttagtcagggcatgctttattagtgaggagaaaacaattccttagaagtcttaaatatattgtactctttagatctcccatgtgtaggtattgaaaaagtttggaagcactgatcacctgttagcattgccattcctctactgcaatgtaaatagtataaagctatgtatataaagctttttggtaatatgttacaattaaaatgacaagcactatatcacaatctctgtttgtatgtgggttttacactaaaaaaatgcaaaacacattttattcttctaattaacagctcctaggaaaatgtagacttttgctttatgatattctatctgtagtatgaggcatggaatagttttgtatcgggaatttctcagagctgagtaaaatgaaggaaaagcatgttatgtgtttttaaggaaaatgtgcacacatatacatgtaggagtgtttatctttctcttacaatctgttttagacatctttgcttatgaaacctgtacatatgtgtgtgtgggtatgtgtttatttccagtgagggctgcaggcttcctagaggtgtgctataccatgcgtctgtcgttgtgcttttttctgtttttagaccaattttttacagttctttggtaagcattgtcgtatctggtgatggattaacatatagcctttgttttctaataaaatagtcgccttcgttttctgtaa

SEQ ID NO: 65 - DNA, 26668 bp, Homo sapiens
gatccctgagcgtgtggcagcagtgcggtcgtggtccctccctatgcagcctggtttctagcgtgacacgcccttgacttgaggaccatgaaccgcagccgccaggtgacgtgcgtggcctgggtccgctgcggcgtggccaaagagacaccagacaaggtgaggcctggtcgctgggagacaaggggagcagcgtctttacggcactgggggtccgcccagctgggggaacgtggacccggaactcggggcgttggctggtgcgactggctggggtgagggcggctttgcccggattgtcgcgactagagctgcagttcagaaggtctggttcgcctgagcctggagagtcaagggccgcgccttctcactgttcccaccctcaagcccaaccccactcccaaattcgcacgcacatggacttagcgggccggaaaggggtgggctgctgtttttggtgggtaataccccaaaaggctttttgacaacaccactagcttcactagcacccaagtgcattttcaagcataactgggaagagagcatgaaaactccactttccactcttgtgctccgtgtctgaaggagtgaggatgaatgtggtgtagaaaaactggtgtggaggctaagatgtcgtgaggctgggagatgaatagggaatttcttgcagtaatccaagtgagatgttgatggtagcagggaggatgagaggtaaatgtctaacacatgaaaaacctacaagagttggagactgagactgtagcagaggtgacgattacttaagtaatttcctcattggatactaagtgctttctgtaggccaggcattgttcagggtcctgggataggcatgaacaaaatagaaaaagtcccgccgggcgcggtggctcacgcctgtaatcccagcactttgggaggccaaggcgggcggatcacgaggtcaggagatcgagagcatcctggctaacacggtgaaaccccgtctctactaaaaatacaaaaaattagccgggtgtggtggtggatgcctgtagtcccagctactcgggaggctgaggcaggagaatggcgtgaacccgggaggcggagcttgcagtgagccgagatcgcacagctgcactccagcctgggcgggcaacagagtgagactccgtctcaaaaaaaaaaaaaaaaaaaaaaaaaaaaaaatagaaaaagaccctgcctttatggagtcgacatgtgcacatatagtatgtcagtgggagttaagttctaccaaacagtaaaaggggttgatttgaatgtacttgaccaagataatgatgatggtgataggaatgtgattggcttggacatggagttaacaggaatgacggattggagtagtcccagtagttgtaaattccacctgggcacagactgttttatttactgtttctccagggtttggttgatggtaggcactcggtgttacatttatagaatagggacagaaaattatttcatataaaaattgttggaggaaacagttattaaaaagagacatatagcctttcaaatacttgaagactgatttccaaatgaatctacacattgaaaatctcacacttggggaggttcaaaaaatactgatgtttatgtcccactcccaagtattgtgttgtaattagcctgtagtgtagcctaaattatttaagattccctaggtgattctgatgtacagataagtctgggaaccactatttgaagagtttataggaaaaagagattgaatttatgaaatcctagaaaggaaaacttggaccaaatgagagaaattggacaagccagttgcggtggctcgtgcctgtaatcctagtcattcaggaagctgaggtgggaggatcgcatgagcccaggagttcacagctgcagggagctgtgaccatgccacatctcttaaaaattaaaattaaggccgggcacggtggctcacgcctgtaatcccagcactttgggagcccgaggcaggtggatcatttgaggtcaggagttccagaccagcccggccaacatggtgaaacccagtctctaccaaaatacaaaaattagctgggcgtggtggcgcgtgcctgtaatcccagctgctcaagaggctaaggcaggagaatcgcttgaacccgggaggtggaggttgcagtgagccgagatggcgccattgctcttcagcctgggcaacagagcgagactccgtctcaaaaaaaaaaaaaaaaaaaaaaaaaaaaaagaacagaggactcatgtaagggtgatttgttaaggaatgcccacagggaagagagggagaggtgccctagacagagtcagagatggttggaagaaaaccagacgagtaccacacagccactttaccaaaaccagtctttggagttttaagactaagaggtggagtagaatgagcatgatttttgaagtttcaggtagcgagagatcttatttgtaagaatctataaaatctatattttttaatatagagtctggattgatgtttgattcttatcttgatgacattgcttggcgttacattttacatttgtttgcaaactactttttaattcaaataatttgatgatttccttacacatattgtaatgaaatctttgctctcttacaggtagagctgagtaaagaagaagtaaaacgcctcattgctgaggcaaaggagaaattgcagtaagtttaggaccagatgaaatctatatcttaaatgatgatgaccatgtggtcttgttattagaaggtagcatttgggtgattctctttttctttctgtgctcatagagaagaaggtggtggcagtgatgaagaggagacaggcagtccttcagaagatggcatgcagagtgcacgcacccaggcacgcccaagagagcccctggaggatggtgacccagaggatgacaggacgcttgatgatgatgagctggctgagtacgacttagataaatatgatgaggaaggtgacccaggttagtttatccacttctgatggtttgtaattacaagctcaatatgttggatcatgtttgtggtgttccaaagctttactcttagattttattgttcttgacatcagtaagataatctggttgaagacttgggcagacagcatgattcctaaactagtttagaagataaactctaacccactaagatacaaatctaggatctaaaaaaaaaagtactgtgtattttattgcatatatcaggtttaataatctgtaacccacttgtgagtttttgtatgcagttataatgctatggtgtgcttgaacttatatccatataccttttcctcaactgcagtcagtcttctcacaatacagtagtccccccttatccacggttttgctttcttcggtttcagttagccacagtcaactgcagtctgaaaataagtgagtaaagtacagtactttgggagagatgactttcacataacttttattacagtatattatcattatttgattcctaggtacatataggaaaaacataatgtatataaggtttggtactatctgtggttttagaccaccactgagggtcttggaatgtatcccccgtggataaggggggactactgcctgcattttgagatgctgttcttggagataattagaaaaagaggccaggtgcacgtgactcacgcctgtaatcccagcactttgggaggccgaggcaggtggatcacttgaggtcaggagttcgagaccagccgggccaacatggcgaaaccctgtctctactaaaaatacaaaacttagccaggcgtggtggcgcacatctgtaatcccagctactcaggaggctgaggcaggagaatcacttgaacctgggaggcggaggttgcagtgagccaagatcgtgccactgcactccagcctgggtgacacagtgggactccatctcaaaaagaaaaaatcatgggtgggaagagaaaaaggaaatagaacagaagacagattagaagtagaagtttgtatagaaagcctcgtggggaataaagtgagctgagatgacaactacctatattgctcttctggggaaagtaggtataacgataaatggaaaaggagctgacaaagctcgctttgtttcttttggaatgtgctaccctaggtggcactaactcctaatcttggggtttgagaaataggcatttggcacactgagcaggttaagtaagttatttacttaacttgtaaatcccagttagtctgcatatttgggagctgaagggactcctgacagctagaatcagctactcccaagttataaaatcaaaatgtagatgatcggaaacaaaaattaactcttaatacaaatgttatctgcaacaaagtaaaatcacaactacctgttaaattgatggttaaaatattacataagacatagcagagctgagcgtggtggctcatgtctaatcccagctacttgggaggctgaggcagcaggatcgctcaagcccaggagttcaaggctgcagtgaactatgatcacactgtattccatcctggatgacagacaccatgtctaaataataaaaaagtttaaaaaagttataatcaggcacttaaaaatatcagtatctgttagaatatcgttgaaatgctgagtaaaataatatacttttttttgtgtgtgtgagacggagtcttgctctgttgcccaggctagagtgctgtagtgcaatctcggctcactgcagcctctgactccctaattcaagcaattttcctgccttagcctcccgaatgctgggattacaggcacatgccaccacgcccagctaattttcgtgtttttagtagagacagggtttcaccatgttggccgggatggtctcaatctcctgacctcatgatccgcctgcctcggcctgaaaaactccagcaatggggagagggagagtcgaaaatgacattgaggaaatagtgttaactgttaaagcaaggtaattcaaggttcgtgatgccctctccacttgtgttcatttttcaaaatttctataatacaacatttaaaaaaaaatcagacatgtacgggttgatggtgagcactgtggggtatctggaagagcagtgtagttggagtgtggaaagaataggacatgagacatggtctgtgttgggcacaggaagatcagtaaacaacagacaggcaatgagaaatgagtaagtaggctctgggtagagatgggattgaccaaagtcaattagctgtcttgtcctggatgcctcaggcagggcatgtttgagcacagtagataacattgtggaggcagaactgagccaagtaagaggaagattcagtggaatgtgacaaactataggaagcctttagtgccagagcaatattgagcttgacctgatgtatgtgatgatacagcctggaaaaagacccaaaggaggggaaatgctcggcaagttgatctgcatgagtgaagcacagagaaggtggatgggcagttgctgggaagtctggaagaaagacttaattgggtcccagtaaacttagaataccaggcttagcaatctgtgtgttctctgtgcgagaggaaatcattaaaggtttttgagcatggaacacataataatggaacatacactttaggaagttaactctggcaacagtggagaacaggttggcagatagggtgaatctcttagaggagcagaaacttaagataaattaggccagaagcaatgagggcctggcttggggcactaggaatgaggaggaggacatggaagaaagggattgcagaggtagctgggagtttagcatcatcctagtggatgaactctcttccagaattggtacgtctggtttccatcttattatcgctggtgtacctcttttctttcagacaagaagtaaccctgatttcctcactccatctgaattgatttttattgtcatttatccatttttccatctagatgttcattcctccgttttcctcattcgcttggccatctgtcctatggattactattaacttcatttttcattatctgcagtacttagaaaggaatcattacctccatttaccagcggcacacagctggtgaaagacggtgctgagttttgaccactctcgggctctaaagccttcattcttttcactgcatcttttctatagatacagtccagcagaggatagttttttctattggactctgggttatgggctccaaccttgttagggacagagtgccatagaaatacagagaaacaaataacccagcctggagagatggcattcagaatcagctctttctcgtgtagcagaaattgctttctctgttgcatatcagatgtttaagacctatcagtcctgcctccttaaagtggcttcctctaacaattcagtgtatcttccttttcctgagttatcctttgttaccatcgtagatgtgccataaaagaataatttaagttcagtggaaaaagcatactgcatttcttttttcatatgccaataaggcatattagcatatcagaacacgtgcagtagagcaacctggttaattttttgaaacctgtcatttctcaattttatttgaccaggcaacccttatttattatgttgatttcagtgtttcagggtcattttatttccaggtcctcaaggctgcctctccgtatcaccttcaatcatgaatgcagggagctagctagagaatctcaagagagttctcatattttctaaaagggtctaattccctgatacagttctttcattggaagattgtgaattccaagactgtctgaaatccattccaaaggtcaaatacaaaaatggcttttaaattcctgctgctgcttacgtagtttcctttcccaactctagatgatccagagttagttataaaatagatgattgcatctaagtccaagaatggatgtcataggaaatatgtttttgtcaagatgactattttattattgtagtttgtcaatttttcttacagatgctgagactcttggtgaatctctcttgggtcttacggtctacgggagtaatgatcaagatccttacgttactctgaaagatacagtaagtatttacatcttttttctaattatgctcttaagtgttcaaaaaaccttactggctctctgcttctagtcaatgacatttttttcctctcacttaggaacaatatgaacgtgaagatttcttgattaagcccagtgataatcttatagtttgtggccgagctgaacaggaccagtgcaatttagaggtgcatggtaagtgataaatcccttattaaaagattttctaagtgatggtaaaataataagtgaaatagttaccatttcatttttaggtgccagatcctattgtatctcatttaagttggttacatagttaacttttacacaggtggccaatttcttggttattgttctgggtatgtgtagtccagtacatcactttggtatctgaattttctatggaaataaatcccctggaaatttttcataggggtgtttttttttgtttttatatataaacagggtctcactgtgttgcccaggctgtctcgaactcctgggctgacgtaatcctgatttggcctcccaaagtgctgggtgctggattacaggtgtgagccaccacacctggcctcatagaggtttttaatcttttatttaaatgtgattgcctgtttttcactcctctcctactcctgctataaaaaacctggaagtaaaattatatataaaaatacaaggctgggtgcggtgtctcacacctgtaatcccagtactttgggaggctgaggtgggaggattgctcgagcccatgagttctaggctacagtgagctgtgattctgtttgctccactgtactccagcctgggtgacaaagaccccatctctaggggagaaaaaaatgtataatcccatttccctgagttaataacttgccaccttggttttttactcaatttttttttctggctactttttctttatgtggattatactggatagacaggtttttctcatgttttttaaatagagttatttcagatatttcccctttgcaaaacattttattttcttcctaataattcaacacaaagggccacgtttcttttttggaaccaaaacatcgtgatcacctttcttacttaaggaatatttgtatcaaagccagaagcggatgctttgcagtaatcagaagtaggcatgaaaataggaatttttaaattgtatttttaaatgttgtttttgatttaatattaattgaatggcttgcctcactttggtgtttttaatgtaaaatctgttttttatatgctaaaagtagacttgcacaatgtctggcgcactctgcctacagattctccgttttgtttttcttgtcccttccactgcgctcatatcctcagacaagtccatccttgcccgatactctcctcccccagcagtcttcagatcgtcttgaaactttgaagattcgaagagattattaggctgataagtccttttgttataggaaacacagttgcacagcttgaaaaaataaaacccttaggcttaatgtttatcgccatcttctaggttgcttcatcatggcttccattgattagcttggatttctgttacctcttcagaatctttaaggctgtccgtgggaagcctatagattaggcccattttatctcatggctcattgtgatctgtttatgcatagcaggcactttaatgtgaaattattctttctaactcttgatatctttgaacttttacatatttcaaatgaaaaccatttgtttactttgcttttaagaccaattctaatttcaaaaaattgagaacctattagagttttttttgtcatcatcgatttttttatgcattcttacctgagaacttaacagtcattcctttgaactcaggatcaaagaggagctgagaaagaagttaaagctgttatatttccatttccttctcagttaggttattatagatatactttattatttgggtttggaaggaatctccaaattgcccagtatgtgtgtgcaagaataacttcaaatttatattctaaaactgatccgaatattgatctcacgtggttaagagtatattttaaagtattattaccagttgctgggcgtagtgactcatgcttgtaatcccagcaatttgggaggccaaggcgggcggatcacgagttcaggagatcgagaccatcctggctaacacggtaaaacccagtctctactaaaaatacaaaaaaaaaaaaaaaaatcagccaggcgtggtggcgggcgcctgtagtcccagctactcgggaggctgaggcaggagaatggcgtgaacctgggaggcagggcttgcagtgggctgagatcgtgtcactgcactccagcctgggcgacagagcaagactccatctcaaaaaaaaaaaagttattaccaattttatgtaaaatgtaagctgagtatatcgaacatggttgaggtttttgtagaaccacagtctaataattttgaacatgaattctcatcacagggatgtgatagagcattacacaaatctgctaatcccaggatctattccagaagcagcaatctgaggaattaaaaataaaatccttaatttattatatatttacctccttcttaatacaaagcatatggggaggggttctgactagtgggttctgttttatcagtgtttcactgtgtaatttttaaaagacttcttactcattgattttacaatgtttttgctgcttaacattacagctgtgaatattaaggagctgttgccatattccaaaagtatgtcctcaggagctttgtttacattgttcatcttcataaaccttttttaaaaatattaagagtaatttttgataagcatttagatttccaaatatgaattatttctctcccatgctatttttggtttgttctttttgacttataatcagctagaccattaaaagataaaataataactacttcttgtagttatgaacattatgaacttatgaacatttgttttctatgaatgacctagaagacaggaccatttatctgacaaggatgcaggtggactatcagatgtcagtgttcattttctcctgtggggtatgccacaagatggcactgtattagacatgcagaatttttgcctagtcatgatattggaatctttttttttttttttttttttgagatagagtctcactatgtcgcccaggctggagtgcagtggtgcgatctcagctcactgcaacctccacctcccaggttcaagctattctcctgcctcagcctccctagtagctgggactacaggcacgtaccaccacacccagctaatttttgtattttgagtagagacgaggtttcattgtgttggccaggctggtctcgaactcctgacctcaagtgatccgcccaccttggcctcccaaagtattgggattacaggcacgagccactgcgcccagcctggaatctctttataatatcagatgtctcactttaaagcacatggctcacgtacatttaatagaatttgtttttttgagcgggatgtgatttttgatgactcattctgatacattaaagtctcttttcccaatcttttcagtttataatcaagaagaagactctttttatgtacaccatgatatactcttgtctgcatatcctctgagtgtggaatggctgaattttgatcctagcccagatgattctactggtaattagaaaacttaaggttgttcaatgatttccagtcttatgtattttctcctagctccataaattatgtattctcttgaatgttttcagaattgttgctgatattttctgaagttactgttattttatgaagttatagagttcttaacacaccatcactttattgtttggggttcataaatccccagacttcaggtaggctaaggaggtagctgctctactacaggctgaaggacagggcctgaagccttttggactgtagaactgtaaaggtcccataaagactcagtataaatggcctgatatgtgagatgttaccagctagagttcagtggcataacctgttttagaaaacataagctaaaaccgaaatgaagaggcttgtcacaagtaattaggttttcatgttagtctttgtaaccacatctgcacactattagttgcccctgtccgtactttttaataaaggtaaacactgtttatactgtcttacgtcttgtttgcacaccttgttcacattcatgatctgatctgatcttcatccccacagcaccccatgaaggaggacgggaggagggttattctcgttatataaatgaaaacactggggccaagagattgagcctttcctactcaaattgtggcccaaagaccagcagcagcacagcatggttatcacctgtgacctagttagaaatgcccacccagaaccacctgaaatacaatctgcatttgtaacattcagatgccgcatatgcatataagtttgagaagcactgctctaaagcatttttcagttaatctacagtataatgtatttgattagaagttctgtatgtctttttttgtgtaatcatacatgcattgtttcctcccataggaaattacattgctgtaggaaacatgacccctgttattgaagtgtgggaccttgatatagtggactctttagagccagtcttcacactcggaagtaaactttcaaaaaagaagaaaaagaaaggaaagaaggtaaagaagttaataaatatttaaactctaatgacagaggtaagtttactcgggagtaggggtgaagggtaagaccgtacactttttcaatcaggtattcttggtgagatggggtaggtagttatgaaattattgtaatttttagttttgaaaaggccatccaaagaaaacttatttctgattacataaaacctccattatcatgttgttctttcttacacaaaactagttcaaagctagtatattaatatgaatagctactatagatgaaggactttcggattatgagcctcctccaaatacagtagctatttatacagatataccaaccttgaactttaaaaaaatttctgttatcatgttgaattctaattatccatgtattaactcctgcagcttttaaaatcgttaggttttatgagggttgggagctatattgatacttgtataattacagtacctagattaagaactgctaggccaggccacgcacgtggctcactcctgtaatcccagcagtttaggaggctgaggcgggtggatcacctgaggtcaggagttcgagaccagcctggccaacatggtgaaaccctgtctctactaaatatacaaaaattagccaggcatgttggtgtgttcctgtaatcccagctacttgggaggctgaggcaggagaatcacttgaacctgggaggcagaggttgcagtgagctcacaccactgcactccagcctgtgtgacagagcgagactctgtctcaagggaaaaaaaagaactgctaggccagtcatagtagctcacgcctatagtcctagcactttgggaggccaaggtgggaggagtgcttgagcccaggaggttgaggttgcagtgagccatgattgtgtgccactgcactccaacctgggtgacagagcgagattttgtctctaaaaaaataaactactatagtttcttccctgttccttgtaatgaaatttttttctttatttttcttttttaaagaggtaaggtcttgctctgtctcccaagactggagtgcagtggcacgattatagttcactgcagcctgaaacgcctaggctcaagagatcctgggattctcctgcctcagcttcctgagtagctgggactataggcgtatgctgccatgcctggctaagttttgacttttttgtaaagacagagtttcgctatgttgcctgggctggtctcgaactcccggcctcaagcgatgttcccacgttagcttcccaaggtcctgggattacagtgtgggccgctgcacccagcccctgtaatgaaattaatcatgagtctctaacagggagacaaggttttatttattttattcttcaaaagtttatataatatcaaaacaataggtcgggtgcagtagctcacacctgtaatcccaacactttgggaggccgagagtggatcatgaggtcaggagttcctgaccaccctggccaacgtggcaaaaccctgtctccacaaaaaatataaaaattagctgggcatggtggcatgcgcgtgtaatcccagctacttgagaggctgaggcaggagaatcgcttgaatccaggaggtggaggttgcagtgagctgagatcgtgcaactgcactctagccagggcaacagacaaagactccgtctcaaaacaaaacaaaacaaaataatcttaaggtttaaagaattttgcagattaatatattcagttttattatgagggggactttaatacaaaaaataattaaaacaattattacagagttcctcagcagaagggcataccgatgctgtccttgacctttcatggaataagctaatcaggtaaaaagaaataacatttgaatgattgtaaaagactgtagccattgtgatcttacctcatgcctacactcatctctttatttgtgctgtggacctttgtgtctatcttcctttcttgtaggatgccctgcttgcaggcaggagctctgtcatctgtttctttgcatcctccaggtcacctgccagctcatcactgtgggtgctcattgcatgtttggtgaccaagtgccctctctccaccaccactggaaaaaaacagggtgtttggcagtgcccatggtgcagtaggattgtgtttcttcccaggagacatttttctctgtttagttttcacatctcaccacatactcttttattcttttttctttaaattatggcaaaatacatataacataaaagttaacacttgtattagtctgtcttcatgctgctaatgtagacatactcgaggctgggtaatatgtaaaggaaagaggtttaattgattcacagttctgtatggctggggaggcctcacagttatggcagaaagcaaatgaggagcaaagtcatgtcttatatagtggcaggcaggagaaagggcatgtgcagaggaactctcctttataaaaccgtcagatcttgtgagacccattcactatcatgagaacagcacaggaaagacctgtccccatgattccattaccttccacctggtccttcccacaacacatgggaattatgggagctacaattcaagatgagatttgggtggggacatagccaaatcctatcaccatttttaccatttttaagtgtgcagttcagtggctttcagtacattcacagagttgtgcaaccatcaccacaatgcatctccagaacattttcatctccgtactgcagctctgccctttaaacactgactccccatttcccccacccccagccctggcaaccaccactccactttctgtctccatgaatttgactaagcatctcatatgaatggaatcatacagacttacttctttgcaactggcttatttgacttaatgtcttcaggttcagtcatgttccaataagtgtcagagtttcttcctttttaaggctaaataatattccattgtatgtaatgtatgttacccgttcatttacgtgtggtcacctggattgcttcttctgccttttggatactgtgaataatgctgctatgaatgtgggtgtacaaatattcaagtccctgctttcagttgttttgagtatgtacccagaagcgttattactgaatcttatggtaattctatttttaattttttgaggagccaccatactattttccataatggctgcaccattttacattttcaccaacaatgcacacaagggctctagtgtctccaaaatttgttattttctgtttttcataatagccatcctaatgggtatgaagtggtatatcattgcggttttaatttgcatttccccccctttttttaaggtaagatgggggtctatgttgctaaagctggtctcaaattcttgggctcaagcaatccccccgcctcagcttcccaagtcacttggagtacaggggcttgccaccacacctggcttaatctgcatttcttaacgattagtgatgttgagcatctttgttttgtgcttattggccatttgtgtatcttctttgggagaaatgtttttcaagtcctttgcttacttttttttgagacagggtctcactctgtcacccaggctggagtgcagtggcacaatcactgctcactgtagtcttgaccttctggggctcaggtgatcctcccacctcagcctcccaaagtgctgggataacaggcatgagccaccaagcctggcctccctttgcctgttttttgtgtttgatgttgaatttttggagttaaaactaactcctactaccaaatacatgatttgcaaatattttcttctattctgtgggttgttttttcactttcttggtgctatcatttgcagcacaggtttttcatgtgatggtgtctactttatttcttttgttgttcatgcttttgatgttgtatctagcaaaccatcgcttaagtcagggtcatgaaggtttacatgtatgttttcttctgagttttatagtattagctcttacattgaagtctatgatccattttgagttttttttgtgtgtatggtgtgaggtaggggtccaacttcattctttttcatgaggatgattcatttgtccctgaaccatttgtttttgttttgtgtgagacagggtcttactctgtcacccaggctagagtgagtggtgtgatctcagctcactgcaccccccacctctggggttcaagtgattctcctgcctcagcctcctgagtagctgggattactggtgcatgccaccatgcctggctaatttttgtatttttaatagagacagggtttcaccatgtaggccaggcttgtctcaaactccggacctcaagtgatctgcctgcctctgccttgcaaagtgctgggattataggcatgagccaccgcgcccagccccatttgttaagacttttttccccattgaacatttaattaccttagtacccttgtcaaaaaccagtgactataaatgtttatttctggactgttagttgtagtccattaatctgtatgtccttatgccagtagcacattgttgtgattgctgtagattttcagtaagttttgatgccaggaaatatgaacttgccaactttgttctttttttcagtactattttggctattctaggttccttgcatttttagaatcagcttgtcactttttttttaagtctaatactaataatagtagtacatcctgttttgttttgttttgagacagagtctcactctgttgctcaggctggagtccagtgacgtgatcttggttctctgcaacctccgctttttgggttcaagctattctcgtgcctcagcctcctgagtaactgggattacaggcatgcgccaccatgcccagctaattttttgtatttatagagaaggggtttcaccatgttggccaggctggtcttgaactcctgacctcaagtgatccacgtgcctcagcctcccaaagtgctgggattacaggtgtgagccactgtgcctggctgtgaatcagcttgtcactttctgtaaaaagaaagaaaaaagtcatcagagattttgaaagagattggttgaatctgtagatcagtttatagctccatctgtagatgtaatatttccatattaacactattaagtcttctaatacatgaacatggggtttctttccacttatttagatactcttgtttcctttcataatcttcggtagttttcattatgtaagtcttacatttcttttgttaaatttattcctaagtattttattctttctgatgctattgtaaatgcaatccttttctcatatttaatgctcttgacttttaaaagattacctgattggattcttccctttctcagaaatgttttagcaagtgcatcagctgacaacactgtaattctgtgggatatgtccttggggaaaccagcagctagcctcgctgtacacacagacaaggtatggtgatttagttgatcacagcggttcttaaaaatcggacacaaatattggctaaaaataatcccaaacgtttatatatggctttgaaaataattttatctggcttgcggcatgctttcacatgttatctcttaggattttcacaaagccctgtgtggtaggtataatgcccatcttagagatgaaaaaatgggtacagaaaggtacggttactaggaacattagtgccctgtaacatatttatagaggctcctaaaaaaggatgaggtctgtcagtcacaatggtaacacccattactgtgttattccccaggaatctaatgcagattattttgggacttctggagcatggggaattcaccagatgggtttgactacttccctttttcttctgagtatcttctaacatttgagggactaagtattctgccaaacagtttggggaaactacattttctttaagtgccagcctttatgtgggagcatggtttgccctttgattatgcagtacatttatgtttcttttgtttactgtatttcagagggacgcatttatagaaatactgtcaaatagattcttaccacatgttaggtaattttacgaaaagcaaaccaacagagatctctgcatttatgtttcctccctttaggtccaaacactgcagtttcatccatttgaagcacagactctgatttctggctcatatgataagtaagaaagcacagcaagaatgattgctactctgtttttatcctctagaagtcattttaagagtatcacttggtacccaggcagaatgtatccttgaggccacctttatgtttaaattatttgcactacttatttttccttttaactctggtcctttcagtctacaacggaacatgattctgtcataataatataactgtaggaactagcaacttctttggcttttagaggctgtactttgcctttatgggaagaatttccatgtcacatgacagagggcatggatatagggagacatgaagaactggggccactgtggtcaaccacggggtttatagctcatatcagtgctcctttttacagattgggtctacaggtaggagaaacagatagtagaagccaaaaccaactttgcagtctttattttcatttcttatcctcttgaagcatgatatgtttacatttcttgtgattcacgcagaattacaaaagtgcatcccttgcttcccctaacatgataaactgcttatggagagtaagtgtgcctaagacatgagtaacctggctctgagctcggccagagaaggggaaattagaaattgtcctgggcttttggacatagagaggattcttcttgcgagtggaagatttgacctggagaaggtcaaaaccactgtaacgttagaggcaccagtgccttcaagtgttaagatcagaatccaccaattactgaaactcagctcattttttttctactttatttagaaccttaaaacaggctttaaatgaatcttgatttcacagtgctattttattactatttcattataaataaaacatataggagaattgaactcttaaaaccctaactttgcctgaatgtgtctaggtcagtggctttgtatgactgccgaagtccagatgaaagccatcgaatgtggcgattcagtgggcagatagagagagtgacttggaatcacttttcaccttgtcatttcttggtaagagtacgaatgttgttgttttgcttttctaggttgctaatgactttttaaattccatagtagagagaattatctgaaaagctttttctgttttaacagtatgaagtatttgggtttagggttgaaagcataaggtgtttttttttaaataagagaacggctcttacttaaaaagcagtgaacatgtaaatgattttgctggttgccggccattccaaagtgtgccacgttttatttaatgattttgatcattttattgtagtgttgtttgaaatactaagcatagttagtattttttgttttttttaatggctaaatcagtccaagatgatattcttttctttaaatcctcatgcttaaatggatctctagtgatgagaatgctaacctgttaatttgtagcactatctcccaaataggaaaaaaagtataagacctctgtctaaatacccttattatctaaggaggacaatgattttccacatagcatccaaagattccactgacatttcagtacatgtaaaaagaaaagcccagctttcatccagagcaaagattagttaaatttgttgcccagttttcctgaagtaaatatgtagtgctttgcaaaggtgagaaagagtttttttttttttttaaatttaagttctaggatacatgtgcacaacgtccaggtttgttacatatgtatacatgtgcgatgttggtgtgctgcacccattaacttgtcatttacattaggtatatctcctaatgctatccctccccctccccccaccccacgacaggccccagtgtgtgatgttccccttcctgtgtccaagtgttctcattgttcaattcccacctatgagtgagaacatgcaacgtttggttttctgtccttgcgatagatagttttctgagaatgatggtttccagcttcatccatgtccctacaaaggacatgaactcattcttttttatggctgcatagtattccatggtgtatatgtgccacattttcttaatccagtctatcattgatggacatctgggttggttccaagtcttttctatcgtgaatagtgccacaatatgcactatatgtatgtgcacatatgcacatacgtgtgcatgtgtctttatagcagcatgatttataatcctttgggtatatacccagtaatgggatggctgggtcaaatggtatttttagttctagatccttgaggaattgccatactgtcttccacaatggttgaactagtttacagtcccaccaacagtgtaaaactgttcctatttctccacatctctccagcacctgttgtttcctgactttttaatgatcgccattctaactggtgtaagatggtatctcattgtggttttgatttgcatttctctgatggccagtgatgatgagcattttttcatgtgtctgttggctgcataaatgtcttcttttgagaagtgtctattcatatccttcgcccactttttgatggggctgtttttttcttgtaaatttgtttgagttcattgtagattctggatattagccctttgtcagatgagtagattgcaaaaattttctcctattctgtaggttgcctgttcactctgatggtagtttcttttgctgtgcagaagctctttagtttaattagatcccatttatcaattttgacttttgttgccattgcttttggtgttttagacatgaagtccttgtccatgcctatgtcctgaatggtattgcctaggttttcttctagggtttttatggttttaggtctaacatttaatttaagtctttaatccatctggaattaatttttgtataagctgtgaggaagggatccagtttcagctttctacatatggctagccagttttcccagcaccatttattaaatagggaatcctttccccatttcttgtttttgtcaggtttgtcaaagatcagatgattgtagatgtgtggtattatttctgagggctctgttctgttctattggtctacatctctgttttggtaccagtaccatgctgttttggttactgtagccttgtagtatagtttgaagtcaggtagcatgatgcctccacctttgttcttttggcttaggattgtcttggcaatgtgggctcttttttggttctatatgaactttaaagtagttgtttccaattctgtgaagaaagtcattggtagcttgatggggatggcattgaatctacaaattaccttgggcagtatggctattttcacaatattgattcttcctatccatgagcatggaatgttcttccatttgtttgtgtcctcttttatttcgttgagcagtggtttgtagttctccttgaagaggtccttcacattccttgtaagttggattcctaggtattttattctctttgaagcaattgtgaatgggagttcactcatgatttggctgtttgtctattattggtgtataagaatgcttgtgatttttgcacattgattttgtatcctgagactttgctgaagttgcttatcagcttaaggagattttgggctgagacaatggggttttctagatatacaatcatgtcatctgcaaacagggacaatttgacttcctcttttcctaattgaataccctttatttctttctcctgcctgattgccctggccagaacttccaacactgtgttgaataggagtggtgagagagggcatccctgtcttgtgccagttttcaaagggagtgcttccagtttttgcccattcagtatgatattggctgtgggtttgtcataaatagctcttattattttgagatatgtctcatcaataccgaatttattgagagttttagcatgaagggctgttgaattttgtcaaaggccttttctgcatctattgagataatcatgtggtttttgtctttggttctgtttatatgctggattacgtttattgatgtgtgtatgtatgttgaaccagccttgcatcccagggatgaagcccacttgatcatggtggataagctttttgatgtgctgctggattcggtttgccagtattttattgaggatttttgcatcgatgttcttcagggatattggtctaaaattctgttttttcgttgtgtctctgccgggctttggtatcagggtgatgctggcctcataaaatgagttaggggggaaagagttttttaaaaacagctttctcaaaagatgtggacaattttagtaagattcatgaagtaatgattctgagatacttaatctcaattctgcacgattagtagaggtgcatgctgttctagccaggcagcctgaagcctgacttatttttacaatgatcattccagttgtacttgaatgttgtgttgtacttcggctctcactcttcaggtacgcaacttccagagattatttgctaacaaatggtcatatatattagaatcccaaatatttagggaagtgagaggttaaagtagatgaaatggttcacctgcttccctctcatctcaaaagaagagccaagccttctcttccctggcctagcagtcagactgcctcagccgtcctttctttatccttttttcttgtactggctgttgcccttggcctgtatacaggctcaggtttctgtctcccatttttggctctgtatctgtctcttaattccttcatttcttctttctttcttgacagtgtaacaatgcactctaatctgcctttcattcctaagttccttatctgattgaatttctctgccacactggtcgatttgactgttggtcacgccttggttccttgacactcttccctatcccttcttccctctctgactcacttctgtggatgcttcctcagcctgcaacttgagtagccatgctcaccaggcctgtgttcacgtggatgtaactatggcctcttttcttctactgctctagccccattccagaccattcaccacagcttcatactcatatccagtagacatgtcaactgaattagcccatgtgagtgcaaactcaggtcgtccaaaagtaaatgatttctgtccatgttaatttttcataagttccaccagtaagtcatatagctgattttcactatgacttagactttttacccattgttagattttgtgacgtagcatgaccttgcccatcttttactctttctaggccagtacagatgacggctttgtatataatttggatgcacgttcagataagccaatttttacacttaatgcacacaatgatgaaatctctggtgagcaagagtaatgcttctttcatttttcttaacttatgatgaagtaaatctgtatttcaaagcgaaagtgtctaaacttatcttcctttaggtcttgatcttagcagtcaaatcaagggctgtctcgtgactgcttcagctgacaaatacgtgaagatctgggacatcttaggagataggccaagtctagttcattctagggacatgaaaatggtaagaatctccctgggtatctgttttttatttattctgtttctgaccttgtctttttctggaacttgtgttgcgtgtttttctgttggaactattgcattaacaaatatggatgtgttggggaagtgaattttgagtttagtcaaatttggtgggattttatgacttagaacgctttgtggggaattcagtgactggttcttttccaactcacatgattaacagttgcttggtaaggctggggagagggttttctaggacacaagtgaaatggctgctttttttttttttttttaaaaccctgaaatcaagaccatcccaagaaatcttgaacctcagggcaccgtagctattagggtcagtttatgtatctttatctctttgcataactagttctgactacactgaaacaaattactatatagtaggaaaaatttagaaataaccagattcactcaagaaatatttactgagcacctactgtatgccaaccactgagttatataagttagactgcagacacagtaacactgcacagctgttgaaaattgtgtatgaataaatatatataaatataatggaaaaacaggttacagaagcaatttttgtagtaccatctcatgcttatttttaagtgcataattgcctaaatgcttacatttaactctagtagattatatcccagaacataaaccgtggttacctccctgagagattttcatatatttttcttgttcatattttctataacaaatatatattacctattaataaaaatgtaaaaaagaaaacaaagtttaaaaatgatttaaactggcatcattgttattgtttaaaaggacagctaaagtttctggaaatacatggcacattaggtttgttaggaaatccctaagagacagagtgataacgaagatgagtggcctgagtggtcagaagttgcagatatcattgtggaagaaccagcatgctgcgcttgtctggcttcatattgtagtactagcccttctgacttgactctgagctacctttgcagtaggcttgaaagtgagaatcataagttggttttgaataaccatttaaatcatagattcttagagacaacagtgaggatctagatattagcgctttctgaagagattgaaatcaccatcttcctgttctctctctagggagttctcttctgttcttcatgttgccctgatttgccatttatttatgcctttggaggtcaaaaagaagggcttcgggtctgggatataagcacagtctcttcaggtaaggatttttagttctctgcacacctccccctgcccctgtaaaaaaaaaaaaaaaaaaaaagacagggtctcaccatgttgcccaggctggtctcaaactcctggcctcaagcaatccttggtcctcagccttctgtatagctgggattacaggtgtgagccatcatgctggcctctcctctttctgaatgagttctgtaaggactgacacagaatgtgtgacttgaattgtttctcagcattttggctaagaccaagtgcagaatgtgtgtcctgactacatcaggaagatagcaaaagtagtgtagtctttttaggaaagagacaagatcagatgtaattggtaatgtttgttcatgttcacaaataagtttgtcttcacacttttaagtgtagatcatttaaggccgagaccagctcggttggggagaccctaacccagtggcgctagaggaattaaagacacacacacagaaatatagagatgtgaagtgggaaatcaggggtctcacagccttcagagcagacagccccgaacagagatttacccacatatttattaacaccaaactagtctttagcattgtttctataggtattaaattaactaaaagtatcccttatgggaaacgagggataggccggattaaaggaatgggttaggctagttaactgcagcaggaacatgcccttaagacacagatcgagatcgctcatgctattgtttgtggcttaagaatgcctttaagcagttttccaccttgggcaggccaggcgttccttgccctcattcgtaaacccacaaccttccagcttgggcgttagggccattatgaacatgttacggtgctgaagagattttgtttatggccagattttggggggcttgttcccagcaatttaacaaatacatatcttaaaattgaaagatctttggggaaagctggaaagaaatatagcatggtctcaacaaacagccctctcccccacagttaccagtgtgaataaatccaccgtttgctcaactataaaattctacaaaatccaactttccggaaggggccactcctctcccttcaggggatcctggctgcttatttattactttgaggtagtctggtgcgttctacaaacacagagataatatatatatctccccactgtatgattcctgcatcctccctcccatgcaaaacaaggatcctgagatttttctctgggttattctgatgtgtgtgagtcctaagtccgaaaagttctgtgccggttatgatcagagaaaagtgaaagaaaaaaataggaagcaatcagaagtagaataaggccaggagagggtcacttataaggaatgggacatttgttaccaaggcggatcagataaatccaagacatggcaaagaaagtaaagtacaaaaataaattggaccatttaaaaaaataattcacttcattcagaacattaacttggacttctgagttggttactcactttaccatttataaagtactaagtgcacaattctgcattttagtgtctttttatattctgacttaatttcctgatctgttagtttcttacctgtttatttgtattttagtaaatgaagcatttggaagacgagagaggcttgttcttgggagtgcaagaaattcatctattagtggcccttttggcagcaggagctcagatacacccatggagtcttaatgaagatcatctaatttcctgcttaccttaactgggaattttaaaaagttggcctaaaaatgttccatgcgtggcagcaaccatgcagagtgactgaaacacaattcatttctgactgacattcctttctgcaactgcggtggcaccacaaatatccggtctttgtgcttgctcttcagatggatggtttgtaaggctcttgttgcatttcttaaaaaagagtaataaaaaggatttttaaaaagtaattccttaaacat

SEQ ID NO: 66 - DNA, 60670 bp, Homo sapiens
gtgggccgttgaatgtggctgctcgcggtcggcgtgccccgacgtacagcgggccgggaaaagtggcactgaggctctggaacttctgcccagctctccttggtgagtaaatggggaacgggaagacgcagaacgttccagagagagaagcaggaccgtggggtgggagagggtgtcaggaggccggacgtcgcagccggggcctcgcagtgcttttggggacgtctggtgctggggcccggcctggagactaagggaattcggggcactgggggcgtttgctggaccagcgctctcgacggttgcgcacgccagccagctctcagtgttgaggattcggaggccctgccggtcccccgcgagtaaaccttgtttatacgcatcctccgtggctttttttaaacccgtagtttattatttccaccaattcggctcgaatgctgaaattttaacagtagttaaatctcactgtgaaggcgttgccacgtttaaacaaatctcttttaatgaaagatggaaggttggggcgggtttagaatgaaaagatgctctacgtggctccgcgttcctcctgagagagatacccgggcaaccttgattaactctggactgcagggaagtgacagtctttgaaatgcctgagtgggatttaaactgaaattcgagtgtcctttgtatttaaaacccggatatttttctttcacggttgacatttttcatgtaccgcaaaaatccgagactcctatttaaaccggctgtggtaacagcggtggtgattaactagggtcttagtttgcaaacaatagggataaggtttagttccaccgccctgccttttcgcctccctcattcattggccaactgggttattatggagtctttttggaagtaatccactaatgctttgagcatctgtttctttgggttttattgttttgggcttttttttttttaatttttaatgatgaactatctgaaatatggaactctgtctaacccagtagtaaagtcatgccttctggaatggtttaaaagtgtgccataaatgtaaactataaatgggaactttaaatgtgtacaagttttacatctttattaaaaatcgtcagttttgtgtagcttaatacgaaaagatattttaagttccttttaaggttttaacaccaggatattgtaccatttaaatgtataaatatatttttaaaagtaggacttcataataatcagaataaaaacattccttcatccagtgctggctattccagcacccccattcttcctgctattgaacttttaagtgttagccaggaagaatagacttaaatactcggtgtttaggatagttaaaatatgagcatttttcatatagtgtctttgtaacagagacattggctatacttctctaagcctttctgctcatttcatatgtgctgtcaacaaatggtaatttttaaaaattgatcgctatatcctaatctctttatttttttctacctgaattattttcattggatttttgctctttcttaaatcagtgagtttcagaatttattgtgtatacactaccttgaaggatttgttcaacaatgctgattcctgcacttcagatctcagattctgaatcagtaggtctggaggatggcattgaacagtctgcatatttaactgaaaggttagaaaatactgtgagttttcaaaacactgatttgatctttcctagaaaggcattataatgtgttgattaaagacatggaactggggccagattgccttggtttgaagcccatctccaccacttgatagctaggtgaccctgggcaagctgtttaacctctctgcttcatttccctctaccgtatgatgaggttacctactttgtaggattattgtgaggattgaatgagttaatatatacaaagaccttaaaatagtgtgtgccacatagcaaatgatacataagtctccaattacattgagttactaaactgtaaaaaccgcatcacatacattctctcattaatctttacaatatcgctgaggtagttactatcttcaaataagaaaacaggctaagaggggctcggtaatttgttctcacacaactagtaacacgttggaactgaagtcggaaattagatttaactcaaaagtttatgcttttttaaaaaagtaatatttcttgcctctcttcagtctccctccagatgttgctccataagtatctctgatggcttctcattgtctaccatatataattcaaatttcttagctttgctttttatttacagagcccttcagagtctggtaccaacttctcttcccaaggaccatcttcataatattacaccagtctcttccaacctgctgatgttctatcaatactactagaattctccaaatctatctcttattacattttatgcatatttagccattggcctttttatttccccttaagattttactcaaatgggtttaaagacttctccaggctgtgctttttgcttataaatatatagtgcgagactgcccttgtccttttaatttttatgtctgcagtgcacagtgcagaacagtgagtgtcatgatactctgaaactgtgtatgttcagtgagtacttattattttaacaatttaacacattttgtcttgggttaatgactcaaaaagttgttgcttttttttttttaaggcttggcttttttctgagatgatagcatataattctgtgtagtttagtagagattttagtgatagcatatggtttataaactatggaaaaataagtattgaaattataggctcagaggacatttcaagtggcaaaaaatcaggagcaatgtttgttaatattcatgaatttaaaatgctttatacatattttctcacttaatcctcacaaccattttattatctctatattaagatgaagaaactgaggcaccaaaagatttagtagcttttaaaatgtatttttaaaatatttaatttcctcttgtgtgggcggcaagccacccaggtgccgaggcaagagactgggggcacgagctgttccagtataataaaataataaaataagaatagttatactagatatagatcttagatatgattatatatgaatatcattaatcattagtttgtagcaattactctttattccaatattataataatcctcgctctacaatcataacctaggaaaaaccaggccatacagagataggagctgaggggacatagtgagaagtgaccagaagacaagtgtgagccttctgttatgcccggacagggccaccagagggctccttgttctagcggtaacaccagcgtctgggaagacgcccgttgccaagaggaccatggtctagcgatagcgtcagtgtcaaggaaaaacacccgctacttagcagaccgggaaagggagtctccctttccccgggggagtttagagaagactctactcctccacctcttgtggagggcctgacaccagtcaggcccacccgcagttacctggaggcctaaccgtctccctgtggtgctgtgcttcaatggtcacactcctcgtctgccttcatgttccatcctgtacacctggctctgccttttagatagcggtagcaaattagggaaagtactaaaagtctttgatatgcagaaataatggtgtaagctgtctctctctctgcctcggctgccaggcagggaagggccccctgtccagtggacacgtgacccacgtgaacttacctatcattggagatggctcactgcccctttgtcttgtatccaataaatatcagcacagcctggcatttggggccactaccagtctccgtgtcttggtgatagtggtcccccgggcccagctgtcttttcttttatctctttgtcttgtgtctttatttctacaatctctcgtctccgcacacggggagaaaaacccaccgatcctgtggggctggtccctacactcttggtacagttttttttttttttaattatgagtggtatgttagatgtaataaaaagtatcttaattcaaaatgttagggaattaaaaaacaaaacttttctttttccgtttgatcacttaagacagttgcctaatcttgcccacagcttttctttaaaaacctgcccaacaatgtagggacatcattctcatgaccagtaggtagggttggtctaagggacataaagccccataccacttaaagtcccataccacttccccaacaaaactggtacaggtatttatatcagagctgcatatctgatgcaggctagaccattcatgtgatttcttgattttggagttgggatatcacaagactattggaagccaagctggaaaggtcttatgtgttgctatgacagtggaatcatgaagaaacatgaaaatggacatatggagccaatgggtggtagggtggggtggggtaggggaggatgacatctgtttcctggggactagttatatattgataacttaatgtaaacttgtaactttgttacttttgtgtgtgtgtgtgtgtgtgtgtgtgtgtgtgtgtgtgtgtgtgatatagagtctcactctgttgcccaggctgaatgcaatggtgggatcttgactcactgcaacctccgccttcccggttccagtgattctcctgcctcaacctcctgagtagctggattacaggcacctgccaccacgcccggctaatttttgtgattttagtagagacagggtttcgccatgttggtcaggcttgtctcaaattcctgacctcaagggatctgcccgcttcagcctcccaaagtcctgggattacaggcgtgagccaccgcgcccagccattgctttttatcttaaacttatccttttgttttaaataaaaattgttaacttttaaacaagtatctggtatacaatttgtatgcaataaaagtcacccattttaggggtatagttcaatgagttttagtaaatgtattctcttgtatgaatataccacagtttgttttatccatatacattgttacagtttttagttatcacaaataaagtttctgttgacctttgtgtacaatggacatatgccttatttctcttggctgcatcatatgataggtgtacatttgacctttttttgaggtaaaattcccatttataaaattagccattttatttgagacaagatctctgtcacccaaagctggagctcagtggcacaatcatagttcactgcagcctccaactcttggactccagctgtcctcccacctcagcttcccaggcagctaggactacaggcatttgccaccaagactggctaattaaaaattttttttatagagacaggatatcaccatgttgtccaggctggttgcaaacacctagcctcaagcgatccttccacctcagcctcccaaagtgctggaattacaggtgtgagccaccatgcccagtcaaaaattagccattttaaagtagacatttcagtgacagtacattcacgatgttgtgcaaccatcacctctacctagttccaaaacatgtaaccttttatgtctgacttccctcatttaatataatgttttcaaggttatctatgttgtagcatgtttcagtactttattcctttttattgccacataatcattctatggatataccacattttgtatatccattcatcaattgatgtataattaggttgtttctttgtaatgtattgatttagtgatctcttttgtgaatagtgctgctgtgaacatatgtatgcaagtttttgtttgaactgaaatatttcaattgttttggttacatagctagtggaattgctgggtgatatggtagtcttgtttaatgtgttgtggaattgccaaactgttttccacccttgcatcattttactttcccactagcaatatgtaagggttctaatttctccatatcatcattaacacttactattttagtttgtaaaaattattattatagctattatagtggacatgaagtggtgtctcattgtggctttgatttacttatcactaatataatgagcattttttcatgtgctgttggccatttgaatattttctttggagaaatgtcttcagatattttgttcatttttaagttggattacttgtctttttgttgttgcattgtaagagtttctaatgtattctagatactagacccttttcaggttatatgatttctgaatattttttcccattctgtagattgtcattagatgcacaagttttatactttggtaaagttcaatttatttttttcttgttgcttgtgcttttggtgtcatatctcagaaaccattgccaaatacaaggtcatgaaaatttacccctagattttcatttaagagatttatagttctgtcttttacatttaggtcttgatccatttcgagttgattttttttaatgcgtgtgaggtaggggttcaacttcattcctttttttttttttttttttttttttttttgagatggagtctcgctttgttgcccaggctggagtgcagtggcacaatctcggctcactgcaagctccacttcctgggttcatgccattctcctgcctcagcctcccaagtagctgggactataggcacccaccaccacacccggctaatttttttgtatttttagtagagactgggtttcaccatgttatccaggatggtcttgatctcctgacctcatgatctgtcgcctcggcctcccaaagtgctggattacagacgtgagccaccacacctggccaacttcattcttatttacatggctgtctggtcgtcccaggaccatttgtcgaagagactgttttcttcccatttaatggtcttggcacccttattgaaaattagtttactataaaacgtgagtttatttattgactctttcttcttttctattgatgtgtatgtctgtccttgtgccagtaccacattgtcttgattacagtggatttgtagtaagtttggaattggaaaatttgaatcctccaactttttctttttggggatccttttgactattcaggatcccttgcagtttaggcttagcttttccattcctgcaaaaaaaggccatcgggattttgacaggaattgtatcaaatccataaattgctttggggagtataaccatcttaatgaaatagtttttcaacctatggatgcaaaatgtcttttcatttatttacagttctttaatttctttcagcactgttttgtagttttcagtgcaaaaatcttgcaccaccatggttaaatttattactaagtaatttttatgctattgtaaatggaattgtttacttaatttcctttttggattgttcattgttatatagaaatacaactgatatttgtgtgttgatcttgcatcctgtaacttagctgaattcgtttagtagctctaacagttttttgtgaattctgtaggaaattctacatataagatcatgccttctttgaatagagttacttcttgctttcttgctttattattctgaatagaccttctggttcagtgttgactacaagtggtggaagtgtgtatctttgttttgttccagatcttaggtggaaagtgtgcagtctttcactgataattatgttaattacaggtttttccatagatgctgaggaagttcccttatattcctaaatgtttgagtgtttttatcatcaatgagttgtattttgtcaaatgctttttctgcatctattgagatgagcatgtgaccttttcctttttctctattagtatggtatattatattggttgatttccatatgctgaaccacctttgcatttctgggataaatcccacttggttatggtacaaaattttctttatcagaatcagtttgctggtagtttgttaaggatatttgcatctatgttcataagagataattggcttgtagttttattttctgtgatgtctttttctggctttggtatcggggtattggtggcttcataaaatgagttaggaagtgtcataatatcttttggaggggtttgagaaagattggtgccaatttttcttcaaaggtttaatagggttcaccagtgaacccatctgggctaggactttattcgttgggaggttcttcattagtgattcaatctcttgtttgtagatttgttgaaattttctatttcttcttgtcacttttgttatttgtttaacctattgtttaatttgttaacttttaacttcttagagtacaattgttcataatagtctcatttaattctttttatttgtattaggtctgtagcagtgtcccactttcatttcttctgatttagtaatttgagtcttctcttttttttctctgggtcatctaactaaacgttttcaattttgtcgatcttctcaagcaatttttattttattgattctcaatttaaaaatttttttattacattatctggactctaaattatttccttccttctgctagctttgggtttagtttggtctttttctagtttctttgggcatatagttgggtcattgttttgggggcttgattttatttgtctctaagtattttctaatttcccttgtgatttcttttttgactttttgtctatttaaagttgttatttaatctccatatgtttctcagttttccagttttccttttattgatttctagtttcattccatagtcattggagaggatattttgtgtgatttcagtcttgtaaaatgtattattttgtggtctaacatggtatatccatggatattgttccacgtgcatttgagaagaatgtttcattctgttgtagggtggagtgttctgtatatgttaagtctaaactatttctcctttcatttctgtcaaattttgccttgtatattttggggctcttattaggtgggtttgtgtttataattgtcatgtcttcttgatggattgaactttttagtcagtctttaatgtcctttgagtcctgtaacaatcttcaacttaaagcctgttttgtctgacattagtataaacacccaagcttacttttgattactgtttgtatgaagtatcttattctgtcattttactttccatctatttgtgttttgatatctatagcttgaccctagtagatagtgtatgtatggattttaaaaaaattcattctgtcaacctttgccttttaattggagcgtgtaattcatttacatttaattactgttaaggaaggatttctgacattttagtatttgttttctaaatactatctttctgttcctcatttccttccttattgccttttgtttaattgatttgtatagtgtaccattttgattcccttctcattaccttttctgcacatattttttagttatattcttagtggctatcttggggattacaattaatatcttaaacttataacaacctagtttgaattaatacccactcagctttcatagtatacaaaaattacacttctgtatatctcatccttcttcctaaatgttattgtgtcaaattacattttatattttttgcttattttacatttatacataatgtgcccaataacattgatttatatttattttacgtgtttttcttttaaatcataaaggaaaaagagaattaccaaaagtgcaataatactactggcttttatatttacttctgtaattacctttactggtgtttttatttcctcgtatggctttgacttactgtctggtgtcccattagcatctctagtaggacagatctactaaaagtttccctttcaccctagaccccaggtctaccagaccttctgagaaacagccattcttgtctgtctcctggatgattttccagagaatataagcttttaagaaactttttattgaggtataatatatatgccaaatatattttaagtacataattatgttcattgtaaaaagtcaaacaatgccaaaatttataagaaattaaaagaaaaagcccctaccccttctctctccccagggataaccaccattaacagttagggacctaaaaactttatggtctttcttgatctcagaaacttctgatctttctgaattcctttcacccttccttctctccatcgaattacttctcctgctttgcatataagaaccctaataggtaggtattatcatctccattggacacaaggcagagcaaggagttcaaacacagaaaatgtataattcaagtgtaatgttctttctgccatgttcctctgcctgggtcctgcctggaatcttaaaagtttaattgctctgtcacataaggtagcagatacattgtcctgttaaaatataattaaggccttattttttagacaggagaagacctggttctgtgggagttgtgacagaatagcctttattgcctgaactgtagtaaaaaagatgccacctgctttaagaagggtactttggattgggctggttatttagagcctgacttggtcagtggaaggggctaggactggaataagacctgcccacgaagtcagggttaggaccagctggtgaaggggggggattatattacttactatctgataatccaatccaaggagatttatataatccaaccaaatggcagaatcagcaagagcaacttccagaagaaattcctgacattccccaaacatcccaggctttcacacactgttgtacctttgcacacactctacttagaatgctttttctgccttgtctgctcagaatatttatttttcacaattacgttataatatcaccacctctgtaaggctacactgcatgtgtgtgaaatatttgtttacttgcctgcctcccatgtgagtatgtgtactcatcttcacttttgaaacatagttttgctgcagataggattctttgcttacaggtttgggtttttttcctgtctttcagcactttaaatatgtcatctcactgccttctggaactctatggtttcaaatgagaatttggctcttaatcttattggggatattttgtatgtgttaatcacttctctcttgctgctttcaagattctttgtctttgtttttgtcagtttgactatactgtgtctcaatgtggatctcctagaatttgtcctgattaaagatcttgagcttcttaaaaatgtgtagattgaagtcttacctgtatagatttcagtcttccatgaaatttgggaagtttttggctattatttcttcaaacattctttctgttccactttctccggtccctcttggactcctattaagcatatattggtatacttgatggtgtctcatagtctcttgggctctgtttatttttcattttttttctttctgctcttcagactggataatttcaactaacctgtcttcaagttcgctgattctttctcctgcctgctcaaacgtgctgttaaacctctgtaatgaatttattatttcagttattgtacttttcagctgcagaatttctatttcctttttatcatttctacttctttattgatattctctatttgttgagacattgttgattgtgagttttttgccaggtttttctgtgtttctagggaggtacaggcctgcagagccccttgctccaccattttcgtggatgtgttctgtattactaagtttgaagagttttttcagaaaatatattgtggatctaactaagtcctttatcagattatgatttgcaaatactttctcagtctgaggcttgtcttattctcttaacagtgtcttttgatgagcagaagatactaactttaagtacagtttatctttttttgtcttgtgctgtcagtattgtatctaagaaatcttacgtaacataaggtcacagaaattttctcctctgtgttttttctagaaattttatagttttacattttgtatttagagctgtaattcattttgagttcattttttgtgagacaagtattcttgtgggtgctgtagtgggtttgcttttttttttttgctattttaatgtgcatttcctttatgaccagtgatgttcatattttcttttgcttgttggctatgttgtgttttttttaaatgtctggtcaaatcttttgtccattttgttcattttattgtgatgtctatttgagttgtaagcattctttatgcattgtggatataaatcctttgtcaggtatatgttttgccagtgtttattcccaatctgtgttttgcctttttctttgcttaactatgtttttttgattagaaagttcttaattttgatgtttaattcatcagtgttttttatgattcagtttcctaagaaatctttgccaaaccccaagatcatgaagattcttcactatgttttcttctagaagttttttttcttgtgatccaatttgaattaagttttaatatatgaggtcaatgttcttccccccaccctccgcccaaagcattcagttatttcaatactatttattgaatagactaccatttgaatacagtgaattaccttggtatctttgttgaaaagcaattgtctgggtctgtttctggcctttcccttgtgttctattgagctatatatctgacttttcccttatgatctattgagctacacatctgtcttgattaacatagctctataagaagtcatgaaatcacatagttggagaccactttttctttttaaaaatgtttttgctattacaagacttttgcatttttatataggttttagaatcagcatgccagtatcttaaaaaaaaaaaaaacctgctggggattttggttgggattgtgttaaattgacatcttaacaatattacgcccatgagcattgtctatctcttcatttatttaggtctttcatttctctcagcagtgttttgtagcttttcagagtgtagtctttttccacatcttttactaagtttttacctattgtgaatagaattgttctctaattttctgattaattcttgctgttatacagatttgccttgtttcattacaacttgttaaagtcacttattcttataaatatgttggtaggattttctatgtagatgatcatatgtgaaaacagttttacttcatccttcacagttttgtcttcttttcccttggagtacactgttgaatcagagactaaggtgaacgtttgtagattcccttcgctaggttgaaaaaatttattttacccacagtttgctttacagttttgttatgattggatattgacatttgtcagatgcccttttgtatctgttgacattgtgtcacagtacagtgtggaaattaatgcacatttgtagatgccctttattaggttgagaaaattcccgtctgtttctggtttgtcctacagttttatcatgattggttgttgaattttgtcaaatgctctttctgcatctattgagatggtcatacttttttcaccccttattgtattaacatggtgtattactttacttttcagatgatatctaatcttatatttctaagataaatccagttaagatatattatccttttttttttaattaaaagaaaaactaccaatgattgactaaatttgccaggtactcttgtggcgtttatgtgttgtttctaattcttacaataacctgtaattagcttctagtttgagggatgataaaattgaggctgaggtctcaggaaaaaacatatagaacatgaaggaaagtctaaacttcataccttcaatgcccctagtactctttctactataccatgctactttttgtaataatttatggttaaaaaacattgaagatcatattgatgttttatgtactttttttttggatggaggtctcactatgttgctcaaggtggactcaaattcctgggctcaagcaatcctcctgcttcagcctttcaagtagctgggactacaggtgcataacactgtgcctggcttttatgtacatttttaagatatgtttattatttcctagaatgtaaataattgattcatgaaaaaaaaattctaatagcttttgacctctaccattgaatgtctttcttctaattttatcttagctgttgctgtgaaccaaagtaactaacaaatctttaagagtatttctttttgtctccaaatttgtaggagcacataaagtgtattaactatctatcccgaggtaacatgggtgtattagtcacagttctccagagaaacagaaacaacaggatatgtgtgtgtgtgtgtgtgtgtgcgtgtgtgtgtgtctctgtgtgtgtagagaaggagagggaaggattgattaatttattataaggtattgactcacatgattatgtagtgtgaacagtcccattatctgtttgcaaactggagacccaggaaagtcccgcagtgtagtttgaatgtctggagccaaacagctgatggtataggttccagtccggatctgaaggcctgagaaccaggaacaccaaggacagaagattgatgtcctacctcaagcagtcagacagcaaatttaacctttttctgccttctggttttattcaggccctcagtggactagctaatgtctacccacgctggggatggccatctgctttgctcagttcaccagtaaactgagtaaagtttaccaatcttttccagaaacactctcacagacacatccaaacataagtttaaccagatatctgggcgtcctgtggcctggtaaaggtaacacataaaattaaccatcacactgtattaatcttgatcttgaattttttgggaatgttttatattacttttaattcaattatttttaaacctttttttattttgaaattattctaaagttacaggaaagttgcaagaaaagtacaaagaactacatatgcccttacctagattaaccactctttattattttccacattcactttatcatcctgcagtattgtacatttgcatgtaacttcccttttctgaaccgttggagagtaggttgcatatatctggtccccctaccccttaatgcttcagtatttcctaagaacagtgatagtctactaaataacctaaatatggataccaatttcaggaaacttagcataaatacaatactttcaactaaatattgttttggtcaattgcctcggtgatgtcctttggagcagttttattccccagtgcaggatacagtccaggatccttcatgcatttgtagtaaataaaatacagttcatcttttttttttaacttttttttttttttaggtttgggggtacatgtgaaggtttgttacataggtaaacaacatgtcatgggggtttgttgcacatattatttcatcacccaggtattaagcccaatagccaatagttatcttttctgctcctctccctcctcccaccctcctgcgtcaggtagaccccagtgtctcttgtttccttctttgtgttcatgagttcttatcatttagctcccacttacaagtgagaacatgcggtatttggttttttgttcctgtattactgtgctaaggataatagcctccggctccatccatgttcctgcaaaagacatgatcttactcttttttatggctgcacaatattttatcgtgtatttgtaccctattttctttatccagtctgtcactgatgggcatttaggctgattccacgtctttgctattgtgaatagtgctgcagtgaacatttgtgtgcatgtgtctttatggtagaatgatttatagtcctctggctatatacccagtaatgagattgctgggtaaaatggtagttctgctttttgctctttgtggattgccatactgctttccacagtggttggactaatttacactaccaccaacagggtataagtgtttccttttctccacaaccttacccgcatctgttattttttgactttgtgataatagccattctgactggtgtgagatggtatctcattgtagttttgatttgcatttctctaatgattagtgatgttgagctttttttcatatgcctgttggtcgcgtatatgtcttcttttgagaagtatctgcttatgtcctttggccactttttaatggggttgtttttttcttgtaaattaaagttccttataaatgcttttgataaaattcagcagcccttcatgttaaaaactctcaataaactacatattgagggaacatacctcaaaataataagagccatctatgacaaacccacagccaacattatactgaatgggcaaaagctagaagcattcctcttgagaaccgacacaagacgaggatactctctcaccacttcaacatagttttgggagtcctagccagagcagtcaggcaagagaaggaaataaagggcatccaaataggaagagaggaagtcaaactatctctttgcagattacatgattctgtatctagaaaaccccttagtcttggcccaaaagcttctccagctgataaacaacttcagcaaagttgcaggatgcaaaatcaacatacaaaattcactagcattcctatacaccaaaaacagccaaacctagagccaaatcagaaaggcaatcccattcacagtggctacaaaaagaatgaaatacctaggaatacagctaacaagggaggtgaaagatctctacaatgagaattacaaagcactgctcaaagaaatcagagaaaatacaaacaaatggaaaaacatcccatgctcatgtataggaagaatcaatatcattaaaatggctattgtgcccaaaacaatttacagattcactgctattcctgtcaaactaccaacaacattcttcacaaaactagaaaaagctattttaaaattcatgtggaacgaaaaaagagcacaaatagccaaggcaatcctaagcaaaaagaacaaagctggaggcatcacattacccatcttcaaactatactacaaggctccagtaaccaaaacagcatagtactggtacaaaaacaggcacatagaccagtggaacagaatacagagcccagaaatgaggccacacatctacaaccatctgatctttgacaaagatgacaaaaaacaagcaatagggaaaagactctctgtttattaaatggtgctgggatatctggctagccatatgcagaagattgaagctggaccccttcctaacaccatacacaaaaaccacctcaagatggattaaagacttagatgtaaaacccaaaactataaaaaccctggaagacaacctaggcattatcatcctggacataagaatgggcaaagatttcatgacaaggactccaaaaccaatcgcaacaaaagcaaaaattgacaagtgggatctagttaaacttaagggtttctgcacagcaaaagaaactaccaacagagtaaacagacaacctacagaataggagaaaatatttgcaaactatgcatctgacaaacatcatgttttattatgcagtgctgaatcagagaaattaattctttattatgtatgggacatccatagacaacatttctgagttgtaaaaggaatttagagtacatcgaataatgcaatgcatagactaagttgaacctttctgattagtgatttaaatcaagtcatttctatagcaagaatgttcatttcttaaaaatgctagattaaaaaaatcaatcaatttctctttcaagtgcctgattccagcatgttttctgtatattcaatgtcacctttttcagtaagattaggcactttagaaaatgttggatggggccaggcacgatggctcacacctgtaatcccagcactttgggaggcagaggcaggcggatcatgaggtcaagagattaagaccatcctggccaacatggtgaaaccccgtctgtactaaaaatacaaaaattagctaggcgtggtggcgtatgcctgtagtcccagctactcgggaggctgaggcaggagaatcacttgaacccaggaggcggaggttgcagtgagccgagattgcgtcactgcaatccagcctagcaacagagcaagactctgtctcaaaaaaaaaaaaaaaaaaaagaaaaagaaaaaatgttgggtggttaggatctgtttatttattcaaatgttagccatcagctggaatgagaaggaatttgacttactttttttgtgttagttatctgttgtcgtgtaacagataactccagaacttgctggttttaaacaataaacatttaattactgatagtttctgttgatcagggatttgggagctgcttagctgtgtggttctggcttagggtcttgtatgaagttgctctcaggctgttagccaaattgcagtcgtatgaaggcttgattggggctggaggattcacttctaacatggcttattcacataacagaaggtagaatggcctccattccttaccaactgggtgtctccatggtgtatgttgaaaatttttatgacatggcagctggcttcctccatagcatgtgatccatgatagtgaggaggaagtcacaatgccttttatgacattgtcatttctgccacagtcttttttgttgaagcaagttagcaagcactaagcacatctacaatcaaggagaggggcaggctttaccttttgaaggaagaagtatgaaagtgtatcactgactgatcaagtagaggtaagcagtggaggacactcagaataccttttgacagaaggtattaattaaattgtttattttccagggaagggaatggttttattttgtttctaaagtccagtctgttattaagacttggactgttattgaactatacacttagatattatttttttttaattctgcttgggaagtcttaaaattcatattcttgaaggaaaacatctaaaagaaattatgaaattcaactgaaatatgtgaatagtacttattttttttactaaggttttgttttggagacttgtttgaaataaagtgatcctcattcaggatttagaaacaaaagttatactccacatgctagggattaggaaggctaatgtgaactgatcaaaagtatgaattatggaatgcctttagaataatcaacttttaggtaatttgatactgctataatttcaagcttagagaaaagttgtaagaatggcataaggaactcctatatatcctttatctagattcactaaatgttcattttgtgccatttgtgttattctttgtctcatcctagcccagtcagcctaacaccaccagggataaaccagtagtctgataaaattaagtttattgacccacgccagtgagagagagtgcaaacaagagggaccacagggcttcttaccaaatggagttacagtagattttatacaggattttggagaaggatagcatttaggtaaaatttaaatgcactacattttgtggtgtctaggttggatgacagtgtaaatctgtattgtcgaatgactaaaacatcctttataaattaaactttttatgtttaagtgaagtactatttatcatgtgtttatggaattttctgcaataaattcatgtgtatggatggatttatgatatgttgaattcatcaccagaggttgaactgtagagaagtcctttaagaggaggcattttatcttcctattatattttatcaattttaagatggactcaacccttctacacacacgcttctttccatatggatattcagtttttcttgtaccatttgtttaaaagattttattttccctcgttgaattgctttggtgtctttgttgaaaatgactggaaaaatatggatctgtttctgagttttattgagaactggtcttagatgtatcagcatgtttaaaatgatgttctatagattgtgatcctcaatcaatttgttcacttaaggcagttctgtagttattgtttgagaatgtataaacatcaaaagcgccatcgtatacctgtagagaattactagtgcctctaaaaggaagaaaagaaagaaaaaaatccaagagacaataaaggagtgctcctttaaccctacattaatagttgtggagaggagctaggaaaaatagtactctagacctacttaactctaaagcccccttaaaactgggctcttagttgttttatacattcttttaagaataccaatcttaatggcatagaatattattttgtaaggaataaacaaaatattgaaagcttagagtcaaagccatttaagagatttgaactatgactttttaggaaagcacagaaatatatatgagcaaaactatgtttaaatccaaaacactttttacagtcagtatgaaatataaattctaattgtaaggaagcattgtataagtttaatttggttaatcagtcttcataaaataatctgtgtcctacattttgtggtgtcttagatttgatgaaatctgatagcagtttgtatttgtggttttcactctttgatatataatattctgtattattttttgttctctttcattattttcacatgaagtaccatggtgtaacctgcagtcactcagttatgggttagtgtattcccactaactaactccttgaccttggacaggtgtttaacctttctgagaactggtttttgcaactataaatgagattatatttacctagtggcattattatgttttattcttttccacttaaataccaagagattgcacatacattgtacttaaatctcattaacatttctagtaggctgttcatatacccttggtgaagtgaaactttaatgttattaagatgttggtcttcttttctttgatcttttagagaaaagttatatttcagtaatgattataagtatttttatttgtttaactagtggagagtgaggagatagggacagaccaatgtctttcagtatgtaaatggttgagcactaccgtactagaagaggtaacaagacagtcaggtgcctgcagccctgtatagaatcctggcaaatgcaacagccacaaatacggtatagactaataaaggattgtttttgtttttttttgttgttgtttttgagatggagtttcgctgttgttgcccaagctagagtgcaatggtgtgatcttggctcactgcaacctccacctcccgagttcaagcaattctcttgcctcagcctcccgagtagctgggattacaggcatgcaccaccacgccctgctaactttgtatttttggtagaaacagggtttcaccatgttagccaggctggtctcgaactcctgacctcaggtgatccacctgcctcagcctcccaaagtgctgggattacaggtgtgagccaccaagcccagccaaaggattgttttataggctgcacaaatacgaatggcatggctattgatgatgtgatttttcttttttcctaaatgatgaacaattctgggtaaagctttgaagaaaaattaaatagaaatttccttgattgacataggagttgtagttctgcaaatataatttgttaatatgtaaaatgggcttaggttctaggttaattacaagtagatttttttaacctacttgaatgtccagatggaaatttgaaagtctagactatcgtttgttgtgtaggactgtttggagcattgcaagatgtcctataatcctggcctctttccactaaataccagtggtcatcttaattgttttgacagctaaaaaacattcccttcaatttaaaaaatgttcccgactcttaacaccccagttgagaactactgatcttagatgtattaaaggtaagaaaaatttaaatactagagtattagatgacttatttgtcattatgcattgactgcaagtaataaaagttgttaatttgagacttttacaattaagatgactgtattaatgttatttttcctagtaaaatgaatgaaagtaaacctggtgactcacagaaccttggtaagtaactgtatttaaaataattttattacaatgagtgttttaaatatgttacttaaacattaggactgaagaggaatgaattccctggcacaagcttagtttgtatgtccacatactaaagtataatattgcatatatttatttcaacaaaaacctatcagaaggcaatttatttgccaaattttatatttgttttatgtatataagatatggttcgtatctcaataaaacagttatttaaaggaaaaaatgcagatgagaacaatttaaacagtgtgtaaaagtttaacaggaaaaggaaaactggccaggtgcagtggctcacgcctgcaattccagcactttacgaggctgaagcaggcaaatcacttgaggtcaagagttcaagaccagcctggccaacatgacaaaacctcatctctgctaaaaatacaaaaattagccaggaggcgcatgcctgtaatcccagctactcgctaggccgaggcaggagaatcgcttgaacccgggaggcagaagttgcagtgagcagagatcgcaccactacacttcagcctaagtgacagagcgagaccctgtatcaaaaaaaagaagaaaagttaaagaaaataaaaggaaaacttacctctacgtgctcacaacaatcttcccaaatagatgcggtccgttttgacctttgcttttaattgttgttttcttcatttattataaacagtatctgttgtcttgctacaatgaaatatgaggaatttaaatgattacactcttctgccacttctacctcatccactgtattttagatccttttaaattcactctaaaattaaaatattattcttacaactctatatcttgatcattacttttaaagtatcttttgacaccacattatgttggataaggaaatttatgctcctaaacctcttctactttctttccctgcttctacctccagccttctgtcagctatgctaatagttctgaaacttttagtacttcatggactacctctatgcatttgccaaatgcaaatacacatctactattgatactttttcctaagatggactgtttctttatttacatgaatgtatttaaggtagaaactttacttcattattgtaatagaaaccagtatcatttactacactagacaccaatcttaataataaatataatgaaatcaggacaattttaccaaattttaaacattaaaagcaggaaggtacaaatgaatataaaaataatctacttataaaaatgcatgcctgaaacctagtctgttctgcattcaaggccctccatactgggtagagggagacaaggggagagaggaacaaatggaaaaccacaggtccacagcatacagcagatgtacctccatccagggttcatggcaagagtttcccctcttctatagtttcagccagttcacaaggactcctcttttgtagactcagctaattctacataattctctttctcttgagctttatgcacacttgcgggtaaaagtgtaggtattggggatggagttaaggtggagcttactggtgtagaatgtccaatatgaacaaatggcaatttgctggagttaatgtgaacagttcccttgtatggaagggaaggaagaggagctgaaatcttttaaagggttaggagagatacttcgagttatgacttatccctttaaaccagagtgagggagggcagagtagttaggctatttcactatattaaatacgagctcatcttatttcttttcagttctagaatctatttggtgagcagcctattaacaaatataataccttttaacatgtgacatctattcttgattgcatgtattattcaaggtaaataatactagtttccataactggtaaaccctgacatcttactggtttaaaacaagagaagtttattgcttggtcaggttacagtccagtgtgcatggtttaaggaagatggagcagttagggagtttctgcggtatgcaatcatttagagatgcaagcacccttcatcttgtagggatctacttcttagggatcctgtcttttcagctagtgattttcaacttgtttcattagcatcttaataaaattttctgtataaataaacatgtaacagaaaagattagttattatactaacatttggttctatgtatatgtcatatcctgttaattattttaatatacactgtcttagtcctcactaaggcatagtttgaggtaggtactattatcctcatttttatgatgaggaaatggagtcataaagcactagtgaagtaagctagtcatggaaagacaatactgcataatctcccttatgtgtggaatataaaaaagtcaaactcatagaaacggtatagtgctggttaccagcggttgggaggattgggagatgttggtgaagggatacaaaattttataatagactggtggaataagttcaagagatctgttgtacaacatggtgactatagttgataacaatgtattgtgtacttgaaaattagtaaattttaagtattctcaccacaagtggtaaatatgtgaagtaatgcatatgataattagctccatttagctgttccacaatatgtacatatatcaaaacatcgtgctaaacattgtaagtatatacagttttctaaaaaaggattagttgagtcttaactcaggtctctctgactcttcaagttgtatttttgtgtgtgttgggaggggtggataaaataggcataaaattcatactttaactattttgagatatacagtttggtggcatttagtacatttacaatgttgtgaaaccatcaccactatctagttctaaaacattttaatcgccctcaaaggaaactctgtacctattaagtagtcacccctcattttccgtgtccccagcccctggtaaccactaatctgctttttgtgtgtccctgtggatttacttatgttggataaagtaatccataagtaaattgagtaatattgtgaccctttgtgtgtgtttgacttctttcacttaacataatatttctaggtttattcatgctgtagcatgtattactactttcatcctttttattgctgaataatattccatcatatgggcataccatattttgtttatccacttatccatcctttgatggacatttggcttgtttctgcttagctattgtgaacagtgctgctgtgaacattagtttacaagtatttgtgtgaacatctgttttcagttctttggtatgtatatccaggaatagaattactgtgtcatatggtaactctttgtttaaattttgaagaactgctggactatttcccaaagctctacatcattttatatttctaccagcagtgtgtgatggttttgattttttccagtcctttgtcaatacttgttattgtcagacattttgattacagctatccttgtgagtgtgaagtggtatctcactgttgttattatttacatttctctgttgactgctgaccagtgatattaagcatcttttaatgtgtttaatggctctttgtatatcttctttggagaaatgtctattcaaatctagtgcctatttttaaattggattgttggtgattttgttgttatcagagtttttttaatgcatcctggctactagacctttagatgtgtagagtgtctttcactctcttgatagtgtccttttttttttttttttttttgagacggagtcttgctctgtcgcccaggctggagtgcagtcacacaatcttggctcaccactgcaacctccacctcccaggttcaagcaattcttcttcctcagcctcccgagtagctgggattacaggcacacaccaccatgcccagctaatttttgtatttttttttagtagagatggggtttcaccatgttgggcaggctggtctcgaactcctgaccttgtgatctgcccgcctgggcctcccaaagtgctaggattataggcatgagccactgtacccagacaatagtgtcctttgagtcacaaaagttttacattttaatgaagtccaattatcatttttttcttttgttacctgtgcttttagtatcatgtgaactctgagaagccattgccaaatccaaagtcacacagatttacccttattctttctgctaagaattttattgttagatccttggctggtatttaattaatttgtatatatggtgtgaggtaggggttcacctatgttcttttgcatgtaaggagctaattgtcccagcagtatttgttgatgagactattctttcaccattgaatggtcttggcactcttgttgaaaatcatttgaccatagatgtatatatttatttctggactcttctttttcattgatctatatgtttatccttatgtcactaccacactgttttgcttactgtagttttgttgtaagtttttaatcttctccccctttttttttttggttagtctagttaaaggtttatcagttttgttgatctttaaaaagaaccaactttttttttttactccctctattgtttttccattctctattttgattatatctactctaatctttatttttttgtttcttctgctagctttgggtttagtttcttctttttttctagttctttaaattgtaaaagtaggttattgatttgggattttcttttttaacataggcttgcatgagcctaaacatcagccagaggtgagagcttaggatttcttgggtcatttctgagtatgtgtacatctctgggcatgcatgtggacttctagattctccagttattatgcagaaggttttccaaatttttattccctcatgtaccctcttttcccagtttcttctttcctatgcctttcagtctatctgctgctttccctatctgttatcccttgtcctaggctgctacagctagtatatttgtttcaaatgttttttgacaaacagcagaggctccagccctgagaaagttctgaggcaggtgaaagaaaggcaagcatctgagctcatccctcagggagccatcatacaggtcaaaacaatcacattttttaaagaacaaggtccattttaccccctcttggaccagtaatctgcaccaggaacacgggccaccccaagaccactgcccagctgggcagtggggaatggtaggtgggtaagttaagatgttctcatcaaaattagtagtttgtttcttcattaagcattctcctaatttttgtaagtttttatttagattgtacagcttctaaaaattaattctaacagtttttggcagtttaatcagagttttgtagttccccagtgtgtcattttcagtgacgttacttcataaattgccattttaactacacagtgaaattcatcattaaagactggtgaagaacataaagttacattaatgtttcagaagtaggtattggaaattttaagttactgatatcaatattatatgatttgctctcagaaagaatttaacacagaaatttagagaagcaccaattccatagggtttttttgaaatatttaaatatatttttatatctatttactttttcactgttagcttgtgttttctgtcgaaaacatgatgactgtcctaataaatacggagaaaagaaaactaaggagaaatggaatctcactgtacattactactgtttggtgagtataatttataattaaattctagaaatttggtgttctaaagaagatagtaagattctgacactgatttctgagaattggataagtcatttaacttctccagatctcattttgtctatctctaaaaatagacattttgttttttgatattgaattctaagattctgaagttacttagtacatacaaagacctatcattatttcgtgtttgtttgtttgtttgtttttctttctttctgtttaaggcctaagtgaaaaaaggaaaaaatgattaggtctataaaggaggtatttcttttaccactttcttatttcatttgttgctagtgataaatctgagaaaagatttgtttgagggttcagggagtggaataaaagtattttatttcacacagaacctgaaaagaaacgtcttggctaaaggtgataaatatttttggaaaaggaaaccagttactttatgtatcactcagaagaaagcaaacgagtgatttcatactcagaattagtctccctttgttccccctcccctccaccaatttctcacctcactgaattcatgccttaagatattagtggcacattaccaccttagcatgccaggcttgcattagtacatacagtgtttcttgatactatatagttatctgctgcttaaaaaattattctgaaatttagcagataaaacgtttgtcatctcacatagtatctgagggtcaggaatttggctgagctggatagttcaggctcagagtctcatgatattatcattgagatgtcagattacagctgaagactttactaggttgcaggatccattcacctctgatggctctgtcatgtggcttttggcctcaatttctcctagctagcgtcaggaaacctcagctccttacctcctgggcctcttagtaaataaggctactcgtggcatggcatctggcttctcccaaagcaagtgatgagagagacagagagagagaaatcaagatggaaccatatgacctagtcatcacagccacacactaatgtcacttttgctttattctgttagaaacaaatcattaagtctagtagcccacactcaagaggaattaagccccacttcttgaagtatcaacaaattgtggacatattttcaaatctaccaccatccatgttaaaattatttcagtgcttctttgagaaaccacctgaagtattccttggtcctctaagactacagtcttgtgcctccgtacctcaaaggttaaatagagtagtagactggcctgggagcttatttataagagaacatgaagttgtcattccaaatatgtttataagttacagacgattatgttttgcagtaaaaagaaaatctttccatttttgtaagtttattttacttttttttcagtcaggaaaggattattttacttttctataaagtaaaaggattattttatttttttctataaaaagtaaaataaaaagtattattttactttttatgcagtagaattaggagagccattttatgtgtctgcaggttatgttttcataacaaattcttagtgtgtatcacttgttatcacttgtttttctttacgatatactggttaaaattctaatcacaaatttgctctacatggtgttttcaaattatgtaatacatttaagttgatcagatcaaaatttctcttatgttctgtcttattcaatgaatataatactttaaaaaaaaagtactgaccccagacttaacccttttaatattctatttcattatgaacagaaaagtatagtgatgttacaaatggcaatagaatgctagagcggaaagagacttagatatagtctaatccagtgtttttattttcatgtttaaggtttgagacattaatacttgcctagggttccagaagtttcagcagagcctggcttgcaagccaggatttcttattcacattctacactttctctgattcaggctttcttaacatgtataaacaatgaagcttaagtcaaatttttaaaaagtcaaacatttattactgtcacattgggggttaaggaaactttctaaaatcaaacatttatgttaactagggttcaataggttttcttgtaaataatgccttaatgattcagaattcagctagatttagagttagcctgaaatgtcactgaattaatctgaattgtctccatctgtattcaccactcctttttgttaagcttaattgtaggtgttctttctttctttttttcttcctctaacccacctaaccactcactgccttctttcctatcttttctttttctttctttttctgttacttcctggaatacttttagaaactaattaggatatacaaactgataatatacagtgccatctaaatcaaacaatgtaagtagcctcttactttgaccatgaaaaataactactatagataactacttgaaatttgagccattttatgtctgttttttattagactgaatagtatggatatatatttttttaatgcccaactagtttcttagagtttattttctaattgagaatatattcatagttgatgtcaagtggaatttggcagagaggcaaagaagaagaaggagtttatggttttctaatagaagatatcaggaaggaagtgaatagagcttctaaactggtaagtaaattattttactattaagtaatgtcataaatattgtcaatacttgggaagtcttttctatcagtttctgtactagaaatttatgactttgattataggtttcaatgcatattttgtcatttaaatatggtaagttttaggaggacagtttatatttttgcccattaaagaaagcttaattgaccctggataatacatgtgacaatactgacttcacttccttatcttattccaacatgtccatcagaattgaccatcagaattatgatctgatggtcaatcttctctgaccatcagaattatgatcataactccactctgctgttctctaaacctttgatcctgagtcaacccaaccatatacttttttattcttatacctcagtttctgagattggaatgttgggttgagttagaaattacacagctttccagactggcaattcatgatctccatatctcctgacccttctctaacattgtgtgattatattcagtacccttttctattctctaggataggcattctaaactttaactccttgctcattcagttatcatttgtgcatcttctatataacagccactatgctgtatgcagggaaacgtctccatattgtctaagtaaaaataatgagaaagaatgagaagatttgaagtacagggagttctgtttagagaatgtgatactggcattaatgattttcatgggggagcattttgggtgatgaagggattcatcattacactggaggggaaatgaaggacactgacacattatagttgaagaagtcaaagaaagattatcccataaatgctgaagttgtttagactttgttttccacagatgccaaagtcttgaggtggaggagtgactaggaagttagcagataacagaagggtaaatgtcattaggctcaaaggtccaaatttttcaaagtgtgaaaatcaagtagtggcctataatattcaacagagaactaaaataatgttctctttgtcccctttcctgcccctgtccatgtcccaccccatgtcaagtctggaaattaaggaggatggaaaaataagcagctttattcaagaaggtctacaagggaagcacataagaaacatttattcttttagttgaggcaaagaagtggaggcaattatttttgaagatatcaagaaggtaggagagttaatggtaaaaacagaggttctagggcacaaggaagaaccgtgggagaaaggtgagcatgaatctaaggactacgtgagatgttaaacgtgagatattagtatcataattcctaaacttcctggtgatagtgagcttgtggtaaaaggtggtctctaaaggtccccttatggtttggaactacagattgaatatcccttatccaaaatgcttggaaccagaattttagatttgaaatttttttcagatttaggaatatttgcttaccagttgagcacctctaatctgaaaatccaaaacccaaaatgttccaatgagcatttcctttgagcatcatgttggcactcagaaagtttcctattttgaagcattttggattttagatttttggattaagggatattcaacctgtacttattttcttaaaacatccgaatcctctccaagtatattgtgaacccttgaaaagaagagtctcatttgtgaactcaaactagaattccttgttgtcagttcattgggagagtttcgggttggcaggtattctccagtgacctaggtggtgctcaaaggggtcagcagtaactctgtaatccctgaatcagtgaccattttaattgccgtcttaagggttccaaggtgttttaggtactgttctgtattttgctaatgattgattcatttaataatttttctatttatgtaccactgttacatttcagttagcggcactggtagtatattcatttcctagggctgccatagcaaattggctgcttaaaacaaatttattctctcaccattctggaggccagaattgtaaatcaaagtgtcaaaagggttccttctagaggcactaagggagaattgattccatgcttctcccctagcttcacatggctgctggcaacctttggagtaccttggcttgtggcagcataactccaatctgtttctatcttcacaggcctttctctgtatatgcctgtgtcttaaatctccctctcctttctcttgtaaagacctcagttatttgatttaaggactaccctaaatccaggatgatctcaagatccttaacttaattacatctgcaaagaccgtatttccaagtaagttcacattcacaggtactgggagtcgggacctgagcataactttttggagaccactctaaatccactgtaggtgtctcaacactttttcatttggtcagaatagagtgatcttagccttttttacaaattggtttatagtattttcctattcttcttggtgagtgttgcctaatttatgtgctttctcttgagatttcaatgaggtgtttatgtatatagcttttatgtttataaacccttcagtttaaaatattttagtaggaaggaaaaggggcttctctgtcttatccacatgttaggctagagatgttttctttatcgaaattgttataggagtgaatctttggtgtctttagattgtttctgggtagaacagtttttcaggaaatttatttaatatacccttaccacagctgttacatgatgaaataattttcagattccccaccaggagtatttatttatgtcttgatcatattataatactcagattttttatgttgtgacccctattttcacatactcttctagaaatgctgtgtttgcaagaaaaatggtgcttcaattggatgtgttgcaccccgatgtaaacgaagttatcatttcccatgtggacttcagagagaatgtattttccagtttactggcaattttgcgtgagttatttaactgttaaatatgaaagttcagtgttaaagaatagtggaaaatacatatcccaatgatataatactacaataaattttctgtttagagcatcagagtttagatataacattatatgtattaccctcccgcccacccttatggggtcatttctatgtgccaagtcttgagaattaccatgtctaggatggacctaatgattagctttcattttcaattttcagcttttggatataacatgaaattgttaatttatccataattcagtgaaaatctccacctttacataattctagatttctgtgtcactctttagaattattgtagacttattcttcacagggctgtatgcatttcgagtaaatcaaaggcatgtaaatttgattgagtacacaaagtaaatattatgccctaggatacccctgaaaatatttgcttcctgagtacaactttaaacatcaaggttttatgaattttgacttttggtatcataagtattccatttcttttagtagttgtgtttttgacctatttaatggattgttatcatgtaagaaaactacagtttagaaaatacaaatggaaataaagtgaattgggaataggttattaattgcattttatgtgttatatgactaaactattttttaggcgtaagttcctgcctcccttaattttatacgattttgagcacaacgtatgcacccatttgttgaatacaataatgtatatactgtattgctgacaatattacacaggattctcaacataattattagtttctgaaattctgtataagtaagtctcactaccagaaaagttcagatttcgaaggtccagctctctccttggtcatagattgtgagacttaatttttagtgccaaggctccagtctgttgtaggtgaattatgagacagacacaaatgaatttcattttatatatgtgaattacagtgttttccaagttttgctttgcagttcatgagatttttttaaaataatttacatttttaggtcattttgttgggaccatcgacctgttcaaataattacatctaataattatagagagtccttaccatgcaccatttgcttggaatttattgagcctattccaagttataacatattacgaagtccttgttgtaagaacgcttggtttcatagagactgtttacaggtaagatacatattttgtaagctttctctgattgatataaaattatggcttgctgatttaaattttaaattagaaagaattgacgtgtatattacctcttactacttgttacttttaaaacagctttaaagcacttaatttgaagcagattttacatacaaaattcaccctatttaagtatacaattaacattcaataaatacttcagatgaaactttttaatgtatatttatacttaaagaattttgttgtttttacctaaggattttgtttgatttcacaatgaataaactagattttaattcctaagtttcatttacatatttatgctggaaaaccaggatatttgaaatgataagaagcttgatagcaagttaagatatttaaacattagtaggcttttcttcccaatggtaagcactttaccataacttcttaacagggagctgattactgtcaattaattaaaaatattggttctttgagagtcatcttacgtatcaaaccttattactacttttcaagtaaatagaatatgataagacataacattagacaatttaataattctttgattctgaaaatacttgaaaacttgaaaaagattccagttattagtaacatcaaatatgtaatatgtacatgtgaaagtgccagctgatgaacttaagtttaatactgttttttaaagtttattattgtttattaaaatgaaaggttattattactaattgtccacagacatatttttaaaagttaaaagatgtaggccgggtgtggtggctcacgcctgtaatcccagcactttgggaggccgaggagggtggatcacgaggtcaggagatcaagaccatcctggctaacacggtgaaaccccgtctctactaaaaatacaaaaaaaaaattagccgggcatggtggcgggtgcctgtagtcccagctactagggaggctgaggcgggagaatggcatgaacccggaagacggagcttgcactgagccaagatggcaccactgcattccagcctgggccacagagcgagactccatctcaaaaaaaaaaagatgtaaattctcttatttcaataaagtcttaaaaatactaacagtactaaaagtagtaaagtttgactgatacctttttttttttttgtatggaccttgaacttttatacttaggattattcagttaaaagtgcaggatgaaggcagggcacagtggctcatgcctgtaatcccagcattctgggaggccgaggagggcggatcacctgaggtcaggagttcgagaccagcatggccaacatggtgaaaccctttctctactaaaaatacaaaaaaaaaaaaaattagctgggcgtggtggtgcacacctgtgatcccagctacttaggaggcggaggcaggagaatcgcttgaacccgggaggtagaggttgcggtatgctgagatagcaccactgcactcctgtctgggcgacagagcaagattctgtctttaaaaaaaatgcaggatgaagcctgttttgttggggaaatattagaaattcggttaatacttgcaaagaggtgtttataaaaggatcctagagagtgcagttaataaacaacattgtgaagtgttatccttacctgttcatattatatgagaatctttaaaaagtaatttgttttaattaagggtttgtatttggatgaatataattgctgccaaatgtgtcatcttgttaattttgtagcagtatgttatttttcataagatttttctcatttatttgttaataattaagcaaagaaaggttctcatacttgacctagtatcattaaggccttttgtgaacactctgaaaatactgagttttaattttgtcgttaaaaaagtagaaataatattactaacaaaaaagactaggtctactttatgcaaatataactgaagatcacagccacatggacacctgtctatgatgtaagaaatatcactaagcaattattattatactcgattagagcatactaaggatggggctaattcttgagtcactctctctaaaggagttccaataacttttgtactctggtatcggtcttaactgaaataacatatggagtcttatccaatctagatagctgtatgtggttaaacaaatgtcattatttgtaaccactacaaataatatacattgggattttgggagaagagactagagattgctatcaaagaaactggtaaaaactttccactctgtgtctacagaattgtcactatttttgttcagcttggatttttccatcattgctctagtcttgttggtatcttccatgtgtcttatcctgttttttctcctctataccagatacttccttttatcgtataccatatttagttaaagatcttggcatctgtctgcaattgctcaaatatcctttaggttcagagatttcaataacctgttgtttccctcccttatatgggtgggtgggtgggtgggtgtgcgtgtgtgtgtgtgtgtgtgtgtgtgtgtgtcacttgctaattgtctgaacctggaatcctctttattagcttctctcttcaccatccgtaaatcattccccaagtgtaatcaagtctacttagtatattctgtgtatcctttttattgtaatcctactctcactgctttaatttcagacactctttttggtaggagaccactagttggtctttctctagggccttagtccctatcaatttattcttcatactactgtctttaacttacctacctagcctctacttagttcagtttggcaagaatgtaatccttaactatattattaattgtattttcctaattacacattctctctcttgccggggaaacttcatatatattattccccatccttggaatgtcttttgtcctattttcctggcaaacctctatttcttcttctaaacttagcttttgctttactaaccctctgacataattatcagtatagacttaggtactccttcttgtttctttcatgtgtatacttaaaatactcacatacttttacacagtattgtagttttatacctgtatacctactcactagaattccttgaagtcgaagctgtcatgttttttggtacataataccaaatgttgtttgtatttttggtacatagcatggtgtttggcatctataaagcaggagttaactatctgttaaataaatgcatgctactagtttttactggggactggctcttctttccagtaggcttacagtttcctgtttccttctgagtaccctctgtctggtgcttctgtatctgtatttgctatagcaatgaggataggttttatacttctcccgttttgggaagaaagctgtcttagagattgagttaaaaacagaaccagtgatgatttttatgtaacatttaaaccccatttctagatgaggtaactcaggagtttcatttttttctcacattttaaagggcaacacaacatttagtaacattacacagtaagtaaaatgacattgcacaataagattgaaaaaaatatatgggtgatgtaaagctaagtattaattagctttttttttaaccattggaaaaaagaattatagattttagcagtgggataacttagtttataaggacaaagtttgagaacccactagcatagaaaatgttttcataatatattgttaaaaatagcacatgttctgttacataatatatcacctgataacagatttaaatcattaacagtagactttttattttccactgtaggttcaagcaataaatgcgggagtgtttttctttaggtgtacaatatgcaataatagtgacatctttcagaaagagatgttgagaatgggaattcatattcctgaaaagtgagtaacatttagccttatgataaaaaaaagatattttaaatgtaggatttaatagcaatggaaatgatcacttatgtctgattcagtgagcatggacaggtagccatttcaaatggtgaaatgcaaaaccttctcctcccccacatggccagttcttggaaagcagggactgtgtcataaatgtctcattcattgatttataatctctttataagtagctcagctatgtccaattttaattgattgactttgtacacttataataggcttcaaaatgtataaattaagagaatcaagatgtgatttaaaatatgtaagaatttttttaatacttaaacatgaagaatccagaaataatgatagtgaacttaaaattaaaaatcgaaagtgaaatatttggaaaaatgtgttataaaaaatttcttgttaacttttcatttagcatgtgaaaattcattgagactaattaactgtatgataaaataacactaatggatttatatcttaaagagaatcctgaaaaggacaagttttattattctcctaagtatataaaagtttttattttaggccaggcatggtggctcacgcctgtaatccctcccctcactttgggaggccgaggcgggcagatcacccaaggtcaggagttcaagaccagccttgccaacatggcgaaaccctgtctctactaaaaaatacaaaaaccagccgggcatggtggcaggcccctgtaatcccagctacttgggaggctgaggcagggagaatcgcttgaacccggcaggcggaggttgcagtgacctgagattgcaccactgtactccagcctgggcgaaagagcaagactgcgtctcaagaacaaaaaaaggtttttatttttagattcattcctgatcctcttatgtaacattatttataggtcaaagcatattttatatcttcttttatagagatgcttcctgggaattagaggaaaacgcttatcaagagcttctgcagcactatgagcgttgtgatgttcgaagatgtcgttgcaaagaagggcgagactataatgcacctgataggtatttctgaaagttcagttgtgcttagtggttccttgtttaaaccttctgctgagaaagtagattttatagttagtgaaacgtagtttttctcttaggatgttagaagtttaaattgagatgagggatattttctaatgcacatttacgtctgtttacagagaaatttttgcagttagtatagttgtaacctatttctctgttgtcttatcacgagactattttctagagccacactgtcctatctggtggccactagccacatgtggctgttgagcacttgagatttcccttttccaaattgcaagggtgctgtaaatacataccaaagacttagttcactagggctgccattaacaaaatgccacagactgggtggcttaaaataaatttattttctcataattttagaggctggaagtttaagatcaagttattgacaggtttggttttttctgaggcctccctccttggcttgcagatggctgtgttctagctatgtcctcacacgagttgtccctctgtcggtgtgttgtctacgtcctaatctcttttatttttataagaacaccagtcatttggtttagggcccacctatctgaccttattttactgtaattacctcttttttttgtttgtttgttttgagatggagtcttgctctgttgcccagactggagtacagtggcatgatctcagctcactgcaacctctgcctcccgggttcaagcagttctcctgcctcagcctcccgagtagttgggattacaggcgcatgccaccatgcctggctaatttttgtattttttagtagagatcgggtttcaccatgttggtcagcctggtctcaaatgcctgacctcgtgatctgcccgcctcggcctcccaaagtgctgggattacaggcatgagccactgcgctcggccataattacctcttaaaaggccttatctccatatatagtcaccttctgatgtactaggacttaggatttacttcaacatatgaagtggggagagacacatttcagcccatagtcatattattttaatacgacttaaagaacttacatgaccaaataacttaaaatttgttgttaataatttttatgtagattacatattgaacaaaattataacattttggaaataaaaatatatgttatttaacttttttatattttttaatgtggctactggaaaattttaaattacatatatggtttacattgtatttctattggacagcactgttctagagggtaatttaactagattcatctagcactgttccttttggaccaccataaaaagggtttggcatttgaaatttattgattactcttttgtaatgtcagtggatacggctcttttctacaacagtcattttgtgcatttgaggtacagtgtactgtgttgcatagtaggaactaagaatatcttcagtttttaagatgtaggataagtaacaaatccagtttacaaaatttatataggaaatttcaataatttgttatcactgttatgtagtcttacttaacatagtaagctcagtgtatagagcagaatactgggagccttgtttcatgaaacaaggttgagtcagctactacttaattgtgaagattcagctgaggtctagcctgctctggaaagtttcctgttagcagctctcctcattcctgattccctactctgggctaggggttcccttcattgtgcttgttacaatatagttggcgttatttaaatttaatgctattaaaccaaaaattcttagaaggcagagatctcattgaaggtatcaagtaacatgtattcttgcctgtgttacttgatctagtgaccctgattattcattcgttaacaccaataatatctccctcaagagttttgctgaggcacagatgaaataatgtatatagaattttaagaagcaatacattcataatattgatatttttcaaatttattttaggctgttcttaacctatatgtatttcttgtataccattggtctctcaatcagtagctacaactcttctttccaggacaaagatattgtctatctgaatgactgctttgtaatctcacgccctctcatcctagtgagaagaaggcagttttagtgaaaggcagcatggttagtgcttaagagcatgtctgaagctagataaactgaaatggaatcctcactctgagacttggctagtgtgaacttgagtggacaagttattgacccctctgtgccttgatttcctctttataatggaagtgacagtggttctctctaccttctacaattgtgaggattaaacttttcatatgaacacagagagaactggacctggagcataataagcacttaggttagctgtttcttcctccgcactgttgtcactgggcagagacacacacatacacaggacagaaattaacatacgcacacccacacagagggatgatatgcccccacctctggggtagggatgatatctagttacctctcttgccactcacacacacggggagctaaatctgtttctaaacagagaaggcatagtcatacccaacaaaaaggctggagccctacactacagcccacacttgtagtcatggagaaaatatgaatatggactggcatacaccacataacacagtggggaaacatggagctgggaacagatgacagagaatataaatatgagccaggtagatctggattctgttgaactgcacaatacctgaggtgtttgagcaagcttattttaggaaatattcctcaccttgaaatttactgaatgtttcttccatatcagacacactgacacagcaatctccctgtaagcatagtcatctctaagtagaaaggaaaatttattttctccctcttagtcatattttgtctgatgtttatattctttgtatgtgcatatacatacaaaatatttgtttatattctttgtatgtgcatatgagtgtgataagttagttttggtttttacattagagatatttagagaagcagataatctttttcttcctttagtaaatcgattgggcgggtgtgtgcgtgtttgtgtgtaagaaggcaggccctgtggacattgctagtggttgaaactagaataataacaaaatgtaagttctgcttttctttgtgtcctcagcaaatgggaaataaagcgctgtcagtgttgtggttccagtggcacacatttagcctgctcctcattacggtcatgggagcaaaattgggagtgtttggaatgtaggggtattatctacaattcaggtaatttttttgtaattttgaataaagtttttattcaaatgtatatgatttaaaagtttttacctatatctctattatgctaacatggaaatttaaatctgtaggagagttccaaaaagccaaaaaacatgtattacccaattctaataatgtggggattacagattgtttgttggaagagtcatcacctaaattacccagacagtcacctggatcccagagtaaagatctactgaggtatgtattttgaattggagaaatacataaaaatctatttggagaaaattatgataggaaatgccatatacatttagaatattaggtgatcatacagtagtctagaagaatgtttttcagccttcaggacccaacatttgatcatgaaatcaatgcaaccagcattttaaagaaaatgaaatgggatagaatagaatacaaaataccaaactgcatcatacgtgggaaaagtgtatctatcctactgcatcatacgtgggaaaagtgtatctatcctaattatttttttgtgtactgagtaatgatgtaaaatatattttttattatagatcactttcaagatagtttgaaaaacactggtctggaaaatgtacttaaaatgttatttgattatagagtaagacaggaaagtaaaatatcaagcataccgtgtcaccttattaaaaggaaagaatcctatttaatatagaaatttttttttcttttttcttttttttagaaataaagtctcgctctgttacccaggctggagtacagtggcatgatcatggctcactgcagccccgacctcctgggcacaagtgatcctcccacctgagcctaccaagtggctggaactacagatgcatgccaccatgcttggctaatttttaaatttttgtagagatggacatcttgctatgttgcccagactggtcttgaactcctggtctcaagtagtcctcccacctttgcctcccaaaatgttgggattacaggtgtgcgccactatgccctgccattttttgatgttataatcattgtttgcctgtttactgtcaatggcaggagtctaaatgtcagctcttccctttagaaagtttaaggcatacatactattatcaaattaatttctgttcccatgagacaaaataggccgggcatcgtggctcacgcctgtaatcccagcactttgggaaacctaggcgggcggatcccgaggtcaagagatcgagaacatcctggccaatatggtgaaaccccgtctctattaaaaatacaaaaattagctgggcatagtgttgtgcatctgtagtcccagctacttgggaggctgaggcaggagaattgcttgaacccaggaggcggaggttgcagtcagccaaggtcgcgccactgtactccagcctggtgacagagccgagactctgtctcaaaaaaaaaaaaaaaaggtagcaaaataataagttactttcaaaatcttaaacatttaaataagactggaattacatctttataatgttgggtatttgttcagctgtagttaagatttttaagtttatatagatttgcaaaagagtttttagagccttgctttacccaatagggaagaagtagaaaattagtcgctaagcatgatgaaatactttcttgttaaaaataatttcaggctgggcatggtgactcatacctgtaatcccaacagtttgggaggctaaggtgggaggatcatttgaaccctggagttcgaaaccagtctgggcaatattacgaaactctgtctcaacaaaaatattttgagaaaatagccaggtatggtggtgtgcacctgtagtcctagctaggcaagaggctgaggtgggaggatcatttgagcccaggagttcaagctgcaatgagctatgatcatgccactatactctcacctgagtgacacagcaagaccttgtctctaaaaagtttcaagtttaaaaccttagaagatagtaaagagaatttttgtgaaaacatttgataactggatttgcagacaggtagaatattaagtactctttcaaaatgtgaagaatatctgttttactatgccacttgtgttagctctactgaaaaatctgttacaaatattgttataacacttttagtatcaaaatagatgttcacattattttaaaataattttaatattgagatttccaaagacgctacaccagggaagcttgactccttgctcctgctttaacatgcagtcatatttagaagaatagcatcagcattcccctgatccaggcaggagcaaggaatcaacctgctataaaaaaggtatgtttctgaagaattatcttacttccaaaggactttcgcttttattcaacatgagttaatgaagagaggatcataagaaaaaagaaaaagcaaaacctggcctacactagggcactgtaacgtcttggggtgggacagattcatacttggtatggaaaatgatccatgggcattgcccaaaacaagattatttttgagaacattaattccagttacagatggagaaactgagggaaggagtgattgagctggtttatatcgtcacttggattgttaaaacagattgctgggcttcatgccgacaggttctgattctatagatgcgctgtagggctcagtaatttgcatttctaacaagttctggggtaatgctgctgctgctgctgctgctggtctgggagcacactttgtgacttactgatctagactaaaaggtactattttaggaattgtgaattctgtttataatattagctctactgttaattatgactttatgatttaaaatatattgtgtaatctctcaaagacattttcttatatagtaaggagagattacatttgctttttttaaaaaaggacatagtaaatgtgaagtaaactacaattaagaaagttaattatagccattagccaggaaggtgagagtttgagcttgcttcattcattcattcattcattcattcattcattcatttatgagacggagtttcgctcttgttgcccaggctggagtgcaatggcgtgatcttggctcaacgcaacctctgcttcccgggttcaagtgattctcctgcctcagcctcctgagtagctgggattacaggcatacgccacgacgcccagcttattttgtattttcagtagagacagggtttctccctgtgggtcacactggtctcgaactcatgacctcaggtgatccgcctgcctctgcctcccaaagtgctgggattacaggtgtgagccaccgcgcctggcctgagattctgattcttaaaccggaattcactggttggtcaaatttgagataattatctatcaactttcttgtacatgattctaatttggtaaaagattggggtgaggaatcaagaatttaaaactaagattatcaaataactgtttttggttctagtagcagccattgttacaattttgggtgggaattggggaagaatatcctattaatctttttttcccctcgtcttgttttattggctatataactgctgtttcacataaagtactttaaagtacttatctctatatttaaattcatgttttataggcaaggcagcaaatttagaagaaatgtatcaacactattaatagagttaggattccaaattaaaaaaaaaactaaaagattgtatatcaacaaagccaatatctggaatagtgccttagatgcattcagaaatcgaaactttaatccttcatatgcaattgaagtagcatatgttattgaaaatgataattttggaagtgagcatcctggatcaaagcaagaatttctgagtctcttaatgcaacatcttgagaactcatcattgtttgaagggtccttgtcaaagaacttgtctctaaattctcaaggtaattattttatttattgttgtatataccaaatatcacatgtatagaaaaagagatagatagctggttagaattgatatttaatacctgtgctctaaatatactgttcactttgttaataaactactgatagaatcacaggaaagtgggaagggggagtgatagtttaaaaagtaaattttgtggtgaaacattttttatttaagaatatacattctttatagcaatattctccttaaaataatccataattaagtgtaactttatcttaactctaatttcattttaatagagtggccaaatggggatgattatttgaattcttcctgtttgtatatttggaatttgcggttaacatagagtttttataacatagtttcctggtccacatgtaaccaatttttcagtatacttttgtttgcaatatttttttttttgcacaattatgtatatgatggttttctgtcttcactattggtgagaacttaaggtaattataacaggcatctcaaaacagtgggtaattctggcattctcttttaggggcttttatactacttttgctgtaataggaaatttgaaagaaaatgagaaggcatttcatttcatttgaatttcctactatattttctgtaaacatcctaaccattgcctaaagcatcatttttactctgtatagttcacacagtttaattataaactccctttaaaataaaatgtaaaaataaagaaaaaactttccaaatagtaatgttaactcaaggcagctttggtatggtggagagtacgtgaatttaaatcacagaatctgaattcaagtttgtacacatctagttctttacatccttaataactaactctctctggatctcagtttcttcatctgtaaaatgtgactatgaatatgtagcttgtaaggttattacacaggtattgttaatgtcacttattaataagttgctttcaacaatttaaaaattaaggaaaaatttacttgttttggcacatcaaagttgctaatacatttgaaatgacaattttaattcaagctctgacagtaaggtaagacagcatatactgttgggagtaaacttgtgcctttgggaaagattatttagtgatatagatcaagaaccttaaaaatgttcctatcctttgacctactaataccatctgtaggaatcctaatcaaataaatataaacaagaatatgtgagtatgttgactgtaacattatgtctcataaagttagaaatatcacttagccaggatagccagggggatggtttgcattatagtacatctctaagttagtctaaatgcatttattaactgtagatttgagtaattttgagtagtatgataaaaagtttacaatataataagtggataaagcataagtcaaactttttatatttatatacacaaagaggtacaagtacagtcatttgtcacttagtaacagggatatgttctgagaaatgtgtcagtaggcaatttcatcatgcaaagatcataaagtatacttacgcaaacctagttggtgtagcctactacacaccaaggctctatggtaaagcctattggttctagactgcaaacctgtataacatgttactgtactgaatactgtagacaattgtaacacaatggtaagtatatgtatatctaaatatacaaaaggtaatgcattgtgctatgacagtataacatcactaggtcataggagtttttcagcttcattataatcttagggaccaccttagtgtatttggtcattcttgaccacaacatccttatatggtgcatgactgtacaccaaagtgttcacagtggttattatggtggtaggtttattgtgttttatgttttctacaatagatttttactttatattcagaaaaatgtgtctttttttatattttaggtaagatctatattttctacataatgatagcttctaagaattatatttatctaatgcttagatttttggactaatttttaatataaaaaatgatggttatcttataataatagaagtgtatttgatatattttcatctgtatttacagctctgaaagagaatctttactatgaagctggcaaaatgcttgccatttctttagttcacggtggtccttcacctggtttcttttctaaaaccttgtttaactgccttgtttatggaccagaaaatacccagccaattttagatgatgtttcagactttgatgtggcacagattataatcagggtaagcaatgtatctgtttattaaaatgcacactacattctaggtatcttttaatgtaaatgactgatctgcaataaaataatagtattatctatgaaggagttagggattgtaaacatatatttctgtttaccagtggagttctgaaccagttaaaagatagttttaaaagtcagatggctggagattaaagtgccacgtttaatgttggtaaaaccagttggataatgtgattttggtctgtgttcaccatggcttgtgaatactcctcagaaatacatggatttgcctgccttgctagagacaacgtgaggcagattccctattgcaagctagaaagcagatgaaagtgcactttgatggaggccgatgggtctgaagagaggaaggatttggcttaccagttagaatacttttccttccttctatagggaggtatgaatgatagatggagagaaagactaggctgaatttcttccaaagggaaacaagtggtagggatcggggaggacttaatgcgtccgcctaaaaatagttcatttattcagcacttataatgggacctgtactaaacatgtcacatgtgcaaacactcatttatcataatgccatataagtgtcattgccaacatgttactgctttaaaaactgagacaatgcaagccatttaacttttcttccttaacctccctcctacttaagcatattctatccattgtctcaattaacaggcagtgttgtttaatgattaaaagcataggccttagccaggcgtggtggcatgtgcctgtaatcccagctactctggaggctgagtcacaagaataatttgaatccggcagatggaggttacagtgagctgagctcacaccactgcactccaacctgggcaacagagggagacactgtctcaaaaaaaaagcacaggcttggaagtcagattttactttgaatgccaactcttataactactatatgttgtgtcactttgggcatattaatcttactaaacctcagtttctaaatcacacagtaagcactattgaagtgtgagttgctacagtgtattacaacaattctgtttatttgccctaagactgcttatcctaacatcatgttttaaattgaccctttaattcttcgtttttctttttgtgccctctttactaaaaaaaaagtatatttaagcttcattgtctctacttcgtatttcctatttatttcttgtaatcaggcttctgtccctaccaccagtctcaagttagctagttcatagtttatatccagggagctaaatatccatgtccaaaggccttttctaatttttcatctgctgtgacttctgcaattaccacttagaatttctctgcaatattttatttaatattgtacttcctcctacttctgatgattctctcttctttaatgcttcttacttcttcttacccctgaaacttagcatttttcagtgttgtcttaacagtcatcattctttattatttggagagcttcttctctcctgtaatctttctgaatgatttacagacctgtatttttgagcccccggacttttatatacagataagacctgggtcttgctagcacattgagtctaacatgtttaagataaaaatagtatttttcccagaattttttgtttgattgttttttgtggggcttttttgtgtttttacctgtttgccttttctttccaagagacttcttacttccaagctgtcttggagagtcattttcatactcctccattttccagttatatgtcaagtcacctgcctctaagactgacttattgtcaacctttccttcctgtttctagtgtgcctattttaccaaactcaaattttccctaggcttagacaattagaatgttgttctaatattcttatttgggatgattcttccaaaagtacagttttgaccatattgctttcttcctcaggaatcccccagtggcttctcattgcctgttgaacgaagttgaagctcttcattagggcatttaagaccttcacctctcttcatggctttatctactccagtttctgtactttttatccagtgtttgttcatttatttaagaaatactatgtattctgtactgttttgttactaaagatagagtagtgaagcaaagtatctgccttcttggaatttacattaagagagaacacagaagataaacaacaaatgtaatatgccatcacgtagtaaaatgtattataatgctaaataaaacagaatatggccgggcgcagtgggtcacgcctgtaatcccaacactttgggagaacaggtgggtggatcaccggggtcagcagttcgagaccagcctggccaacatggtgaaaccccatctttactaaaaatacaaaaaaattagccaggtgtggtggcgcgcgcctatagtcccagctgcttgaaaggctcgcttgagcccgggaggcagaggtggcagtgagccgggatcatgccactgcactccagcatgggcaacagagtgagactccatcccaaataaataaatgtatacataaatacatacatgcatacatacaacagaataaaaggagatggataagggttggagtatatacaagttaggttttaggctaaacttctgtatctcatagacccagaaagacagtggctcaaacaaggcagatgtttactgttctgtaaaatccattgtctagattttagggtaagagttggcaaaaaatggcctgtaagtcacgttctggcttgttgcctgtttggtaaatagttacattggaatgcagccatgcccatttgctactgatctgactgctttcacgctacagtggcagagttgagtagctgcaacagataccatatagtttgaaaagcataaaatgctatctggccctttatacagatggccctctgttttcgagatagagttgtgatttacaaaaccgtctaaggacttgagttccttcctctcattatcgtgtaacacttagcattattgtttgcatccacatggttgaagcttgctcttaaaggagaaaagtggaagttgagagcagggaagtttgacatgttgtttttacttacatcccattgaacagtcatgtagccccacctagctgcagcaaaagtttggctatgtgcccagctgaaactcagggttgagggtttgcagggatgaggcaacatatacccaattattactccgacagggtgtaaagatagtattttgagcagaatagtcatgaaaaacttaggagatttcagcagagattttgaatgaatgaaaagaagtcatgtaaatctctaagaatgttttaggaaaaggaaattgcaagtaaattttctgttaatggattgtttcctatttttaactttctccatctgtacctttaagagctaacctgtatgaaagtgtcttgcacataaatggccaagtatttctttgtttatgctgttcactaaaatattcttgataaaattctgtccatcttttaattctcagctgttactctttttcatgaattctcaggtcatctttcttgcctatctagtactaggtaacttttctctttttttttcttttctttttaagagataaggtctcagtctgtcacccaggctggagtacattggtgtgatcatagctcactgaacctccaactcctgggctcaaaatccttctacctcatcttccagagtagctaggactacaggtgtataccacccacaccaggccttttttttttttctttagaggggggctagctgtgttgcccaggatgttcttgaacttctggcctcaagcaggcctcccacctcagcctccctagtagctagtcttacctagtgctatataatttttcaatgtcagttatttccttttttataaatagtttcacgtagtaaagtggcattatactctggatttcttgaaggcagaaatagacaaatttgttgaactggatgatcagacatttattctagaagaatatttcttggtttacttttactgcacccatatgtactaagaaatttgagtataaattaacaagtatcatttgaaatgtgcatgtcactcaaaagtaaatgagtaaagtggctgtattttctccttcattacagataaatactgcaacaactgtagctgacttaaagtcaataataaatgaatgctataactaccttgagttaattggatgtctcagacttataacgacattaagtgataaatatatgttagtaaaagacatacttggctaccatgtaattcagagagtccacacaccctttgaaaggtaagttgtttctattaatatatggctctttcaaattacatgtttaaagtggttaattatcttgtaatgtgagatatatttggtaataagtgagatgtttttctcagaaaaaaatttaaatgctatttttaaataataacttaagcctttttaggatggttactgttctgatcatttaataagcattgtgtaggtcgggcatggtggctcactcacacctgtaatcccagcacttcgggaggctggggcaggcagatcatttgaggtcaggagtttgagaccagcctgaccaacatggtgaaaccccgtctgtactaaaatacaaaaattagccgggcgtggtggtgggttcctgtaatctcagctacttgggaggctgaggcaggagaattgcttgaacccaagaggcggaggttgcagtgagctaagatcatgccactgcactccagcctgggtgacagagcaagattccctctcaaaaaaatgaaaaaagaattgtgtaaatgtatgatgctttcatagaaataaccactgcttcagattataatttttttctaaaaaatattctttttaaaactcttaccacatgagccaactattctgtctctgtgcattcatttaataactatttattgagtaccttttatctgctgggtaatacatatattgaccgttctttgattaacaaggtatgtatgattcctgctgtcctttagtttagaacactggtctaagttagacaacttatgtatctccttacactcttacaatttttttaaacaatggaaatacacatatgaaagtctgtaatcaccatccagatctaacacttattaacttgtgcctgtcttgttcatctttatcctacccttgttattgactccagtattattttaaagccaataccagatatcatctcaaacctgataaattcatttaaaaaaaagtagtatcattaatccatagatttaaatatatttgatgtgtttaaaatctttatagttactattactactgaagtttatatgtcttggaccagtataagtctctttatattattgtttttaattctttcgatgtgagccttaatggtctttgtaagcttttttgctatatggtatcacaaggtgtttcagactcattttgtacattttagcctaaggaacctttgttatttttaatgggaaatgggtaattcacaaccacagtctggatgctagagattcttagttttggtgggttggtcatggtatctagaccttttcattgaacccaaattagaaaatcaagggtttttaaatctattttaatctattttgtttttttttttaaaatcaaacttttttttaaagatacattatgagtgtgtcctgataattctaattcagattctctattgcatgatttttacttaacattttctttgtcctgtgttgagaattccagttcttaatgacactggagaatttaagtatgaagcaactatttcatgtgatttattccacatttcataaccaatagtctcagaataacaatactaacattatcaaattgttgtgcttataagtcattggaatattttatgtgtggctaaaaattgagcataaattgcattttcattttttatttttagtgattagtttttattaacatttcattttattttaaaattatataaaatgttttatatagttccaaagtcaaatgtataataagaatatattgaaagtatatacaaagaagtataggtttcatccttactatgtccaccattcaaccctttatgaagtaaccattttggcaacttttttgtggtttattcttttattatttgtttttctttttaatgataacagataaacatgtgtgttcttagctcattttatgctgctataacaatacctgagacttggtaatttataaagaaaagaaatttatttctcacagttctggaggctgggaagtccaaaggcatagtgccagtatctgctcagcatctggtgagagctgtcttgctgtgtcatagcattgtggaagagcaagtgagcactcaacccataggtgtgccctcgaaatcaggctgaacttaccctttttatcaggagctcactcccacaataatgatattaatccatttatgagggcggagcccttgtgacctactcacctcttaaggaccctatctcccattgctgttatactggccattaaatttcaacatgagtttcgaaggaactcatttgaaaccataacattctgctcctggcactctaaaactcacgtcccactcacatacaaaagagtatctgaggaggtgaataggaaatttagaaagtcaggcaaaaatgatatgtttgttctttgcttattaatgaaaatgtgcattttaaaatattcagttgttacttgcatttcttttgttaatcatatattttttgttcattttccctattgatctttcagaagaatttgtattctttgcataaaattaattttctgtcatataaaatatctgtcatttgctttatcttaatttctttttagcaatacatgggttttaaatttttatgtaatgaagatttatcactcttggtaatatctgggaaactttatttttataataattagctttgaagtgtaaaacacttcagattttgatgtctttcttactaataaaaacttgttagttttgaaactataaagccaaataatgtaggtacataaaatattcatttgatattaatgtatttgcttgttatggatttgaaagtatcatgtgtagtatatccatatcttctctttttcctcacatctgaaaatatgattgtctcttgtgggggttttttggttgttttttaaaaatcattagctgttttgaaaacatgccagataaaatgctggaaatattccctaatataataccaaacacacatgtatgaatgttggctcattatttttcttctcttaagttttaagcagggtctgaaaacccttggtgttttggagaaaattcaggcttatccagaagcattttgtagcatcctgtgtcataaacctgagagtctttctgcaaaaatccttagtgagctttttacagtacacacattacctgatgtgaaagctttggggttttggaacagttacttacaggctgttgaaggtatgtggatattttattttacttttaacgatctcagaatatttgtttcagcatatttgttgggggttttatttgtgtatgttttgccttttggtattaatattaagatgctaactccgtatttacaaaagaaagttatttcaaagcaagtttatatgactgaattaaaaataatgagaaaagattacagagtaaatttatattttgtaatttttttctctagataagtttaggtgaaaggcattctttctagaaaacattattgtcaccgcatagaacagttttaatcctaataatctatttcatcattttcaatttgaagttaaactaaattattcttcacccactggtcagggctataacaatgatatttatcattgagcattagcagtgtaaaatcattctgcctgatagagtggagaagaatttaacttatagttgaaattttgtttagctagatttttggttttttaccgtttagtctttctgtctgtatttgttatatacaataagtagttgtactaaatgattgtattagtccttctactttgagattcatttatgtactgtttgcctgttactacatctgactttgtgatttagtttgcccaaaacaaatgtgggagtctgtgcctttcagtattccaagtctatttggagaagaatctatgatgatagcaatatataacatggatttacttttgtttcttttactcttttattggtaaattttttcagatggtaaatctacaacaacaatggaagacattcttatttttgcaactggttgcagttccattcctccagctggatttaaacccactccttcaattgagtgtctgcatgtggattttcctgttggaaacaagtgtaataactgtttagcaattcccatcaccaatacatataaagagtttcaagaaaatatggacttcaccataagaaacactctaagactagaaaaggaagaaagttctcattacattggacattaaaatgtttccttgaacaaagagaagcttctttaaaagctgctattgataactctcttttatttcactaaccttttcatcatcactttgaacaaactagttagcttcttgacctaataaaatttatgatatgaatataaaggaatattatagccacttaggctaaaaaaaggttttttttgttaaagcatactagtcaaaattggtgataatttctcattttcttgatatagatacttcataaacctcaatataaatactctcaaaatggttgtatggattttatttaggtatggtagcatggttaataaaagtaaaaactgttttactcacattttttgtaaattaggattacatatagaatgccacaatttctctaggtttattcaattttcaaattattcctcattttattttaaagcattaaatagaaaagctaattggttaaattttgttatataaatcagagtcatatattctgggatttgtgttactatgcatacttttctaggatgtcaccaaattagttgtttaaaatgtttttagattactgatttatattaagatgacccacactgcaattagattatgcctagtgggaagtattatataaaaagcagaattaagctgggcacatgtgcttgtaatctcagttataagggaggctgaggtgggagaatcgagatactcagccagcctggcaatgtagcaaagactccatctcaaaaaaaaaaacagaattgcacaaattttctggaatctatggacattccatgagcttaaacacttttgaggtggataacatttagttgaaaatacctaagaaagtgtgtcttctttaaagccttggctttaatcatgggaaattgttgttgttgttgttgttgtttgtatcctatgtttggtattctgtatgtctgatccataatcattttagatatttgaatgatctctgtggattggtaggtttggccatttgaccattatttattatcaagttggttgtatgctaaggtaagttgacgccatagcattatacagttatcttcattgctcttgaatgatatctgttatataagcaatgtataaataaagtaaaaaggatagaatgaaaaacccattctaatgtcaccactcagagataagtaccgtatttctgtgtatccttctataaactctttacttctgtttcctttattttttaactttaataatgctactaaaagacaatacctaaaagtaactgtactaacaaagtgctaacaatgtgaaaatatatagtcccatagtcatgtccccatatttatactcccacagaagaaaaaattggaaaacaaagtctgatgtccttaatctattaacatatttaaatgatataatggttcagttttccatgaaagtaaatcattatgggaagtaaaatgttttaaccatatttttcttaatacacaaagcaggtgtcagctgttgtattctcacccttcttaagaaaaatcattacattattgatattttttaagtaacagaatagatttgaaagagataatatatctcttaataccaaaggaaaactaaaacataattctagtgtacttttctttgttccctcatgtctttttcaatctgtacactaacatacctagcaaatttgttttactttaacttgaaatatttaagaacattaaacaagacatttctttggctttggttgaatttttttgtctcaccaatagtaattgaaagatcaattatcaaagagtttgaatagctaatataaaccccaaagtcaccatacagtttttattccaaatatgttgataaaaagatatttgtttctttatccaccttatttttattacagctaaaaaccaatacaaaccaataaaacctagttaaagctattttctggtttttagttgcaattaatttcccctagggtagaaattaaagctgattaagtcacacacacatactttgttggggtgggggtggcaggtggagaggcagtgtacttgggttagctacaattaaaaacagtatttcaattcctcatttgacttattttatatatagacagggccttagtgataagatggtgtaaataatttaggatattcatgttttaaagtgaagcataaatatttattttgcaaaatgttttctagtttgaaggatgttccattattaccatttttagattaatctgtatggtcaaggaatatcagagaaacctgtaggttatttattttctgcagtgtcattttgtcaaatggttggtattataattgttcttttcttattaattttataaccagtgcataattcttacattagattttaaaaaagaattatgctataaatctttataaatgtgtacatatatttcttaaatattgcaattgcctaaatgttgtatattttaaggctgttttctcttgctcttaatgttgaggaaaactataaattgatctataatgcatctactgttaatggttttggttagtttgatattcattgtttttaaacactttccaatatggaaactttaacaccttttatacaattctctactattcaagatattctttaaaatatctcaccagaaacttacaattttatactttgtaatttttagtttctgtaatttgaggaagtgactttttttgtttgggttaagtaaaaagcctttgattgattaccagcatgagaattcaccttggtttctattttatgcatttgtaaatttttcccctaattatatggaagctattggaacttttgtattcagtgctaaatactaagtcaaggggagtatattaggtaagttttttcagtgactgtgcctttagcattcagtcattataagaaaatgatcagaacaaaatcattacattataaacatgtaattcttttatatagtgattatcatgtactgcattgttactttaaaataagctattaaactagtttttatggttcaagtaatgcaatacaaagtttcatgcttcaagtaatgcaatacaaaacataacccatttaatgatgaattacttgaatgtatattatctgtggtttaggaaaatttggattgtcttgaagagactcagttttcaagttctgattttgaccattatctcttctaattcataaacatatcccagtacctacactatgccaggtattatgctaggtgatcgtttatatgtcagcctatttcccccccttttaaagactgccagattaaccaaaaagcgtgacatttataacaatgttttataaataaataaatgtgtttatgccactaaaggt

SEQ ID NO: 67 - DNA, 21474 bp, Homo sapiens
ggaagcgcagagcaggttcaaacacagacggcgggtgaacatggcgtcctcgacttggtctgagacgtgataggcctgccttctggttgaagatgtggcgagtgaaaaaactgagcctcagcctgtcgccttcgccccagacggtaagcgggagatctctggcggagagaactgggccgggctgctgtcgcgggggcaccggccgtgtctactgtcctggaaagttgggtcgagcccggggttgggggcttgtggagtctttgttcgccttgctgctcctgcgcgactagggtgcgagcgtactcttctaatcgcattttgggcttcttagggagggaggaggggcgggctggcagaacccaggcttcctcacactcgccctctttcttggtttctttctcagggaaaaccatctatgagaactcctctccgtgaacttaccctgcagcccggtgccctcaccaactctggaaaaagatcccccgcttgctcctcgctgaccccatcactgtgcaagctggggctgcaggtgagattcgcctggacagcttctcgactgggctgtttgcccagggtgagagctcaggggaacagagggccagggctacaataattaataacgataatgaagtcttctacgtcggtgacatccatttacagctattcaggccaacagagaggtgccctagggtggttaaaggaaatccagtgagaacttgaatctctgtttagctgttagtttttattacctcctcctcctcccttcgacctttatcaaactattgagaaatcctaccaccctgattagtgctcttcctccaacatggggtcacttacggaaaggtcagtcacctgcaagattgaggcaatatccatttactctaggaggtagttagaactctcctgggatcaagttacaccactggaaggtagggtacttgaatcaccttagtttaaactagctccttgcagaattgccctcactgatttgtacttttgttaaacgttttgagagacgtagccatgtagaaactgcatttcagttgctgtcaaaacttgtcaaggaagcagcttgactcctgtataagattcctccaagaaaggctttaggactaactgcctggaaaaattgtcttcctgaagaaattgctatccttttctttctgataatgagaactatgtagtttaccatattttccctcttgctctgccttctagaaagctcaaggccaaactggatcatcacatacagctactgttatagctgtataggaagttttgcttcctcttttttgaccatgactttgttatttcattaatcgtatctattcattttcatgcatatgaattatttttggaaggagatgggatatcaataaaataggtatgaggaggaaagaagagtgtatagacagatgacatcctgagtaacagaagtatgatgatagcatagcagtctttcttgaaagagttgcaaaatacctactgtccaatagaactttctgggatgagggaaatatttgataatctgtgctgtccagcatggtaactactagtcacatggttattgagcacttaaaacgtggctgaggtgactgaagaattgaatttttttgtttttgagacggagtcttgctctgtcacccaggctggagtgcagtggcgtgatcttggctcactgcaatctccgcctccagggctcaagcgattctcctgcctcaggctcctgagtaactgggattacaggtgcacaccaccacgcctggctaattttttgtatttttagtagagacagggtttcacaatgttggccaggctggtctcaaactcctgacctcaagtggtccgcccgcctcggcctcccaaagtgctgggattacaggtgtgagccactgtgcctggcctgaataattgaatatttaatttaatttaatttaattaatttttttttgagatggagtttcgctcttgttgcccaggttggagtccaatggcgcgatctcggctcaccgcaacctctgcctcccgggttcaagcgattcttctgtctcagcctccggcatgtgccaccacacccagctaatttttgtattttcagtaaagacgggtttctccatgttggtcaggctggtctcgaactcctgacctcaggtgatctgcccgcctccgccttccaaagtgctgggattataggcgtgagccactgtgcccggcctgaatttttaattttaatttcaatagctacatgtggctagtggctatcatattagacagtacagcttaagatgaaaaataaataagtactaggtggaaattagctctatagagcttatagaatttattatgattattaattaattaattaattttgagatgcagttttgctcttgttccctaggctggagtgcaatggcacgatcttggctcgttgcaacctctgcctcctgggttcaagcgatcctcctgcctcagcctccctagtagctgggattataggcacgtgccaccatgcctggctaatttttgtatttttaatagagacggggtttcgccatattggccaggcttgtctcgaattcctgacctcaggtgatccgcccacctcagcctcccaaagtgctgggattacaggtgtgagctatggcgcccagcctgaacttatagaatttaaccataattatttaatcacaatagcagaatactagattgaaatcgaattctccttccctcttaactgctgggcttactacctccagatgcagtcagctacacaatgaaaagggtttttccccaataaaatagcaattatttttgttttgtaaaaatttttttttttttgagagtctcactctgttgcccaggctggagtgcagtggcacaatcttggctcactgcaacctctgcctcccggattcaagcaattttcctgcctcaccctcccaagtagctgggattacggtgtgtgccaccacgcctggcagattttttttttgagacggagtcttgctctgtcacccaggctggagtgcagtggtgccatctagggtcactgcaacctccgcctcccaggttcatgcaattctcttgcctcagcctcctgagtagctgggattacaggcatgtatcactacgcccaggtaatttttgtatttttagtagagacagggtttcaccatgttgggggtcaggctggtcttgaactcctgacctcgtgatctgcctgcctcagcctcccaaagtgctgggattacgggcgtgagccaccgcgcccggcctaattttttttttttgagacaggatctcactccttcatccaggctagagtgcagtggtgtgatctcggctcactgcaacctctgcttcccgggttcaagcaattctcctgcttcagcctccccagtagctgggattacaggcgcgtgccaccatgcctggctaattttttgtatttttagtagaggcggggtttcaccacattggccaggctggtctcaaactcttgacctcaagtgatccaccctccttggcctcccaaagtgctgggattacaggcgtgggccactgcacctggcctgttttgtaaatttttgattattaatagatattaattgtttgaagcatttgaatatataaatgtataaggaagaaatatttctggtatcttagataaatgtcatatttgacagttctttcatacatctctttatgtgtgtctattttgtatatatgcacacacacacacacacactcatctttatattgtctttttttttttttttttgagaaggagtcttgttgtatcgcccagattggagtgcagtgccgcgatcttggctcactgcaacctctgcttcccagattcaagcgattctcctgcctcagcctcccgagtagctgggactacaggcacccgccaccatgcccagctaatttttgtattttgagtagagatggggtttcaccatgttggcccagctgcactcgaactcctgaccttgtgatctgaccgcctcagcctcccaaagtgctgggattacaggtgtaagccaccatgccctgtcttttttatttttttttttgagacagggtcttgctctgttacccaggctagagtgcagtggtgtgatcttggcttattgcaaccttgaactcctgagctctagcagtcctcccacctcagcctcctgaatagctgggactacaggtgtgagccatcataccttttaataatttcaaaattaaagtaagatacatgaaattacaataaaacataacagcataacaaattactataaagtacacatccatgtaactaatacccaggtcagtaagtaggacagtaccagaatatcagaagccctttttaacctaaccttggttttgtttcatccactaatataaatgagaaatttcatatgtttgattattattattattattttttgagacggagtctcgctctgttgcccaggctggagtgcagtgtcacgatcttggctcactgcaagctccacctcccgggttcacgccattctcctgcctcagcctcccaaatagctgggactacaggtgcccgccaccacagccagctaattttttgtatttttagtagagacggggtttcatcgtgttagccaggatggtctcgatctcctgacctcgtgatccgcccgcctcagcctcccaaagtgctgggattacaggcgtgagccactgcgcccggtctgtttgattatttttttaataaataattggactttctatctaaagcttccagaatagttttttcttcattgtagcacagaaattttataattatgtgtctagcatgtatcttttctagtcagtcctgcttagaaactggtgagccattttaatgtgcaaactcaggtctttcattagggtagttttcttctaatatttgttaatcagcgcctcatgtatatatgttctcttctggaatttcttttatttaactgttaggtatcctgggtttatcttctaattctcttagctttttcttcagatttacatttctttatatttttatctttgctttaagatatttcttccacttgtccaggccagtaattctagtttcaactctaataatttactctttcaattcattttactgacattttttatttaaaataatatttattatttctaaaatgtctttgtgtgtgtatttatgttgtagttaaagcttaagtactcgttttttttgttgttgttcagattatcatctgtgtcttccagcagctctgttttgttagggtctaccttttttatttatttatttatttttttttgagacagggttttgctctgtcacccaggctggagtgcagtggcacgattttggctcactgcaacctctgccccctgagcttcagtgatcctcccacctcagcttcctgagtagctgggactacaggcacacatcagcaccaccatgcccggctaatgtttgtatttttagtagagatgaggtttgaactcaagcgatccacctgcttgtggcctcccaaatgctgagattacaggcgtgagccactgcgcccagccgagagggagaagaacttgtaccaactctagattctgacagagcttaagccttcactcacaccctatggacccctcctatctgttcatctagaagtgcgttagagttcagaatggagatgagtggggtcactttcaagctaccatctgcccacgatatggatctatattctcagcctgtttataatgtaggctggttcacttggaaggacccaaaatggcttagcagcttttctttccctactattgggtctctatatgagcaacaaagattagccaagttcttacctaagcagaggtagtaagaattcttttcttttttgagtgcactatcttgcacctgtaattgtatgtcgggaactgaattgactgccttagacaactacttttgtttcctttggcaggaaggcagcaacaactcatctccagtggattttgtaaataacaagaggacagacttatcttcagaacatttcagtcattcctcaaagtggctagaaacttgtcagcatgaatcagatgagcagcctctagatccaattccccaaattagctctactcctaaaacgtctgaggaagcagtagacccactgggcaattatatggttaaaaccatcgtccttgtaccatctccactggggcagcaacaagacatgatatttgaggcccgtttagataccatggcagagacaaacagcatatctttaaatggacctttgagaacagacgatctggtgagagaggaggtggcaccctgcatgggagacaggttttcagaagttgctgctgtatctgagaaacctatctttcaggaatctccgtcccatctcttagaggagtctccaccaaatccctgttctgaacaactacattgctccaaggaaagcctgagcagtagaactgaggctgtgcgtgaggacttagtaccttctgaaagtaacgccttcttgccttcctctgttctctggctttccccttcaactgccttggcagcagatttccgtgtcaatcatgtggacccagaggaggaaattgtagagcatggagctatggaggaaagagaaatgaggtttcccacacatcctaaggagtctgaaacagaagatcaagcacttgtctcaagtgtggaagatattctgtccacatgcctgacaccaaatctagtagaaatggaatcccaagaagctccaggcccagcagtagaagatgttggtaggattcttggctctgatacagagtcttggatgtccccactggcctggctggaaaaaggtgtaaatacctccgtcatgctggaaaatctccgccaaagcttatcccttccctcgatgcttcgggatgctgcaattggcactacccctttctctacttgctcggtggggacttggtttactccttcagcaccacaggaaaagagtacaaacacatcccagacaggcctggttggcaccaagcacagtacttctgagacagagcagctcctgtgtgggtaagcgcccctatgtccttgcacctcgtgagttccattaccctggaccttcccctcccatcccttcccctccttttcttttcgtcatgttcttctctttctgctgcagccggcctccagatctgactgccttgtctcgacatgacttggaagataacctgctgagctctcttgtcattctggaggttctctcccgccagcttcgggactggaagagccagctggctgtccctcacccagaaacccaggacagtagcacacagactgacacatctcacagtggggtaagaaggttcctctcaaagcttgagggatcccagtggggatccttggaatttaagctgagaagctgccagagggcaaaggggactcctatcacaggcttatacttagaacatttgcaaaagctgagaatctgggcagtcacaatggctgatgcctgtaatcccactgctttgggaggccaaggtgggaggactgcttgaggccaggcatttgaaaccagcttgggcaacacagcgagatcccatccctacaaaagatttttaaaaaatcagctggatatggttttgcatgcctcactactcaggaggctgaggcaggaggatcatttgagcccaggaggctaaggctgcagtgagctatgatcatgggcaagacagtgaaaccctgtctcttaaaacaaaaaagctgaggatctggaaaatccccttaaagctgtgggtagtcactctacccctggggtacatcagaactttccaaaggagtgcaagcaaggaaacttttaaaggaattggtttttagatcatcatcttccacaagtattctttttcttcgttttttgcattggtagactatatttaatattttaagaaaaattatgaataagcctaaaacattttttaaaataatttttaatttttgtggttacagagttaggtaaatatattcatggagtccatgagatgttttgatataggcatgtgatggtcaataatcacatcatggaaaatggaaaatggagtatctgtatctgtcccctcaagcatttatcctttgtgttacaagcaatccaattatacttttagtttttttttttttttttttttttttgagacggagtctcactctgtcacccaggctggagtgcaatggcctggtctcggctcactgcaacctctgcctcccaggttcaagcgattctcctgcctcagcctcctgagtagctgggactacaagcgcatgccaccccacccggctaatttttgtatttttagtagagacagggtttcactatgttggccaggctggtctcgaactcctgccctcatgatccacctgcctcagcctcccaaagtgctgggattacaggcgtgagccactgcgcctggcccctgttgtttatgtgaagaagatttctcagtgtttacatctgtcagaatggaaaggagtcagctggcatagtggctcacccctgtaatctcagtactttgggagggtgaggtgggaggatcgcttgagctcaggagttcaagaccagcctgagaagtatggtgaaacctcatctctacaaaaaaatacaaaaattagctgggtgtggtggtgtgtgcctgtagtcccagctacttggaaggctgaggtggaggatcacttgaggctaggagttcaaggctgcagtgaactgagatcttgacactgcactccagcctgggcaacagagccagaccctgcctcaaaaaacagagtcacgaattgttgctgaactatttcttattgctggaattatagtaatccacagatatacgaactaataaggggaaggaatctccatcgatttcattaataggtgattcccaattaaattttgccgagcatgtttattttattagaaattatattacagtgactaatatacaactgattaaaagatttctctatcctaaagaaagctttttcactttaaagccttccggtcaaaggaatttaaaggaaattttaatttaaatttagatgaactttcattgttgttgcagagatgatggttaataacagattttatttttattttttgagatagtttcttggtctgtcacccaggctagagtaccatgttgcgatcagggctcactgaagcctcagcttccttggctcaggtgatcctcccacctcagcctcctgggtagctaggactgtaggtgtatgccaccacacctacctaatttttttgtatttttagtagagatggggttttgctatgttggccaggctgttctcaaacccctgggctcaagtgatctgctagcctttgcctcccaaagcactgggattacaggtgtgagccactgtgcccagctaataacatactttaaagcataaaaatatattacattaggctgaaattctgagaaaaataaaaaatatatgttcaaagagaaaaagggatgacataataaaatttctgactgctaagaagagctttttcttgtatttttaaaagatagcaactaggtatctcatcattttggtgtatgtagtatttatgccactggatatatttaagagtaatctaataattttattttaggctgggcatggtggctcatacctgtaatcccaacactttgggaggccgaggcgggaggatcacctgaggtcaggagttcaagaccagcctggccaacatggcgaaaccccgtctttactaaaaatacaaaaattagctgggtgtggtggagggcacctgtaattccagctacttgggaggctgaggcatgagaatcgcttgaacccgggaggcagaggttgcagtgagccaagatcgcgccactgcactccagcctggaggatagagtaagactctgtctcaaaaaaaaaaaaaattattttaaattgtcaatattggtaatatgctggacattacagcctttgcaacaatttaaacttaagggtacttagtttttgcaggaaatattagaggaaagtagctaaaagaccactgttggcccaatgtggtggctcacgcttataatcccagcactttgggaggctgaggccggcagatcacttgaggccaggagtttgagaccagcctggctaacatagtgaaaccccatctctattaaaaatacaaaagttagctgggtatggtagtgcactcctgtaatcccagctacttgggtggctgaggcatgagaattgcttgaacctaggaggtagaggttgcagtgagccgagatcacccagtgtactctagcctgggcaacagagtgaggctgtctcaaacaacaacaacaacaatgttctagaggattgtattacaacacaggcctaagaaggaagggaatggtggcaggtgaaggaattgatagcacctcaccattgtggctgttgagataataggtggctgctgctaagaagagatggtccccaaatgtgcagagacctcctttgagttgaaaatatcctcaaagtaatgaccttaccatttgccaaaaatcctggaaaccataagctccatgttcctccagctgttcaatttccctcctgttttcttatctttgtgtcctttcctcttgttcttgaccttgtttcccatccctgaatctgccatgcatcctcttcccctgaaggttgccaggtccctttgtaggccactgaagcagaaccaaagaggggaaatgacatacctttagccattctccatcagcatgccatgtccttgctgcctggctgcctccttcacattaatctcatcacctgcctgactgtccagctgagcacgatgtgagccctatccaagctcatgtgctactctgtgccttatttcacgatgcagcagtgaatgataactgctttgctggggaagggagccatgaactccaagaaatcagcagtgctgctccagtagtaacttttcccccagatgatggctgccttgcctcagtaatgaagactcccacttttctcttagaacttgtcttctggggttctactgcctttgagatcatacctacttactctatgcatactatgagttttatctatctgacccaggataatgagcagacaattaagaaagtaaaaatgatgaataaatacctaagaaggttagcattattggcaataaaaaatgcaaattgaacagtgagatgccattttcttgtgactcaatagcaaagaataaaataggtaatgctggtaagcatactctatttatctgcaggatataaattggttcatcctttttttttttttttttttttttgagacgaggtctcactctgttacccacactggagtgcagtggcacgaacatggctcactgcagcctctacctcctgggctcaagggatcctcccacctcaatccagctgagtagctgggaatataggcatgtgccaccatgcctggctaatgaaaaaaaattttttttttttgagacggagttttactcttgttgcccaggctggggtgcagtggcgtaatctcggctcactgcaaccttgcctcccggtttcaagtgattctcctgcctcagcctccggagtagctgggattacaggcacgtgccaccacgcctggctaattttgtagttttagtagacatggggtttctccatgttggtcaggctggtctcgaactcccgacctcaggtgatccgcccgccttgacctcccaaagtgctgggattacaggtgtgcgccaccgcgcccagccttttttttttttttttagagatggggtttcactgtgttgcccaggctggtcttgaactcccggacccaagtgatcctcctgcctcagcctctgaaggtgctgggattacaggcatgagtcactgtgcctggctaaacaaagaaattttttacctacctgtggatttttctttctgacttggcttcattgaattgagtactttgcttctgcttttaataggaaaggtggctgggtgtggcaggagcactttggaagtccgaggcaggaggactgtttgaggccaggagtttgagaccagccagggcaacatagcaagacctcatctctacagaaaataaaaaataaataaaataggaaaggctcctataactcactgggtgggaggaagaatgaggtgctggtggtacatgttgcctactcaaaaggaacaacttggctggtcatggtggctcacccctgtaatcccagcactttgggaggccgagtcggtggatcacttgaggccaggagttcaagaccagcctggccaacatggtgaaaccccgactctactaaaaatatacaaattagctgggtgtggtagtgcatgcctgtaatcccagctacttgggaggctgaggcatgagaattgcttgaacctgggaggtggaggttgcagtgagctgagattgtgccactgcactccagtctggatgatagagcaagactctgtctcaaaaacaaacaaacaaacaaaacaaggaacaactctgtttttctggctagataactaataaacttcagcatcttaaggagagccatgagatgggacaggccctacagcaggccagaaatgtcatggtaagtgatgattgaccttacaccaccactgggtctcctgtgaagatgaagaatggagaatcctgggtggttagtagatggtgatactaagtcgtggtggtgaagggaggtttccaaacatttgtaaagtacatctccttatgcggagcttggaattggggttagcggttttcctccccagtgcccctgtttcctgcttagtgactttatttgatctcacctacccatttttttctctacagcaatcatgggtgcttatctctaaagagctgatatccttgcttcacctatccctgttgcatttagaagaagataagactactgtgagtcaggaggtaagcagcctgaagatggaggtggaggcctgtggtgggactaaaagccataaagaggaaccagacacattaactgattcttaccatatagtctcggcgtgcagaaacattggtctgttgctgttttgatttgctgaagaaattgagggcaaagctccagagcctcaaagcagaaagggaggaggcaaggcacagagaggaaatggctctcagaggcaaggatgcggtaaggtgacaggcatttgttcttggatgtgggaggtttccacctcaaggttcctgcaggaacacaaatgcactttagacacagatgggtggcctaagaactgcctgccctgggcagtaaagaactgatctattgaggtgtcatggttacatctttttgtgctggctcccctgttgcccactgtggccttgcaaccacttccctcaataggcagagatagtgttggaggctttctgtgcacacgccagccagcgcatcagccagctggaacaggacctagcatccatgcgggaattcagaggccttctgaaggatgcccagacccaactggtaatttaagggcattttctttcctggggtctgtgctgacagactgggagggtagttgcatactcccactttgctgtatccaaagggaaggggttcccgcctaggcaatctttcttttgtaggtagggcttcatgccaagcaagaagagctggttcagcagacagtgagtcttacttctaccttgcaacaagactggaggtccatgcaactggatgtgagtatttgggaccatcataactaattccttactcacatcaagtcctgttgtgagctttgcctcaagtgtgctctactgacctgcttgcttcccctggtagtatacaacatggacagctttgctgagtcggtcccgacaactcacagagaaactcacagtcaagagccagcaagccctgcaggaacgtgatgtggcaattgaggaaaagcaggaggtacaaaccaagagtggggactgcttaggcttggtttccttcctaatgtgtgataccattagcctcttaccctggatctgttttcttttcaccctgtgggtttggaggccagccagtaaggtctcttagctgtaagatggccttaagcgcagttttttcctttgcccttcagcatctttacttcagcaacttttctcctgtctctactttttcctgaggatcaaccttattttctgcaatgttgatgcccaggagcaaggtagttttctgtcttgtccagaaagagaagctggaccaagtcctgggattattgattcaggaggaactataggaggaaaaccatctgttcttcctaggtttctagggtgctggaacaagtctctgcccagttagaggagtgcaaaggccaaacagaacaactggagttggaaaacagtcgtctagcaacaggtgtttgtgtgtgtgtgtgtgtatgcatgcatgtaagcatttgagccctgttaaggcttggagtgtggcactagagcaaggaagtactcaggagcacttgctttggagcagaagtttggggagtttctagcctgctgaccgcatggtgtcattaggatacttttgttctagatctccgggctcagttgcagattctggccaacatggacagccagctaaaagagctacagagtcagcatacccattgtgcccaggacctggctatgaaggatgagttactctgccagcttacccagagcaatgaggagcaggctgctcagtgagttcctaacggggtactgtggcagtaggcatccaggatttaggaccaaatgggatctaatatgttgtctctggcagatggcaaaaggaagagatggcactaaaacacatgcaggcagaactgcagcagcaacaagctgtcctggccaaagaggtgcgggacctgaaagagaccttggaggtaaggaatatggcttgggccaagggagctggtaagcctcaggagtgtgattcttgcctgatagtgttgaggtaaggtttgagactgtgaactagaaaaagcctctgtacccagggcactaaaattctccctccctgtcttgctccttctcttgtcttcccagtttgcagaccaggagaatcaggttgctcacctggagctgggtcaggttgagtgtcaattgaaaaccacactggaagtgctccgggagcgcagcttgcagtgtgagaacctcaaggacactgtagagaacctaacgtaagttctctaactttctgtacttccccctaagtgcttatttttttctcaggaacacttctagaagccaaaatctccaagaagagaactgtgagtgttgagcctcttgtttctctcctttaatgcagctctgtggggatttgggataggcgttcagagaaggtaatttggtctttggtcatcttccctgttccttatttcagggctaaactggccagcaccatagcagataaccaggagcaagatctggagaaaacacggcagtactctcaaaagctagggctgctgactgagcaactacagagcctgactctctttctacagacaaaactaaaggagaaggtaggatcctggggttccttctcttctcttccaattgtatctttattttacagatagtcttcctaaaacattactctttttctaactgtgaccttttatgatttcagttacctacaggacctcattagcctgttgctcaaacctttcttcccctgtctcctatctccctattatgaacactttgccccagctagactgcctgtatgctacacacatgtccccatttttatccccagaacccagactctggctgttcccacattcattctattctttcttcaaactggaaatgccttttctattaaaatcctcccttccgacctgggcaacgtggtgaaaaccatctctacaaaaaaatacagaaattagcccaggtgtagtgttgtgaacctgtagtcccagctatctgggaggctgaggtgagaggatcacctgagcctgggaagttgaggctgcagtgagccatgatcatacctggctaatttttttgtatcactgcactccaaactgggtgagagtgaaaccctttcccccacaaaaaaagaaatcttccctggtttaccttctttgaactgttcccaaatcaaatcatgtggacccggtgatcttttcttctgccatatttctcatgaacttactcttcttttgtatttgtattaattttccttggatacctggtctcttcaaccagactatgtttcaagaaagcagaaatatagccttctttggcctccctgcagtgtgcactaaacaataaatggttgacatcattcagaatacaaaggtaattagcttattcagcagataaggcacaacaaatatcctaaaatctggcaattgcttatgacctgatcctcttccccaactgggtaccgagcacaggaaatgccatcaaatctacagtttagcatggaagacaaacagatgtaaacttgtcatcttgacttatgatcatggtagaggtctgcatggaccactgtgagagatagagaggggagcaccacttcagccttcgagaattaggatgccttctcaaagcagctgaccttgggtacagtcttgaggtttagacgtttgtggggcaggggagggtatttaggaagtcccactaggcagagggaacggtgtatgaaagtttcatctgactacatatgagagtcgtacgtagaaagtcatgcacatagtacatgatgtgttcttttttatagtgtctaccttataaaacctgggttaggtgctgggactagaggatgaacaaggcaagatgctgctcatatggaatgcagcaagtctgaggaatgggaagcagctcttcatggctgcagcgtgagagctctgtggggcaaggcaggagacaacactggagaagtaggcaggaggccagattttgaaggcttgaaataatggcagttttataggcagtagaaaggagaggatggagtgaatggattcaatagatatttaggaagcagaggcagtagaaccaatttgatgtaagagtgaccaatttgatgtgagagtaagttagaagagtgaatgatgatccttagattgctaggaaagagggcccagcgggtcagctgtgttagtgtgtggagactagggctagtgacacctccgggtcagctctgtgcccaggaagcacttcaacctgtgtggcaggagggatagcaataggaagcacttcaattccccacaactcagacacccagacgggagggcagaggaccaaggctgaaaggagtagagagcctgagagagagatgagactgaggggagctagtggtgactcaggctaaccagtcagcgggagagacctagaccggggggcagagaaggcgggagaactggagagaggacctagcctaggaggagagggagcaggctgagaaggaaatgctctgggtaggagagacagactccaaggaaaaatccaacaagtagaggaggatttgggattggaaaagctgaggtccagctgggagagctgaagagggatagaacagaagaggttgagccatggggtttcaagtacgcggaaaggagcaaagatgttaggaaagggtcgaaagggcacatcccggagtcccaggtagcaggacgaggatggcaggggaagagccaaggaaatgaagcggagatgttgagtggctcccgccttgcctggccttacctgtgcgcagccagttagcagccgcagccacaagcacagctacttcaggactgaggccagcaagcttttcctataaatggccatataataagtatttttggctttttgggccatatggtctctgtctcaactactcaattctgcctttgtagttcaagagcagccatagatgatacagccattaatgggtctggctgtgttccaataaaactttatttacaaaaatagttggcaggctagatttgacctgtaggccacaatttgctagccttccctctccctgctctagaatagtaaatacaggagtaggaacagacttttgatagggtgttccctatcagggcacagggaaaatggtgaactcagcttcatacatactaagttgacagattgactgtggaaccttctggtagattcttcacaggcagttagcctttgagtctgcagactgggaaaaagactgggaaaaagttgagagagggatggaagagtcattcatgtggaagggaagtttgaagtagatgtttttgtgatgctcccaaggcaaggccaccctgggaatgaattagagtaaatttagggccaaggacttaacccagaggatccagcagttaaggaaggacctgtgaatagagaagaaataaccagaaaggtgtggggcctgcctttaaaggagagagactcatgtcctggaagctaagaaaaggaagtttctaaaagaacaatgtggtcatcaatatcaaataggtcaggtaaaacaagagctgaaatatatgcattgcatttgaaagtaaggctgccattggtgaaccaaatgacaagaatttaggtggaatgacaggggagaagcctgagtgtagtgggctggggagtcaatagatggtgagagttataaacaagaagtataggctctttttttctttcttttttctttctttcctttctttctagaaaaggcagtagctaaaaggggatttaaggtaagaagaagggttttgttttgttttgtttaggtttgtttttaaaatactgctgtttttgttggagaggcttaagaatataaacatgttcagagaaaggcactaatggagaagttgaagatagagaattgagataataggtggaacagcattttggaggagatggctgggagttacctggaagcccaggagttcactagacctgaacagcagctattttttcttctttgcccttagactgaacaagagacccttctgctgagtacagcctgtcctcccacccaggaacaccctctgcctaatgacaggaccttcctgggaagcatcttgacagcagtggcagatgaaggttaaaggccctgggatttgggggtgggaaagttgtgacgctgctcctgatatcttctgctgttgaagatgtccaccagcgggcttgtctatcttaccctggcttccattatggtagacccctgcctggatcatcagaggggccctctcccattattggtttttctcttagagccagaatcaactcctgtgcccttgcttggaagtgacaagagtgctttcacccgagtagcatcaatggtttcccttcagcccgcaggttaggaggggctccagggatcctgcctcatttctagaaaatctggtggtgatgagtaaagacgaaagcagtgagaagtgctttgctctaaaaacctcaattctacttgggctcattttatttctgccttctgggatctgtaatgttccagacattcaaatcctgtgggtggggaacacggataagagttgtggaaatgatggctatacactccttccttccagggctggaaggctagacctctatctgggactttctctttcagagaccccaggcatggaggagagcctggcagaaatgagtattatgactactgagcttcagagtctttgttccctgctacaagagtctaaagaagaagccatcaggactctgcagcgaaaaatgtgagtgggatgcagttttggtgacagagggacagtgagacatcctcttatgccaagggtccaactgatccctgagaggacaggaatgttgctaaattcttccttccttcagttgtgagctgcaagctaggctgcaggcccaggaagaacagcatcaggaagtccagaaggcaaaagaagcagacatagagaagctgaaccaggccttgtgcttgcgctacaaggtgaaggagggacctagaagtggggcgatgaagaactggggcagctctactggcccactgggagccattatctctccaggaatctgggtggtggggattttccaaccactgccctagttttgcccttcctggggtcagacatttcacatgtcagctatgggctgacctgtcttcccaggctgactcaggagagaagtcaggaactctagcagagctctcccaacactgaaatgtgccttgcctggcttggccctggggaaagaattggcgtgatatcaattggtcccatgtgggctaagcatgggtcaggcactctctcctacctcctggcaagggctgtgaagagaccagctcttcatgtgtcttctcacctccctttccctcacagaatgaaaaggagctccaggaagtgatacagcagcagaatgagaagatcctagaacagatagacaagagtggcgagctcatagtatgttcaccatcatgcccaggcctttgccttctgtgttactggtcagccaggatcccaagtatgagaaatggtttgcttttgttcaccacatgttgtctatccttatgtcctattggacacctctccattctcattcccagagccttagagaggaggtgacccaccttacccgctcacttcggcgtgcggagacagagaccaaagtgctccaggaggccctggcaggccagctggactccaactgccagcctatggccaccaattggatccaggagaaagtgtggctctctcaggaggtgactcagagttaacagaggagctggacagcaggtggggaccccaggctgtacccctgttgatctggacatatttctaggtggacaaactgagagtgatgttcctggagatgaaaaatgagaaggaaaaactcatgatcaagttccagagccatgtaagaatgtccatgccattccagggccatttcctaccatcgttaacaaatgccccgccatgtttcccctgtcctaccaagtttgctcttttatgcataggacttataaaatctgtttgctttctagagaaatatcctagaggagaaccttcggcgctctgacaaggagttagaaaaactagatgacattgttcagcatatttataaggtataggcaggagggaggtgatatcactaatgaacctggtacaaggcctggccccaggaggtactaatgagcacagatctggttcccagcctgtgctgagagctgggcctgaatcactattgcaggcttctctgtggtgtctgttttctcccctctaattcagcggctgcctcctggggctgggagccctgggccttaagtctgtggtcctgagctgcgttttctgcctctcttcccagaccctgctctctattccagaggtggtgaggggatgcaaagaactacagggattgctggaatttctgagctaagaaactgaaagccagaatctgcttcacctctttttacctgcaatacccccttaccccaataccaagaccaactggcatagagccaactgagataaatgctatttaaataaagtgtatttaatgaatttctccaa

SEQ ID NO: 68 - DNA, 11440 bp, Homo sapiens
cccagaaggccgcggggggtggaccgcctaagagggcgtgcgctcccgacatgccccgcggcgcgccattaaccgccagatttgaatcgcgggacccgttggcagaggtggcggcggcggcatgggtgccccgacgttgccccctgcctggcagccctttctcaaggaccaccgcatctctacattcaagaactggcccttcttggagggctgcgcctgcaccccggagcgggtgagactgcccggcctcctggggtcccccacgcccgccttgccctgtccctagcgaggccactgtgactgggcctcgggggtacaagccgccctcccctccccgtcctgtccccagcgaggccactgtggctgggccccttgggtccaggccggcctcccctccctgctttgtccccatcgaggcctttgtggctgggcctcggggttccgggctgccacgtccactcacgagctgtgctgtcccttgcagatggccgaggctggcttcatccactgccccactgagaacgagccagacttggcccagtgtttcttctgcttcaaggagctggaaggctgggagccagatgacgaccccatgtaagtcttctctggccagcctcgatgggctttgttttgaactgagttgtcaaaagatttgagttgcaaagacacttagtatgggagggttgctttccaccctcattgcttcttaaacagctgttgtgaacggatacctctctatatgctggtgccttggtgatgcttacaacctaattaaatctcatttgaccaaaatgccttggggtggacgtaagatgcctgatgcctttcatgttcaacagaatacatcagcagaccctgttgttgtgaactcccaggaacgtccaagtgctttttttgagattttttaaaaaacagtttaattgaaatataacctacacagcacaaaaattaccctttgaaagtgtgcacttcacactttcggaggctgaggcgggcggatcacctgaggtcaggagttcaagacctgcctggccaacttggcgaaaccccgtctctactaaaaatacaaaaattagccgggcatggtagcgcacgcccgtaatcccagctactcgggaggctaaggcaggagaatcgcttgaacctgggaggcggaggttgcagtgagccgagattgtgccaatgcactccagcctcggcgacagagcgagactccgtcataaaaataaaaaattgaaaaaaaaaaaagaaagaaagcatatacttcagtgttgttctggatttttttcttcaagatgcctagttaatgacaatgaaattctgtactcggatggtatctgtctttccacactgtaatgccatattcttttctcacctttttttctgtcggattcagttgcttccacagctttaatttttttcccctggagaatcaccccagttgtttttctttttggccagaagagagtagctgttttttttcttagtatgtttgctatggtggttatactgcatccccgtaatcactgggaaaagatcagtggtattcttcttgaaaatgaataagtgttatgatattttcagattagagttacaactggctgtctttttggactttgtgtggccatgttttcattgtaatgcagttctggtaacggtgatagtcagttatacagggagactcccctagcagaaaatgagagtgtgagctagggggtcccttggggaacccggggcaataatgcccttctctgcccttaatccttacagtgggccgggcacggtggcttacgcctgtaataccagcactttgggaggccgaggcgggcggatcacgaggtcaggagatcgagaccatcttggctaatacggtgaaaccccgtctccactaaaaatacaaaaaattagccgggcgtggtggtgggcgcctgtagtcccagctactcgggaggctgaggcaggagaatggcgtgaacccaggaggcggagcttgcagtgagccgagattgcaccactgcactccagcctgggcgacagaatgagactccgtctcaaaaaaaaaaaaaaaagaaaaaaatctttacagtggattacataacaattccagtgaaatgaaattacttcaaacagttccttgagaatgttggagggatttgacatgtaattcctttggacatataccatgtaacacttttccaactaattgctaaggaagtccagataaaatagatacattagccacacagatgtggggggagatgtccacagggagagagaaggtgctaagaggtgccatatgggaatgtggcttgggcaaagcactgatgccatcaacttcagacttgacgtcttactcctgaggcagagcagggtgtgcctgtggagggcgtggggaggtggcccgtggggagtggactgccgctttaatcccttcagctgcctttccgctgttgttttgatttttctagagaggaacataaaaagcattcgtccggttgcgctttcctttctgtcaagaagcagtttgaagaattaacccttggtgaatttttgaaactggacagagaaagagccaagaacaaaattgtatgtattgggaataagaactgctcaaaccctgttcaatgtctttagcactaaactacctagtccctcaaagggactctgtgttttcctcaggaagcattttttttttttttctgagatagagtttcactcttgttgcccaggctggagtgcaatggtgcaatcttggctcactgcaacctctgcctctcgggttcaagtgattctcctgcctcagcctcccaagtaactgggattacagggaagtgccaccacacccagctaatttttgtatttttagtagagatggggtttcaccacattgcccaggctggtcttgaactcctgacctcgtgattcgcccaccttggcctcccaaagtgctgggattacaggcgtgaaccaccacgcctggcttttttttttttgttctgagacacagtttcactctgttacccaggctggagtggggtggcctgatctcggatcactgcaacctccgcctcctgggctcaagtgatttgcctgcttcagcctcccaagtagccgagattacaggcatgtgccaccacacccaggtaatttttgtatttttggtagagacgaggtttcaccatgttggccaggctggtcttgaactcctgacctcaggtgatccacccgcctcagcctcccaaagtgctgagattataggtgtgagccaccacacctggcctcaggaagtatttttatttttaaatttatttatttatttgagatggagtcttgctctgtcgcccaggctagagtgcagcgacgggatctcggctcactgcaagctccgccccccaggttcaagccattctcctgcctcagcctcccgagtagctgggactacaggcgcccgccaccacacccggctaatttttttgtatttttagtagagacgggttttcaccgtgttagccaggagggtctcgatctcctgacctcgtgatctgcctgcctcggcctcccaaagtgctgggattacaggtgtgagccaccacacccggctatttttatttttttgagacagggactcactctgtcacctgggctgcagtgcagtggtacaccatagctcactgcagcctcgaactcctgagctcaagtgatcctcccacctcatcctcccaagtaattgggactacaggcgcaccccaccatgcccaccttatttatttatttatttatttatttatttattttcatagagatgagggttccctgtgttgtccaggctggtcttgaactcctgagctcaagggatccttttgcctgggcctcccaaagtgctgagattacaggcatgagccaccgtgcccagctaggaatcatttttaaagcccctaggatgtctgtgtgattttaaagctcctggagtgtggccggtataagtatataccggtataagtaaatcccacattttgtgtcagtatttactagaaacttagtcatttatctgaagttgaaatgtaactgggctttatttatttatttatttatttatttatttttaatttttttttttgagacgagtctcactttgtcacccaggctggagtgcagtggcacgatctcggctcactgcaacctctgcctcccggggtcaagcgattctcctgccttagcctcccgagtagctgggactacaggcacgcaccaccatgcctggctaatttttgtatttttagtagacggggtttcaccatgctggccaagctggtctcaaactcctgaccttgtgatctgcccgctttagcctcccagagtgctgggattacaggcatgagccaccatgcgtggtctttttaaaattttttgattttttttttttttgagacagagccttgctctgtcgcccaggctggagtgcagtggcacgatctcagctcactacaagctccgcctcccgggttcacgccattcttctgcctcagcctcctgagtagctgggactacaggtgcccaccaccacgcctggctaattttttttggtatttttattagagacaaggtttcatcatgttggccaggctggtctcaaactcctgacctcaagtgatctgcctgcctcggcctcccaaagcgctgagattacaggtgtgatctactgcaccaggcctgggcgtcatatattcttatttgctaagtctggcagccccacacagaataagtactgggggattccatatccttgtagcaaagccctgggtggagagtcaggagatgttgtagttctgtctctgccacttgcagactttgagtttaagccagtcgtgctcatgctttccttgctaaatagaggttagaccccctatcccatggtttctcaggttgcttttcagcttgaaaattgtattcctttgtagagatcagcgtaaaataattctgtccttatatgtggctttattttaatttgagacagagtgtcactcagtcgcccaggctggagtgtggtggtgcgatcttggctcactgcgacctccacctcccaggttcaagcgattctcgtgcctcaggctcccaagtagctgagattataggtgtgtgccaccaggcccagctaacttttgtatttttagtagagacagggttttgccatgttggctaagctggtctcgaactcctggcctcaagtgatctgcccgccttggcatcccaaagtgctgggattacaggtgtgaaccaccacacctggcctcaatatagtggcttttaagtgctaaggactgagattgtgttttgtcaggaagaggccagttgtgggtgaagcatgctgtgagagagcttgtcacctggttgaggttgtgggagctgcagcgtgggaactggaaagtgggctggggatcatctttttccaggtcaggggtcagccagcttttctgcagcgtgccatagaccatctcttagccctcgtgggtcagagtctctgttgcatattgtcttttgttgtttttcacaaccttttagaaacataaaaagcattcttagcccgtgggctggacaaaaaaaggccatgacgggctgtatggatttggcccagcaggcccttgcttgccaagccctgttttagacaaggagcagcttgtgtgcctggaaccatcatgggcacaggggaggagcagagtggatgtggaggtgtgagctggaaaccaggtcccagagcgctgagaaagacagagggtttttgcccttgcaaatagagcaactgaaatctgacaccatccagttccagaaagccctgaagtgctggtggacgctgcggggtgctccgctctagggttacagggatgaagatgcagtctggtagggggagtccactcacctgttggaagatgtgattaagaaaagtagactttcagggccgggcatggtggctcacgcctgtaatcccagcactttgggaggccgaggcgggtggatcacgaggtcaggagatcgagaccatcctggctaacatggtgaaaccccgtctttactaaaaatacaaaaaattagctgggcgtggtggcgggcgcctgtagtcccagctactcgggaggctgaggcaggagaatggcgtgaacctgggaggtggagcttgcagtgagccgagatcgcgccactgcactccagcctgggcgacagagcgagactccgtctcaaaaaaaaaaaaaaaaagtaggctttcatgatgtgtgagctgaaggcgcagtaggcagaagtagaggcctcagtccctgcaggagacctctcggtctctatctcctgatagtcagacccagccacactggaaagaggggagacattacagcctgcaagaaaagtagggagatttaaaaactgcttggcttttattttgaactgttttttttgtttgtttgttttccccaattcagaatacagaatacttttatggatttgtttttattactttaattttgaaacaatataatcttttttttgttgtttttttgagacggggtcttactctgtcacccaggctgagtgcagtggtgtgatcttggctcacctcagcctcgaccccctgggctcaaatgattctcccacctcagcttcccaagtagctgggaccacaggtgcgtgtgttgcgctatacaaatcctgaagacaaggatgctgttgctggtgatgctggggattcccaagatcccagatttgatggcaggatgcccctgtctgctgccttgccagggtgccaggagggcgctgctgtggaagctgaggcccggccatccagggcgatgcattgggcgctgattcttgttcctgctgctgcctcggtgcttagcttttgaaacaatgaaataaattagaaccagtgtgaaaatcgatcaggaaataaatttaatgtggaaataaactgaacaacttagttcttcataagagtttacttggtaaatacttgtgatgaggacaaaacgaagcactagaaggagaggcgagttgtagacctgggtggcaggagtgttttgtttgttttctttggcagggtcttgctctgttgctcaggctggagtacagtggcgcaatcacagctcactatagcctcgacctcctggactcaagcaatcctcctgcctcagcctcccagtagctgggactacaggcgcatgccaccatgcctggctaattttaaatttttttttttctcttttttgagatggaatctcactctgtcgcccaggctggagtgcagtggcgtgatctcggctgacggcaagctccgcctcccaggttcactccattcgcctgcctcagcctcccaagtagctgggactacaggcgctgggattacaaacccaaacccaaagtgctgggattacaggcgtgagccaccgcacccggcctgttttgtctttcaatagcaagagttgtgtttgcttcgcccctacctttagtggaaaaatgtataaaatggagatattgacctccacattggggtggttaaattatagcatgtatgcaaaggagcttcgctaatttaaggcttttttgaaagagaagaaactgaataatccatgtgtgtatatatattttaaaagccatggtcatctttccatatcagtaaagctgaggctccctgggactgcagagttgtccatcacagtccattataagtgcgctgctgggccaggtgcagtggcttgtgcctgaatcccagcactttgggaggccaaggcaggaggattcattgagcccaggagttttgaggcgagcctgggcaatgtggccagacctcatctcttcaaaaaatacacaaaaaattagccaggcatggtggcacgtgcctgtagtctcagctactcaggaggctgaggtgggaggatcactttgagccttgcaggtcaaagctgcagtaagccatgatcttgccactgcattccagcctggatgacagagcgagaccctgtctctaaaaaaaaaaaaaccaaacggtgcactgttttcttttttcttatcaatttattatttttaaattaaattttcttttaataatttataaattataaatttatattaaaaaatgacaaatttttattacttatacatgaggtaaaacttaggatatataaagtacatattgaaaagtaattttttggctggcacagtggctcacacctgtaatcccagcactttgggaggccgtggcgggcagatcacatgagatcatgagttcgagaccaacctgaccaacatggagagaccccatctctactaaaaatacaaaattagccggggtggtggcgcatgcctgtaatcccagctactcgggaggctgaggcaggagaatctcttgaacccgggaggcagaggttgcggtgagccaagatcgtgcctttgcacaccagccaaggcaacaagagcgaaagtccgtctcaaaaaaaaagtaattttttttaagttaacctctgtcagcaaacaaatttaacccaataaaggtctttgttttttaatgtagtagaggagttagggtttataaaaaatatggtagggaagggggtccctggatttgctaatgtgattgtcatttgccccttaggagagagctctgttagcagaatgaaaaaattggaagccagattcagggagggactggaagcaaaagaatttctgttcgaggaagagcctgatgtttgccagggtctgtttaactggacatgaagaggaaggctctggactttcctccaggagtttcaggagaaaggtagggcagtggttaagagcagagctctgcctagactagctggggtgcctagactagctggggtgcccagactagctggggtgcctagactagctgggtactttgagtggctccttcagcctggacctcggtttcctcacctgtatagtagagatatgggagcacccagcgcaggatcactgtgaacataaatcagttaatggaggaagcaggtagagtggtgctgggtgcataccaagcactccgtcagtgtttcctgttattcgatgattaggaggcagcttaaactagagggagttgagctgaatcaggatgtttgtcccaggtagctgggaatctgcctagcccagtgcccagtttatttaggtgctctctcagtgttccctgattgttttttcctttgtcatcttatctacaggatgtgactgggaagctctggtttcagtgtcatgtgtctattctttatttccaggcaaaggaaaccaacaataagaagaaagaatttgaggaaactgcggagaaagtgcgccgtgccatcgagcagctggctgccatggattgaggcctctggccggagctgcctggtcccagagtggctgcaccacttccagggtttattccctggtgccaccagccttcctgtgggccccttagcaatgtcttaggaaaggagatcaacattttcaaattagatgtttcaactgtgctcttgttttgtcttgaaagtggcaccagaggtgcttctgcctgtgcagcgggtgctgctggtaacagtggctgcttctctctctctctctcttttttgggggctcatttttgctgttttgattcccgggcttaccaggtgagaagtgagggaggaagaaggcagtgtcccttttgctagagctgacagctttgttcgcgtgggcagagccttccacagtgaatgtgtctggacctcatgttgttgaggctgtcacagtcctgagtgtggacttggcaggtgcctgttgaatctgagctgcaggttccttatctgtcacacctgtgcctcctcagaggacagtttttttgttgttgtgtttttttgtttttttttttttggtagatgcatgacttgtgtgtgatgagagaatggagacagagtccctggctcctctactgtttaacaacatggctttcttattttgtttgaattgttaattcacagaatagcacaaactacaattaaaactaagcacaaagccattctaagtcattggggaaacggggtgaacttcaggtggatgaggagacagaatagagtgataggaagcgtctggcagatactccttttgccactgctgtgtgattagacaggcccagtgagccgcggggcacatgctggccgctcctccctcagaaaaaggcagtggcctaaatcctttttaaatgacttggctcgatgctgtgggggactggctgggctgctgcaggccgtgtgtctgtcagcccaaccttcacatctgtcacgttctccacacgggggagagacgcagtccgcccaggtccccgctttctttggaggcagcagctcccgcagggctgaagtctggcgtaagatgatggatttgattcgccctcctccctgtcatagagctgcagggtggattgttacagcttcgctggaaacctctggaggtcatctcggctgttcctgagaaataaaaagcctgtcatttcaaacactgctgtggaccctactgggtttttaaaatattgtcagtttttcatcgtcgtccctagcctgccaacagccatctgcccagacagccgcagtgaggatgagcgtcctggcagagacgcagttgtctctgggcgcttgccagagccacgaaccccagacctgtttgtatcatccgggctccttccgggcagaaacaactgaaaatgcacttcagacccacttatttctgccacatctgagtcggcctgagatagacttttccctctaaactgggagaatatcacagtggtttttgttagcagaaaatgcactccagcctctgtactcatctaagctgcttatttttgatatttgtgtcagtctgtaaatggatacttcactttaataactgttgcttagtaattggctttgtagagaagctggaaaaaaatggttttgtcttcaactcctttgcatgccaggcggtgatgtggatctcggcttctgtgagcctgtgctgtgggcagggctgagctggagccgcccctctcagcccgcctgccacggcctttccttaaaggccatccttaaaaccagaccctcatggctaccagcacctgaaagcttcctcgacatctgttaataaagccgtaggcccttgtctaagtgcaaccgcctagactttctttcagatacatgtccacatgtccatttttcaggttctctaagttggagtggagtctgggaagggttgtgaatgaggcttctgggctatgggtgaggttccaatggcaggttagagcccctcgggccaactgccatcctggaaagtagagacagcagtgcccgctgcccagaagagaccagcaagccaaactggagcccccattgcaggctgtcgccatgtggaaagagtaactcacaattgccaataaagtctcatgtggttttatcta

SEQ ID NO: 69 - DNA, 11488 bp, Homo sapiens
gagcggtgcggaggctctgctcggatcgaggtctgcagcgcagcttcgggagcatgagtgctgcagtgactgcagggaagctggcacgggcaccggccgaccctgggaaagccggggtccccggagttgcagctcccggagctccggcggcggctccaccggcgaaagagatcccggaggtcctagtggacccacgcagccggcggcgctatgtgcggggccgctttttgggcaagggcggctttgccaagtgcttcgagatctcggacgcggacaccaaggaggtgttcgcgggcaagattgtgcctaagtctctgctgctcaagccgcaccagagggagaagatgtccatggaaatatccattcaccgcagcctcgcccaccagcacgtcgtaggattccacggctttttcgaggacaacgacttcgtgttcgtggtgttggagctctgccgccggagggtgagtgtcgctgctggggaactggaactgcctgcggggcagttggagcgcccagacctggagctgctggaaagagtacccagcaagggagagcctgggacttggagctgctagagaagggtgctgggagcctcccgcttacgtatggaaagtgtctttggtaagggcttcttggctctgggagctgctagaggagggggttccagtgaagtggagtctgagtcatgttgctgatagggaagtcagcttctggacgcgaggtgctggggggaggggtgctggtaatggacgctagggccctggagtacccagggaggagtcccaggttagtgatgccgcgccctgggagcttctggggtggagctgggtcagtgggggggtagttggagccagacttcgggccttccgggggagatacgagtcaggaaagggatctggtgctggggactcggagcttccggagtggggctgagagaggacccccaggtaaggggggaagctagtaggagaaggggtgctgcgaatggttgtggacagtgttaaggcagggtccagatgccgctgtgctggagaaggaatggggtgggggcatagggaaggagagaaacccaccaagacccctctttcatcccttgggagtccagagtccagtcctgtgcttcctttgcctggtaaccctctcccttccccaccggcctcaatccacctccccatccctcctgccctctccttcccacccacagtctctcctggagctgcacaagaggaggaaagccctgactgagcctgaggcccgatactacctacggcaaattgtgcttggctgccagtacctgcaccgaaaccgagttattcatcgagacctcaagctgggcaaccttttcctgaatgaagatctggaggtgaaaataggtgagttgctgagcctgcaggggtgcttgacatcactacaagaggctggaatttggaggaggctgggagaaaggaaggagacaacccacaagtcagtatcttgcctacagatgcattatttttttgtgccccaatgcaatattttttttttacaaagaatttgaatttgtttttattttttaaattggaaggtttgattgaacaaaaagtttgattcagaactccttttaaacaggtgaaagcttcagtaatacgaggacagcattttcttagggcagccctttgctgggctggaaaacagctgtccccttcagacttctttgccacagtctctactcctccctattcttcacagacttgccaagtcttggaggttaacttgcttgatccttgaaggcattggagttttactatccctgtcagttcctgtttcaaagcatagcccctttctaaaaggaggggtgagaagtgtcactggaggcacctccctggtgtcagcatgggaggaagattcctgggcaagccttgctacatacaaggagcagaggcttgtgggatcagatggccctggttctggatggtcaaaccttaactagccttctgcattgacagatgtcagaggctggcatctaagtaccaactcttcctccctctgtcccaggggattttggactggcaaccaaagtcgaatatgacggggagaggaagaagaccctgtgtgggactcctaattacatagctcccgaggtgctgagcaagaaagggcacagtttcgaggtggatgtgtggtccattgggtgtatcatgtaagttgggagttgtctctggaccaacctggtctcagcaggggcaactttgggacatcctacctggctgaccttttctgtggacctttcggcctgctttacagaaagcctactccaagggacaagtcatccccaaacaaagcctaattgtcatatctttccctgtcactggtgtatcctgtcggatttctgcagcctaggtcatgggtacagcggaggaggaggagggagagtctccacaaccttactgtagtcctttgctagagttgtccacagggcagcatcaccatcatctgggaacttgtatacacaatctcaggacccagactacttactggatcagaatctggatttttaacaaggtcccttggtgattcccttgcacaataaggtcttaaacaccgatgagcattagcatggtgggggaaattaggccaggagttacagatggaaagatgatgtgccagtggtctgtctggattaagaccatcagcagcggttggtggcaggcagaggcttgggccttttcaggtgttatctttcttgttttgggcctaggtactggagagttagaaatgagttgtagcaatggctttcatacgtctttgcagtggggttttttcaaatgaaaacttgaagacttaagtacagaactgctaaaggtggagctgcttctgtaagcgcaggtagccctttgacctgttttgcatgacaggcagcatctgaggcccttgcacagagtcctagatgaccacaggctatagctaaaaaatcactggcccttaagaatcctggtctcaccatgtgtattctgctgagggcttattctagccaatgtcatggcttctggggctgctcagtggacttagggattgtcttcaggggccccagagttagagtgagtgtccagaggatgcctgacctttgttctgaccctgagatgatttctctcatgtctgggttgtggctgggagactggtgccaaatcctaccttgtgcttacaggtataccttgttagtgggcaaaccaccttttgagacttcttgcctaaaagagacctacctccggatcaagaagaatgaatacagtattcccaaggtgactaatgatgctttaagtttacatttattttgttttccccagaagctgtttatggagcccagcaatatcctaggaccagaaataggtctatcccacctctaaggtagccacagagcttgagagggcctgtgtctgaaattgcatacagaacttgacatgtatgtgcacataagcattttttctagggggagagagttggcagattctcaagagattgggtaacccaaaagttgtgtaaaaagcaaaaaacaaaggaggtaggaaggagtaggaggcaaaagtgcttaatctttagaaatggtttatcttaattcaaatggattctgccacttagcgagatcacattgggcaaatggcctgcatcttttttttttttttttttatttgaggtggagttttgctcttgttgcccagtgcagtggcatgatcttgactcactgcaacctccacctcccaggttcaagcgattctcctgcctcagcctcccaagtagctgggattacaggcacccaccacctcgcctggctttttttttttttttttgtatttttagtagagacggggtttcaccatgttggccaggctggtctcgaactcctgacctcaggtgatccacccgccttggcctcccaaagtgctgggattacaggcgtgagccaccatacccagcctggcctgcatcttctgaaccatagtttccatatataaagtggagttcctgccttggagcacctcacagagtgccttgcatgtggtgagtgctctcagaattatgaatcactgtgaatcccagggcttcctaatggcatagttgtgtgcattttctttttttttttttttttttttttgagatggagtctcgctctgtcgcccaggctggaatgcagtggtacaatctcggctcactgcaagctctgcctcccaggttcatggcattctcccgcctcagcctcctgagtagctggaactacaggcaccagccaccatgcccggcttcttttttctgtatttgtggtagagacagggtttgaccgtgttagccaggatggtctcgatctcctgaccttgtgatccacctgcttcggactccctaagtgctgagattacaggcgtgagccaccgcgcccggccatggtgtgcattttcacaaccaccaacagaaatacatttaaaggaatagctggttcctgcagaagcctagcacacagccagtttgaagtgtagtgtccttgtgtgaagccaggaggcctgtcaccataaggacagacatagtaaatccatcacaaagtgtcagttcactgtcagagacagcatggaatcaagccagctagacaaggccttcaccctctctgtgcctcactttcctcctctgtgaaaaagggatgataatagatccccaccccttagatgagttggtgagggctaagtgagctaaacacaggagtgcttagaatgctttcctggcacatagtgagtgctaggaaagtgagttggtgttcggccacagtccattgacccttctgtcaatggtgctcagtaaagctgacagtggagaacttggcattgaaccaagttgtgaaccactgacctgtggtgtatttgagactgggggctgcatgtgggctggggacctgcagctcctttgaggccgtactgtactccaggtccccttcacattctgcttatggctgtccctctctctgccccagcacatcaaccccgtggccgcctccctcatccagaagatgcttcagacagatcccactgcccgcccaaccattaacgagctgcttaatgacgagttctttacttctggctatatccctgcccgtctccccatcacctgcctgaccattccaccaaggttttcgattgctcccagcagcctggaccccagcaaccggaagcccctcacagtcctcaataaaggtacaacaagggtctgggtaagagagcagaccccccagagaaagcccaggttgtaggggtgtgtgcagcttagtccctggccctgagagctcaggtgtggagtaggacaggcctctgtccttcaatccgtggttccaatgcccatctgcttctcggccctgccaggaaagactgaccttaccatggctggataaacgtaccatgcccaagaagaagaaaatggattgaatgccaagcctgaaaaattctttcaaatcactttaattaatttaattttttggagacagggtctctcctctattttccaggttggagtgcagaggcacaatcacagctcactgcagctttcaactctagggctcaattgatcctcccatctcagcctcccaagtagctgggactgtcaggcatgcaccaccatgcctggctgacttttctaatttttgtagagacagtgttttgccatgttgcccaggctggtcttggaactcctgggctcaagcgatcctttcacctccaccaaagtgttgggatgacaggcatgagctgctacatctggcctttaaaaaaatttctaacactttttcatgattcattgaaaaacataaaaatttccttttttttgtggcgtgatcccggctcactgcaagctctgcctcccgggttcacgccgttctcctgcctcagcctcctgagtagctgggactacaggcgcccaccaccatgcccggctgtttttttgtatcttttagtagagacggggtttcactgtgttagccaggatggtctcaatctcctgacctcgtgatccgcctgcctcggcctcccaaagggctgagattacaggcgtgaaccaccaggcccggccttttttttttttttttttttttttttttttttttttttttttgagacagggtctggctctgtctcctaggctggaggggagtggtatgatctcgatttcactaaggatacatagttttaaaaagtcacttgaaatactttttttctctgtggatatatcaccaatttgatgtacaacttcagttcatttttcagttttcaatttttaggtattggtttttcttaaacttcattttggaataattttaggcttatacagaaaagttgcaacaacaacaaaaaactccccagagttcctacataccttgcagcaattattacagtggaattttttttgagacaggtctcaggacttgctgtcacccaggctggaatgcagtggctcactcatagcttactgcagccccaacatcctgggctcaaacagtccccctgccttaccctccagagtagctaggactacaggcatgtgccaccatacccagctaattaaaaaatttttttctttgggaggccgaggtgggtggattgcccgagctcaggagttcgagatcagcctgggcaacatggcgaaacgctgtctctactaaaaatacaaaagactagccgggcgtggtggtgtgcacctgtaatctcagctactcgggacactgaggcacaagaatcacttgaacctggaaggcggaggttgcagtgagccgaggtctcaccactgcactccagcctgggcaacagagcgagactctgtctcaaaaaaaaaaaaaaattttttttttgtaaagacaagatctcactatgtcgaccaggcttatctcaaactcctgccctcaagtgatcctcctcggcctcccaaagtgttaggatttacaggtgtgagccactgtgccctgcctagaatgatgttctaatggtaatttttcttttcctcactttttttgcatttaataattggaattcttctgtaaggaagagctgttccttctctccgattgatttatttatttggttatgtctgaaatagactcatggatatttttattctttgggctatattttaaaggattacttatttctctgcttttatttatttttttaaatttgagacagggtcttgctctgtctcccgggctggagtgcagtggcacagtcgtacctcacagtagctttgatctcctgggctcaagtgatcctccagcctcagcctcccaagtagttgagactttaggcatgtgccaccgcgtctgaccaatttttaaatttttggtagagatgaggtcttgcccacactggtctcaaactcctgagctcaagtgatcctcctgcctcagactcctactttttttctttcagttttaattttttatatagcattttaaaaacttaaggaaattttcagttacccgaaggtggagagaactgtatgatgagtcccatgtttcatctatttttactagttatcaacatttggacagactgttttatttattccagcctcctgccttttttgttaccggtgttttaaaaaattattatttactatttattattatttatttgagacattcttgctttgttgcccaggctggagtgctgtggcaagatcatggctcactgcagcctccacctcctgcgttcaagtgactctcccacctcagcctcccaagtagctaggactacaggtgtgccaccatgtccagctagtttctgtatttttagtaaagacagggttttgccatgttgctcaggctggtctcaaactcctgagctcaaacaatctacctgcctcggtctctcatagtgttgggattacaagtgtgagccactgggcctggccttgctggagtgtttaaagcaaatccctaatatcttattatttcatacccaagtccctatcatgacatcgttttttaattgaaaacttaaacattttatattatacaaggagaattagcacatggtggtgggggaataaataaataaggaaaaagacaataagaataatctgtgtttctactgcccagatataatcagcgttaaaatttcatgttatcttttcaagcttttttggttataaataagcatataaagcaaattttggggtggaaaaaaatttcttgtgtttttatttaaatgcctactgaatccattctgtggatgaactgaactactcagcccttccatctgcctggatgctgaagatgctttccattctttgctcaaagctgggcagctctgagctgctggtgccttcaagctgtttgcctgagtggcaggtcatcctgcagggccacaccgttgggtcagaggccacggcttctgaagatctgttgcctcacagtgagcactatgtgcctgtcacctgagcatggcagctgctgctctagtaaccaggcactgattcagtttccccaaagcagtggtagctaagagaatttttctttcggaagagtttcagctgtggcaggggagtcccgtgcccttcccaacgcccctgtttttgtcaccttcctaggcttggagaaccccctgcctgagcgtccccgggaaaaagaagaaccagtggttcgagagacaggtgaggtggtcgactgccacctcagtgacatgctgcagcagctgcacagtgtcaatgcctccaagccctcggagcgtgggctggtcaggcaaggtgggtactgcggggccctgggcggggcaggattgcttggggcatctggaaaaggcaggaggaggcttggccaacaaagcactggtgacttgttcaggccctgtctgcataggaccattggtttccccatttcctgatatccaaggccctgcttccgtggctcctgccgccttttctgatccgtcttttttactctagcacctcgatgtgccaccttcatacgctgtttcttttgctcagtaagttcctattgtatcttcaagacccttgaaataacagacccagatgtactgcagcctcagggctttctccctggtcctggcacgaaagcacttcttccagacaccacatggctcacactgtggcctccttcaagtgtctgctccagtgtcagctctgtgagcatctccctggcccctctgctggtgcttctcatcctcttgcccactgcatagttctccataacacttctcacccaacatagtccaacatgtccttctttgtttattggatttaaattaaggggtttgttgcatgcactgaacgtaacattttgatgtgtttgcaactggcttctgtcttcacagtttcttaattactccaaactggaaaactagatgcctctgactcttaccatgatagaagtcactgatattttgcccatacttaaattgattagtctttgcccctacaaccacagtgtaagctccgtggaggctggggttttgtctgttgctcactgaacctgcaacagtgcctggcacggtaggccttcagtaaatgggtcagtggaatgaaggagtgagtggaacttggtgcgctgtgctgagactttctctgcagagatatctgtgctgctgcttgtctgagcctgctggcagcagaggccctgctttgctcttctctggggccctaggcctctcaactgagcccaggtggggtgcccagcaggcttccctgttccctggtgtgggccacatgtgtggagcagaggggaagaggctggtcctgaccaactaactgtctgtctgtttctgtctcagaggaggctgaggatcctgcctgcatccccatcttctgggtcagcaagtgggtggactattcggacaagtacggccttggtaggtttcttccagaacaggtgggtgactcaggcacagccaggtgaccttttcagttgttacagactctggcctttttgagctcccaggtactgttctcagtgccctcctctctccatcccaggcctcccagttccagctcccagtgctccctgactccccagctttttttttttccagagacagggtcctgctctgtagcccaggctggagtgcagtggcacaatcatggctcactgcagcctcaaactcccaggcccctaagtagctgtgactacaggcgtgcaccattatgctcagctaatttttaaaatattttgtagagatggggtctcattacgttgcccaggctggtctcaaactcctgggctcaaacaatcctcctccctcagcctcccaaagtgctggaatcacaggcatgtgccaccacgcccggtcccactccccactttctattccccctttctgagacctctctccaccgatccctagggtatcagctctgtgataacagcgtgggggtgctcttcaatgactcaacacgcctcatcctctacaatgatggtgacagcctgcagtacatagagcgtgacggcactgagtcctacctcaccgtgagttcccatcccaactccttgatgaagaaggtgagtgccgtccggcccatggggggtggtgttgcagaagtgggacctgtgctggaggatcagactctaattctggaaccccttacctacttttcatccagatcaccctccttaaatatttccgcaattacatgagcgagcacttgctgaaggcaggtgccaacatcacgccgcgcgaaggtgatgagctcgcccggctgccctacctacggacctggttccgcacccgcagcgccatcatcctgcacctcagcaacggcagcgtgcagatcaacttcttccaggtgagctggaggtcaccaggcgcaggagagagctggggtaggctccgcatgcctggcagtggcccatgtgggttgaatgtggagtgagcggctcaggtacctataacctgttgtgtcttccctctactccctaacatacactggcctctgggatcgccaacccctgctgctcttctcttgcaggatcacaccaagctcatcttgtgcccactgatggcagccgtgacctacatcgacgagaagcgggacttccgcacataccgcctgagtctcctggaggagtacggctgctgcaaggagctggccagccggctccgctacgcccgcactatggtggacaagctgctgagctcacgctcggccagcaaccgtctcaaggcctcctaatagctgccctcccctccggactggtgccctcctcactcccacctgcatctggggcccatactggttggctcccgcggtgccatgtctgcagtgtgccccccagccccggtggctgggcagagctgcatcatccttgcaggtgggggttgctgtataagttatttttgtacatgttcgggtgtgggttctacagccttgtccccctccccctcaaccccaccatatgaattgtacagaatatttctattgaattcggaactgtcctttccttggctttatgcacattaaacagatgtgaatattc

SEQ ID NO: 70 - DNA, 6590 bp, Homo sapiens
cttagtggtgtcgggtgagtgcgggctgggcacaagtttcgcccttgttgcccaggctggagtgcaatggcgcgatctggactcaaaacaatttttttgttcggaggggagggcatcaggttctgttcacaggggagggcatcaggttcggacacgcacggcctgtggggtcgtctgggtaccacaagaagtcggatcgaaatcggggcgtctggtgggaaggccggggtctgggcgggtgcgcgtttggtctgggcgagctggtgaagaagatggtgatcgtgtcctgggcccagcgctgaagctcggctacggcgtgtcttgaccctgcctcccctcctcgcctgagccagagagaggaaggaggttgggatgaaaagacagctgttttggaaacttgaagggcgggacatcagaaatgctgctgacccgaggcccctcttccaggaagcatcctccttcctgcacccacacttaccaactcgcccgcccccgccaccccgctgcatcccgtctcttcccctgtgtccagggtctctgtggggcctgggaatgggtatggggaatgccttgctgatctgcctttcgccctcctccccagggtctagtggacagagaagactcttggccaggcagatggcttctcggtggcagaacatggggacctccgtgcgccggagatctctccagcaccaggagcagctggaggacagcaaggagctgcagcctgtggtcagccatcaggagacctctgtaggggccctggggtccctgtgcagacagttccaaaggaggctgcccctgagagccgtcaacctcaacctccgcgcagggccctcctggaaacgcctggaaaccccagagccaggtcagcagggcctccaggctgcagctcgctcagctaagagtgctttgggtgccgtgtcccaggtaatactgacaacactaatcatcttttttatggagtgtttccttggtgccaggcagttcctgccctcaaagagcctcaagaatatagacttcatgaaaacagggacgttggttagttcactgctgtttccccaccaccccagatagttcctggcacatataggtgctcaacaaatagttgaatgagtgaatgaaagcatgtcttggaggaaacagatgctcacaataccaggtgataagagctgtacgtgataggaaattgcaaagcaagtgaccaatagtgaggctcaccaaatgcaagcttagtcggtgaaggcttcccagaggaggtgattccagagttcacccagggaagcaaaggtcaaggggtatttagggtaggggaaatagtgcaagtccaggcctagagctgagggaaagcaaggtgtactgcccactcagctgtgtatccctgaggagagccagaattgtagtctgggtatgaacagatgacagagagcaaggtagagcagggggaaaggatatgaaggagcttagaactctcccaggaatgatcaggagtccggaagattctaaacagtggaaagtctggtctaattagcatattagaatttgccctttagctacatgatggagaagggaatagaggcagagatgctcctgatggagactaagggtttggacttgcaggggataaacttcaggagctgccgagaaggtccagttagaggggatttgctgtcaaatgagagctgctgtcaggaagacgtccttatattggatgtaagtgtctgtggacccttcaagggatgcatctttaaacccagagctggaggtgtagacgtgtcacttagaaaggacagaagccattaggatgaacagacctccagggagaggattgggggctgcagaggcttctcctcggtgtctcattgggaattctgaagatgaaagaattctccagaaagtgggtggctctttctggaccctctgcagagagctctctgagccaaatgttagtccttatttggaagcactttttgattgttttcaccaccctcagggatcagagaaatgaaatgaatttgtccaaggtcacataactcatcaaatttaacttgggcttcgctccaaacactgggctctggcttgtcaaggcaaagacagtctagctgatgaagaagagccttcacggctgtcacccggctggtgtgaaaggcccaagagttggggcttggtcctatgggcaacaagaagccacagaagagttttgagcagttgagtgtcacggtcagaactgccctttagaaggatcactatggaccactgtggagggtggatagagtgagtgagacccgaggcaagaagacaggtgctctcttggtgtacagggggtgctgggcggggtggcctgttcttttggggccctctccttcagtcctggggtcaccgtctgtctggaaagagagtttggacttagacaaacaggctccaggcaccaggggggtcctcctgcggctgactgctgctgtcatatccaagagctctgagctgggtcccagccgtggactcattccatgaggagtcattcacatccttcaccctggagactaacaatagcctgtatttacaggacacttgctgagtgtaggggttgcttgtatggtctggagaccaaggtagctcacccttggtttttttttttgttgttgtttgtttgttttcgagacagggtctcactctgtcgcccaggctggagtgccatggtgcgatctcggctcactgcaacctccgcctcccgggttcaagcgactctcatgcctcagccacccaagtagctgggattacaggcacccgccaccgcgcctggctaatttttttttgcatttttagtagaaatggggttacaccatgttggccaggctggtctcaaaatcctgacctcaggtgatctgcctgcctcggcctcccaaagtactgggattataggcgtgagccaccgcgcccggcctaacttttggttttgtctgtgctaacctttccatttgcctgttccagagaatccaggagtcctgccaaagtggcaccaagtggctggtggagacccaggtgaaggccaggaggcggaagagaggagcacagaagggcagtggatccccaactcacagcctgagccagaagagcacccggctgtctggagccgcccctgcccactcagccgcagacccctgggagaaggagcatcaccgcctctctgtccggatgggctcacatgcccacccattacggcgatcaaggcgggaggctgccttccggagcccctactcctcaacagagcccctctgctctcccaggcaagtgggatagtgcttcaccccggggctggtggccttttaacctgggcacaatccctgctgtctgacctcccagacaccaactgggccctaggggtttcttggcaccccctgtggctacctggagccaggggcaccctgagcagcgtcatattgtattattattattcttactgttaaatgtgtgtcctgctttagcagatatccagtgcatgtatttgctcatcagaaaatgagaaaacaggctgggcgcagtggctcacacctgtaatcccagcactttgggaggccgaggcgggtggatcacctgaggtcaggagttggagaccagtctggccaacatggtgaaacctcatctctactaaaaatacaaaattggctgggcgtggtggtgcacgcctgtaatcccagctccttgggaggttgaggcaggagaatcgcttgaactcgggaggtggaagttgcattgagctgagatcgcgccactgcactccagccagggccacagagccagaccctgtctcaaaaaaaaaaaaaaaaaaaagagagagagaaagaaaacaaaacaacaactagattcctaaggattgtatttcaactttccggctgagttctagggggaaatggagtgtgttagttaaggctgcatagtagcttagggctgttgaatttttccccagatttctttgagggctagcatctttctttagcctaataggaactttgagctgtaattaaggcaggctctgtttgtcccatttgacaggtaaggaaacggaggtccggaggggtttggtgattagcctgagggtcatcctgtaagaaatagaggagtaaaggctggggtccagatcatctggatgttctgccccaccgatcaagctggcctgccttgcagaatcttctagttctcagacaggcccagaaagtggcctggctcagggcagggggtgaagctcatcccaatcggcagtccctggcagtttcctggtcccatctcggagctctcagggaaggctgcctagccgctgcacctgtgttgtggcaggtagtcaccaggatgcatgtaagtgaccaggtggctctttgcaaacctgtaagctaaaataaggcttgtgtacacttcaaaaatactctccacatctgtattctgacccggttccgcgtccagagccagcaggggacctgagaaaatcctttaggaccttagtttctctgtccgtaaaggaagagctgagtttagttctgacacaatcacactcacccaagcctcctagtgagcccagaagcaagttttgaagccacctggagagctgaggctcagtttccaagtggggaagctgcaaaatcacttgcccgtgaccttggcctcgtggatcttgatcttctctctgtttgtcgctctgaggtcacctcctggagtgagggtctggagtgaagcccagcccgccagggtcatctgggcccacagaccacaccccggtaccgggttgcaagggtctcctgccgggagtttccaactagtcactggtgtggctttttctttcatgcagcgagtctgacagtgacctagagcctgtgggggcgggaattcagcatctccagaagctgtcccaagagctagatgaagccattatggcggaagagaggtgagttggcatcccatgcttcaaagtgaaggggccgggagggcccctccagccatctttgtaggcaggcgttggttctgctctgacctgctgtgtgaccctggccagtctctgcccctctctgggcctcagtctccctcatctcaaacatgagaaaggacaaaatcctggactggggtgatggtaaaggatgtagcctgaatgtgtgtggtcttctgggccttgggaccccatgtttgtccatcacttggaacctcacgtgtggctggttcctgaaaaacctgcccttcctccagaactctccgtggctcgtctgtgccctgcctgcctatggaattgggaaaagcaacctgactgctatggagttcctggtctgtctgctcatggccccatcctgggggcagggcctcggttgtggacctcccctaacttggggctgtttccccattccacttgtataatggccatgatgggctctaaggctgggccctgccagctctatgtgttgaggggccatattcctaccacatttccgggtctgatcttgtgtagctcaggctgggagggccctctcagagcccaccacacccagtggcatcaatccctccccttctctctagtggtgacatcgtctctctcattcatgactgaggaagtgcctgcaggtaatgcccacctcccaagagtctttctcactgtccttctcctccatctcatgcatgagcaagttaaagaaaaagcccacagagctgatgggcacagcagagtaggtagtacctacttgccgcttgaagccagagctgctaacctcactgaccccgtcattaacagcacgctgggggccccaagtagctacagccaccttccagcaccccccaccccgcagtgagcagggaaaggcatccctacttctcctaccttgagcacagtgaaaaaggcagctctgtcttgaaggaaacaagccctgtctgaccgccaaggcttcatactcaaggatgtctatgcttccccgtgagcttcctggaaaaaacccccgggagtcgtcagtacccctgggccactgctaacaagcacctaacaaggggcccagagccccctgctccagccacatctggacccatcagtgactgcctgccatagcctgagagtgtcttggggagaccttgcagagggggagaattgttccttctgctttcctaggggactcttgagcttagaaactcatcgtacacttgaccttgagccttctatttgcctcatctataacatgaagtgctagcatcagatatttgagagctcttagctctgtacccgggtgcctggtttttggggagtcatccgcagagtcactcacccactgtgtttctggtgccaaggctcttgagggccccactctcatccctcctttccctaccagggactcggaggaaggcataggagatatttccaggcttacgaccctgggctcacgggtacctatttatatgctcagtgcagagcactgtggatgtgccaggaggggtagccctgttcaagagcaatttctgccctttgtaaattatttaagaaacctgctttgtcattttattagaaagaaaccagcgtgtgactttcctagataacactgctttctcataataaagactatttgcatttg

SEQ ID NO: 71 - DNA, 60100 bp, Homo sapiens
accgttaaatttgaaacttggcggctaggggtgtgggcttgaggtggccggtttgttagggagtcgtgtacgtgccttggtcgcttctgtagctccgagggcaggttgcggaagaaagcccaggcggtctgtggcccagaggaaaggcctgcagcaggacgaggacctgagccaggaatgcaggatggcggcggtgaagaaggaagggggtgctctgaggtaggtacgggagaaagctgctgggggctgggcctgagaggacacggcctggtaggtaatagaaggctccgctcggagcagtcgagggggagatcggcaccgtcagaacagaccccaccggagcctccttccttttggagtagaatgccggaggtggaggtgaaaacgcagtggactgagggcacgtgcgaatcctgccgcatccagcttcaaagcgaagaaggctgcgggaccccagcggaacaaagagtttggaagttgcaatgttgtctgtttgtaactcagctcagccacctgctagttgtttgaccttgggcaaatcgtttgtatggaaaatgctgatgttaatgctgccttacgtggttctgggggaattcaaagtatttgttaagtaactgcttccaaataagcgctcaacaaatggcaggtgctatgccaatagcacagagatctgaaagcctttagccaatatcatagagatctaaattatgccaataacatagagatctaaaagcctttttctgcatgtttgcggcttttccttgtattaaaaaaactatattgcagttctaggttggaaatctgtatgtgttttcactgtggtgcccgcaatacctagataagtgctatgtcatgggctctttcattcatgtaacaagtatttttttggctaagctctgagtgcagcaaatatacagacacaaaaatctcaaccctcatgaagcttaagttctggcatgggatgaaggtgggggagtcagacaataaagacaaactgttaggtggagatgtggtcagtactaaaaaaaataataaagcaactgggtgtagtgaatattgggggtggggattggtgcaatttaacttgaacactggagtctcactgaggagatgtcactttggtcaagacttgaaggaatctcaaaagctagaggttctatatctgaggagagtacaaaggctgagggtgagagctaggggaggaagttgcacctggcatgtccaaggccattgtcactggagcagaattaactagaagagtaaaaggatattatgtaaaaatggtgaagatgcagattgtaaggacttagcttttactctagttgtaatcaaaagtcattggaaggttttgagcaaaggaaagacataatctgacttgggtttaaatggggtcactttggctgtagtgttgaatacactaaaggcagcaaaggatggaagcaagggacaccagttaagaggttattgaaataattcagctcaaaagtgagttgagccaggtggaaaacagtggagatgatgataagtggttgatttctgtatatattttgaaggtagaaccagtaggacttgctgactgactgaggggtatgagaagggcatcaaagttggcactaagatttttggcttgggtaactgaagaatgggattgccatttatttgagaaagaggaagactgtgggaggagcaggtctgggaggaagtgggggcagtcttagctcaatttgggatatttaactgagatagtgtaattcactatttttaagagcaagagaagaaagttcagatgaattcaacaaacagggcataatagtgttatatctcgtattagatcatgggcatacaaaaataaatggcatagcccttacctttacagagttcacacaatatagagcaggtcctggtataacatcgtttcgttataatgttgatgagaaaaaaaatcaattcattgcggggctgctgtgtatgtggagttttcatgttttccgcatgtctgcatgggtttccttaggtactccagtttccttctacatcccaaagatgtgcctgttaattggcgtgtctaaatgatcccagtctgaatgggtgtgaatgtgatgctccctgtgatggagtggtgtcctgtccagggttggttcctctctgagttgctgagatgggctctggccaccctcaaccccgaactagaataagtgagttggaaaatgaatgaaggaatgaatacaaattactgtaaaataaaaatctgtaaaggctgggagcggtggctcacacctgtaatcccagcacttcgggaggctgaggcaacaggattgcttaagctcagcggttcaagaccagcctgggcaacatagtaaggcctgtctctatttaaaaagtttatataaagtgtgtatgataatcatataaatgcatgacaataaacaatgccttatgaaagtgcccagcatgcccactatagtgttactatttgttttttgaactttgtggtggtaggaggtacttcttgaaattttcactctcaaacatttattccttgagttaacccaccaacactatgactgcagtcattcactgattcgccaaaaattgggtaaatgattattttttgttttcattaaatgttcttaagtgtacggatagctcacatttatttcaatatttagtattaaaaatgtttgtttcgagtctttattcagaagtttggtgacgtttttgtgaccagaaatatgccataggaacttaacttttgtttatgtcgatcagcctgtggtaaaattggttttgttacatgtcattttgattaaagtcatagtttccaagaagctgtctccaacgagttttcagtgctcatctagactgaagtcacatataactttcactctatttcaaagattagtgccaatgtgtctctctttttgttttaagtccagaggtaatgtctcttagaaatagtcttctatctaaccattgcagggctctgaattgcagaatacgtaatgggaattacctccaaaacgtttcgggggttttctcagtaggcttgctagaattgggtgtgaggatgcagggaattgtgactagtaaactgtgtttgtttgcttctgcttttagctacttatatgtacaaacttcagttttgaatcatcattgaaacatgggacattagtctcacccacactttgctaattttaatgttttttttttgagacagggtcttgctctgttgcccaggctgcagtgcagtggtgtgatcatggctcactgcagcttcgacccctgaacccaagcaatgctcccacctcagtcttctaagtagccacgaccatgggcgtgtaccaccacgcctggctaatttttcactttttgtagagatgggggtcttcctatgttgcccagggtggtgttgaactcctgggctcaagcacttctcctgactcagcctcccaaagtggtaggattacaggcatgagctaccacatccggcactaattttaaattaaactagatgatgcattcaatggtaggcatagaattacttgttgcctttttgtctactttgccaaatttataacacttttgttcccttcttttctttctgccttaagccctattcatttttctttttttttttttttttaaagaaagaggcagggtcttgctatgttgcccaggctggtatcaaactcctggctcaagaaatcctcccacttcggcctcacaaagtggtgggattacaggtgtgagccaccgcacatagccatgccctattcttatagtactgtctacgatatccttgccaagttgtcttctatcaggcaatactgtagccataaacttgaaaaacagctaacaaagaagcttaggcatataataataataataattatgtgtcagtccactatattcaacccaagaccatgaataatcacctttcggaagacatttacaataatctagtgctataatagtcaatgttggtatgagatttacatttgtttccttcttcacagtgaagccatgtccctggagggagatgaatgggaactgagtaaagaaaatgtacaacctttaaggcaagggcggatcatgtccacgcttcagggagcactggcacaagaatctgcctgtaacaatactcttcagcagcagaaacggtgtgtagaatggctgagtctcaacctgtcgtcattcatcctaaatgttgtagataacgtgggtgtggatccatgagagatggcataatgagtacttttcaaaaattggtagtatgagaatctgttctctacctgctttcgtatcacatgacagctatctgaagatgtcctcaggtataattaagaacaagggctataggatttcatttcactgtggtgcagcgaaactctttttatcaatagaaatacattttatacagggggcagtgataagcatagtaaagcaagtattatattgcaatgcttcccaaaagtattatgttaggaacttatttttgagagtatgacaaaaaaagaagtggtctccaaagacatgtaaacctcagaacaattgaatttataccagaaagttctcaataattttaacaaactctggataaataaaagctgaaaaatactcttatgttattcaaatggacctgtggatctcctttaactaatacatgttttgataaatatgctttttaaaaaaaaaggtaaatcagagtatcagtttctaccttcaatctctgacaaaaagaaatactgccattactggcaaaatatcataatttgggattataatgcaatgactattcttattcatctctttggattttttttttttttttaatatgacagggtctccctctatcacccaggttggagtacagtggcctgatttcagctcactgcaacctctgcctcccggttttaagtgattctcccacctcagcctcccaaatagctgggattacaggcgtgcgccgccacgcctgggtaatttttgtatttttagtagagatgggtccttgccatgttggctgtgctggtcttgaactcctgagctcaagtgatccgcccaccttggcatcccaaagtgctgggattacaggcgtaagctaccgcactcagcctcattcatcatattttttcatgttacatgcatcagtagattgctctttttattgctgaataggatttcatttatttattcaccaattgatgaatatttagattcttccagttttgtgctttataaataatgttgctatggacattcttgaacaaggctttttgtagacataattttctctctctctcttttttttttttcttttagagacggagtctcgctctttcggccaggctggagtgcagtggcacgatcttggctcactggaagctctgcctcctgggttcacgccaatctcctgcctcagcctcctgagtagctgggactacaggtgcctgccaccacgcccagctaattttttctattttttagtagagacggggtttcaccgtgttagccaggatggtctcgatctcctgaccttgtgatccacccgcctcagcctcccaaagtgctgggattacaggcgtgagccaccgcgcccagcagtagacataattttcatttcccttggagtggaattgttggaccatagaatagatgtatgtttaactgttgaagaaactggtttaccaaggaggttgtgacattttacatttctaccagcaactcatgagagttcatttgtaccaaatccactccagtatttggtgttgtcgatctttttcgttttagccattctagttttgtggagttgtgtctcattactttgcatttccctggtgactaataatggtgaacgttttttcacatgctttttggccttttgtatatcttcttttgtggtgtatctgtttagatattttgcccagttttcaaattgtgttgtaggggttctttatttacttttcccaggagtatagattcaagtttccctgattcaagtttcaggagcatagattcaagattccctgaatctatgctcctcagtaggggttctttataaagtctctatactagtcttttatcaaatatatgtgttgcaaattttttttccctcacccatggctgtttattttctgggtgtttttttttttttaaactgcttagttttaaattttgatgaagttcaattaattagtatttttcttttatggttagcattttttgtgtcctcttcaggagacttttgcctaccccaaagtgacaaagttactctcttatgttttcttttactagcttcattttagctttttttttttttttttttttttttgagacggagtgttgctcttgttgcccaggctggagcgcaatctcagctcactgcaacctccgcctcccgggttcaagtgattctcctgcctcagcctcctgagtagctgggattacaggcacgcaccaccacgcctggctaattttttgtatttttagtagagatggggtttccccatggccaggctggtcttgaacttctgacctcaggtgatccgcccgcctcggcctcccagagtgctgggattacgggcatgagccactgcgtccagccaagcattattttagcttttatgtttaggtgtatgatttttcttaaatttttccttgtatatggtgtggggttggagtaaacaagtttttttcctctcatatgggttatctttctagttgttctgcctcatttgttagatttttttttttcctttcctcactgaattgcgttggggcccttttcaaaaatcatttgaccacatatgtgtgggttatttctggactctatattctgttccattgatcaaattgtctgtcctttcaccaataaaatacactgttttgattagttttacatagcaagtccagcagagtgagttctacagcttttgttcttttcaaaattgctttagttattcttggtcctttgcctttgcaaacaaagtttgaaatcatcttgtcaatttctagaaaagagcctactgaaaaagaaaaaaaaaaaaaaaggctgggcacggtggctcaagcctgtaatcccagcactttaggaggccgaggcaggcggatcacctgaggtgaggagtttaagaccagcctgaccaacatggagaaaccctgtctcaactaaaaatacaaaattagccgggcgtggtggcgcatgcctgtaatcccagctactcgggaggctgaggtaggagaatcacttgaacctaggaggtggaggttgcagtgagccgagattgtgccattgcactctagcctgggtagcaacagcgaaattccgtctcaaaaaaaaaagaaaaggaaaaagagaaaagaaaagagcctactgggattttgattacattggtttgaatctatagatcaattggtaggattgctgatttttatcagtagtgccttagattttattgttttaccatttctgcagataatctcattatttcacactttaattgccatattagcctcataactgtggtcccttcttctaatgcctggctatccttataaagttgcttgattaatctttctgaaatcttatatttaagatgccctccaattaaagaaccaatagtggctggagtagatggaatccaaagtctttaaatttacatttaaagcatgtgcttcttacttctccaggggtctccatttgctctcggtactgactttatgttatagcttagggttcactcaccttcctttggatgagctcttccaccttcgtaattttattcaatattagtttccctctgtcttgaaaaaactgtttttctttcaaattccatggttctttcagagtctcaccttctgaggctgcttctgtgatacctccttttgacttaaagcctttactatccattcttggcaactgtaatttagtatcctgctttgtattactagttcatttttcatttgtgtactttgtttttcttattagagtataaattcccatgtgtcagggactaattatttttagatcaaacataactgcttatccaatttttattaatcattatccaaattctggcttattacctaattcttcccctctattctaactggtcagtcttaatttggtcttagccctctgcctttcccagctttttatagtcatattttaccctttttttgaggtattctccaaattatttatagtattattcttctctgaccaatgttacccatggaagttttttttgaactttaaaattcttatttatatatttgttcatgtgtgtaaaccctttacatttaagactagtcaacctaataagaaagtactattattatccccattttacaaatgaggaaactgaaaacagagttttaagtagcttgtccgtgttactcagcttgtgattggtggagctgaatttgaatctaggttgtcttgttccagagttcttaactgctgtgtagtattaatactacttttctgtatgttgtcttgaaatttgtttctctaatttctatatattttctctctcttcttatgttaagtagaatcttaattatttctattcttttttttttttttttttttttgagacagagtcttgctttgttgcccaggctggagtgcagtgctgcaatctctgctcactgcagcctctacttccaggttcaagtgctcttcccacctcagcctcccgagtagctgggattacaggtgcttggcaccacacccagctaatttttgtgtttttagtagagatgaggtttcaccatgttgcccaggctggtctcaaacttctaacctcaagtgatccaccccacttggcctcccaaagtgtcgggattacaggcatcagccaccatgcctggcctttttctattctataacaaacccataaactctagtgcaataatttagatcaatattacctacttattacatgaataaaaatggaagtgatacttgttcattggctgttgtcactattgcatatgctaactttttctgtttacatttcagggcatttgaatatgaaattcgattttacactggaaatgaccctctggatgtttgggataggtgggtctttttatttcacaaggacaatagaaacattaacagataagtccttatggccatgtttctcaaattggggtatatggagtgtgtgtcagagtagacagtggtgtcctgggggcacagagatccagaataatcataatatatcttcctgaggtgtttaagattcaagaaatttcaagtttatgatgtacaactttgaactacacccttctatccctatcctcagttttccccagaagcatgtactagagatactttggagaagtttgagggatacaggcttagggtatgtcattgaggacctcaaaagaaacatactttacttctgctaaaatccagaatgggtcttggagcaagaacaaaagtacatgttcaatttaaaatgtgttcttatctttttcctcccatttaggtatatcagctggacagagcagaactatcctcaaggtgggaaggagagtaatatgtcaacgttattagaaagagctgtagaagcactacaaggagaaaaacgatattatagtgatcctcgatttctcaatctctggcttaaattagtaagtctttctcaagtgccatctgagttttaaatattaaactaagagattttctctagaggtatctggtataccaaaaaaaaagtaaaacagccattttgaaccatttagtagattggaaacatttaataaatatgcaatacttcttaaattggttctacttaaaggtggacttaaatatagtataataaggtattttcgcccttttaagattgatcgcaaagtctgtagatctctcagtgagtatggattaataatttattttatattttgaaacaaggtctcactctgtcacccaggctggagtgcagtggctccatcatggctcactgcagtctaaacctcctgggctcaagcaatcctctcgcctcagcctcgtgagtagctgggactacaggtgctgtgccattacgtccagctaattttttaatttttaatagagatgacttctctctctgttacccaggctggtcttgaactcctgagctcaagccatcctcccaccttggcctcccaaagtgctgggattataggcgtgagccaacacccctagtccggattacttatttatttattctaaacataactgggtgcagtgtttcatgtctgtagtcccaacactttgagaggctgaggtgggctgatcgcttcagcccaggagttcaagactagtcagggcaaaattggtgagaccccatctcataaagtacagaaattaaccaggtgtggtggcacagcacctgtagtcccagctactcaggaggctgaggtgggagggtcgcttgagcccgggacgtccagactacagtgagctgagattgcaccactgtccgccagcccaagtgacagagcaagatcctgtctcaaaaaaacaaccaaaacagaaaaacataattgggccattcaactgtactggaggaggaggtgcaggagctaacatttggcagcagtgtggttgtttggggaaaaacttccctctgtgattctggtatccctttcactcctttatgaaagtcatcaacacaaagaagtgatattttagttttttattggtctttggacttttttcacctagtatattgctacagccaaaaatgtctgcctcagctgggcatggtggctcatgcctgtaatcccagcactactttgtactgtcttacttgacatgtaggaaaaacatattttttattaaaaaaatgaccaccgtttgttagacattaatattactgcttttattctaaaataaatttaaaaaaataaacaataaatatttggaattatttacaaccaccacaatatgatgaaatattgacattaaaactgataagatttcttactaaaataaatctcttggcattaaaactgataagatttcttaataaaataaagtaagaaataaatttcttactaaaataaagaaataaatttcttactaaaataaagtaataaagtaagaaataaatttcttactaaaagtaataaagtaagaaataaatttcttactaaaataaagtaataaagtaagaaataaatttcttactaaaataaagtaataaagtaagaaataaatttcttactaaagtcttaaggaggactgattttaaacttccaatacagttgacccttgaacaacacagggcttaggtgtgcccacccctcacccagttgaaagtctgcatataacttttggcccccaaaattattaatagcctactgttgaccagacgccttaccaataacataaagttgatgaacacatagtttgtatgccatatgtattatatctttttttttacaacaatcttagctagagaaaagaaaatgttattaagaaaattataaggaagagaatgtatatttaatagtcattaagtggatgattgtaaagatcttcatcctcgtcttcacattgagtaggctgcggaggaagaaaacgggttcgtcttgctgtctcacgggtggcagagatggaagaaaatctgtatatgtgaacctatgcagttcagacctgtgttgttcaagggtcaactgtagttacaagtatagaaaattaggtaaatcctgaagccatgaggtatcttgatttcctcaggacattcgacaaatatttttacatccttagtgaaaggttggagaaattaccctatggatattagttacagaaacttataatgaagaatggcacccaaagaatgctaaacagatttgttagcctggagtctgtggaccctggtggtgtaacaatggattttgtccttcatttgtcactagcctaaataatatctttacatgtaatttattataagattggagactgggtgtggtggctcccacctgtaatcccagcactttgggaggccaaggtaagtgtatcatctgaggttaggagttcgagaccaacctggccaacatggtgaaacctcatctctactaaaaatacaaaaaatgcaaaaattagccgcacgtggtggtgcgcacatgtaatcccagttactcgggaggctgaggcaggagaatcgcttgaacccaggagacagaggttgcatgaactgagatcatgccactgtactccagcctgggcgacagagcgagactcagtctcagaaaaaaagataaaaaaaaaaaaaaaaaaaaaagattggactagctgcacctctaaagtgacttttaatcccaggattctatgattatatttaattggagttgttaaaagtaacaattaattagaataatttatctgtttatttttgataacctggtgcttgtactgaagaagaataatatcatgaagtaaaaagcataatctagatcagtgctactgaaagaagggtttgcatactgtttgagataagttcaaaaattgaaagtgagcttttggaaactttggtaacaatttgatattgccgggacatccaagcacatcatcattctttgagtaacttctgtttttattgtactttatatcagtccataatggaacacacacatacacacaataaaactggccccttcgccacagattttttgagaagcacgggtatagacaaccatcaaattcaaatgatcagcactagaatgatcagcaataatctgaactttgtatgtggctaacgaggtacatattaaactattgctttttctttgtgggtctggtcaagaggagtaacagatgaattcttcacactactttctttcgctttgcagaaggatttctccagtcagttattttatgtgactcctacagtctagctaaggaaaaaattgtttctggaaaacttctggtatttttatttaaaggtataaaattattttagtttggcaatttaagggttaccaaaaaaaaggtttatttaacttttagatctattaatctaaccatatagtccttttatttatgttatttcttaagtgatcttattcagcactctgaataacctgatctttactggctgtcccacgcacaagaacaccagaaccattcagaaagctctcaaaatagtgaaatcaatgttaagctatatttatgtagtgacagatatcaaagactggatcttatgctggtagcacattcagagttataacttttcttgaaacaccaccacatatgagaaaacatcactaatttaaataagcaagaaaaatccatttactgaattactgcaaaattaaactataaaatactaattatttttgttaaagatataaataaaacattccatttatttagcatttgttgtactagaccatgattaagggctggcatatcatagcaatgtcttctgagtttgtagagcttagtttatctgaaagacaaatatgaagccattaattgtaactgtaacagagagaaaattacgagttctataggaacaaatacaagacggacttaacctgggctagacaattaggaacagataaataggagatatttggtaaagtaacaaatggtagcttctctagtagtaacagaactcctaactagaacattgaaatgctatttttgaccaggcatggtggctcacacctgtaatcccagcactttgggaggccgaggtgggtggatcaccaggtcaagagatggagaccatcctggccaatatggtgaaaccccatctctactaaaaatacaaaaattagccagccgtggtggcgggcgcctatagtcccagctactcgggaggctgaggcaggaggatcacttgaacctgggaggcggaagttgcagtgaggcgagatcgcgccgctgcactccagcctgggcgacagagtgagactctgtctcaaaaaaaaggaaaaaaaatgctatttttatgtgaatttagggattgtttttaatagcttctaatgctgattagagtctggtggaatgagtatttttgcgaattattaaattttagcattaacaatttttacaaccttctcagaaagcaatttgttaccttttaacatagttctaggaatttctcttaagggaataatgtaaaatgtgaaaggttgtatgcatgaagttattttttatagaattatttataattgggcaaaattagaagttgtttaaatatccagaagtagatgaacaattaaattatggaagctctattagatgaaacatgatgcattcatttaaaaataatagtgaaaagaattcgaggttgcagtgagctatgattgcgtcactgcagtccagcctgggcaacagagcaagaccttgtctgtagaaataaaaaaaaattaaaaataatggttaagtgtaagcagcagcgtggaaaagtgaatgatgcagtattatagtggaataaaagcaaattttattatgatcaaaactttataagataatacatatcctttcatccttaagggaaaaaagactgaaaaaatttatcaaaatgtttgtgatgtgaggtttttagtgatattttcctccctcttgctaatagaattatctacattgtatatggtctcataatgtcccttctaaaacacagatttgactatgtcattcctttgcttatcgctcacccaccctaacacatacaacaattactattaggcagattcaaaattgattagcttgatattcaagacctatcacagcctttttctccagacaactatctagcctggacccctacataacttttaattttctgtatctttgcttatgctattttctctggctgaaatacccttcccttcccattttccacctgataaaagtccatttctccttcagggctaagctcaaatgttaaccccttcctcccccctttttttaattttctttagagacagggtctcactctgtcacccaggctagaatgcagtggcaccatcatagttcactgcagcctcaaactcttgggctcaagtgattctcctgccccagcctcctgggtagctaggactacaggcgccttccaccatgcccagctaaagttttaaattttgttgtagagacagggtcttgttatgttgcccaggcttgtctcaaactcctaacctcaagcgatcctcctactcctacctcggcctcacaaagtgctgtaattacaggcagaagcgactgcacctggcttattactccttcttgaagcctttactctccaactcttcttacaaatcgctcagttttgcctcttttttaggtcctcccagtatggtccttatcacattgtaataatagatttttttttcaatacaggaattgcatgtagtatctccagtgattgtttggcaactaataggcattcaatacgtgagtagaaattggttaactgttaacacttctgttacaggggcgtttatgcaatgagcctttggatatgtacagttacttgcacaaccaagggattggtgtttcacttgctcagttctatatctcatgggcagaagaatatgaagctagagaaaactttaggaaagcagatgcgatatttcaggaagggattcaacagaaggctgaaccactagaaagactacagtcccagcaccggtaaactttctttggagcttgtcttaactctaaaaataatagaaataaattatctcttttttgcatctgaataaagtgctttctggtggattggcatgttaagtttacttagttactattcaatttttttaaagatatattttaaaaattttatttatcatagagtaaaatccactctttggtatatggtactaggagtaaaaagacttgtgatcatcatcattaacaagatacagaataatttcacaccccccaaaagaattccctttgtaattagtacctatgctgaacccaaacccctggcaaacactgatttattctccagcctgtggttttgccttttccagactgccatataaatggaatcgtataatatatagccttttgagtttggcctgtttgatttagcataatgcatttgagttgtaaaagttctttatagattgtaagtataagcctttgtcagatatgtgatttgaaaatattttctctcagcttaagcctggtctgttcattttcttaactgtcttttttagaacagaagtttttaattttaaagaagtctaatttacaagtttttcttgtatggatcgtgcttttgatgttgtgtctgagaattttttgtctagccaaagattgttacagagattttcatcttcaagttttcatcttcaagttttataatttcactttttacatttagatccctgatccattttgagttaatttttgtagaggatagaggttaaggttcttttttagcatattaatgttcatttgttccaatgccaattgttgaaaagactaacctttctccattgaattgcctttataccttgatttttaaaaaatcagttgatcatattcatgtaggtttatttctattattctattttttctaccgatgtacgtgtctatccattagtgtttaccatgctatctagattactataccttttatagtaagtctagaaatcagataaaatgagtcctctaactttattcttatatttaactctggtagttcatttgactttctatataagttttagaatcagctttctgggattttgattaggattatacaggaatatggtataattctccatttatttaggcttttttttttttaagtaaactttggtagatttttgtctttcaaggaattgatccattcatccaagttaatgagtttgtgggcatagagttgttcataatattcccttattatgcttttaatgtctgtaggttatatagtgattctccctttctcctgatactggtaatttatgtcttctcagtctggcttggatatcaattttactgattgttttagaaaaccagcttttgggttcatttcattgattttttttttttttctcttaatgattttctgttcttaattttatttctgcactttatttcttcccgcttgctttggatataacttgctcttctttttgtagtttaaggtgaaagcctagatcactgattctagacctttctctttttctaatataagcatttaatgctctaaattcccttctaagcactgctttagttgtatcccacaagttgtgatatactgtattttcattttaatttagttcaaaatattttctagcttaccccgtgtcttccttttgacccatgagttacttagaagtgtattacttcagttaggaagtgtttttggatttttcagatatctctgttattgatatctagtttaattccatagtggtcagagaacataaggtatatggtttcaagtcttaaatttgttaaggtttgttttatcacccagattatggtttatcttggtgaatgcttcatgtacacttgaaaaatatgtgtattctgttttttagagtgtaatattctgtaaatataatttagggcaagttgactggtagtctgttctggtcttctgtatcattgatgactttctgtctacttgttatatcaattactaagaagggttttgaagcctctttgtgattttgtctatttcttttagtcccatcagttttgcctaatatattttgaagttcttttagatgcataaacatttagaattgacccctgtatcattatataatgtctccctttatccctgataatactccttattcagaagtctacctggtctgatattagtacagctattccagcttcctttttgtttgcatgatacatcttttccctttctttactttttaaaaaccacattaaaaaaaaaccactcttagagttgtataatcatcattacaatctaattttagaacatttttaacaccctaaaatgaaccccatgcccattagcagtcactctccattcctacttacctcgctcctaggcaaccactactctgctttttgtctctatggatttgcttattctggacattttagttaaatggaatcctacaatacatggtcttttgtgattggcttcttttacttagcatactatttcctttttttttttccagggagggaagggtggaacagggattttcagcatactgttttcaaggttcatcataaatgaacatagttgtgacatgtatcagtactttattcctgtttattgccgaatgatattccatcatatgaatattatttatccattcatcagttagtgaacatttaggttgtttgcaccttctggctattacaaaataatactgttatatttgcgtaacaggtttttgtgtcattttctttttacccttttgttaagctagttgaatttagcagtggagggttatataccaactttagtgacacttatgttaattagcttctttaacttttaacctatgtctttatattttttaagtgggtttcttatacacagcaaatagttgggtcttgttttttctgtgaactctaacaatatcttttttgttatgttgagaccatttaatagaatttttaatattgttgggtttaggtctactattttattatttgttccatgccttttgttcctcttcagcctctttcctaccttcttttggattatctgagtgttttttagtatttcattttaatttgtgttattggctttttgcctcttacaactttaagtggttgctataaggtatataatatacctaaactttcacattctacttaatgttttaccatttaaagtaaaatacagaagctttataaccataaaagttcctttatattccctacccttttggtatacttgtcataggtattacatctatatgcattgaaaaccccaccagacaatattttgttttgctttcaaaagccatatatatatatatatatatatctcttaaataacttaggaaaatagtctgttgtgtttacccttttttttgttgttgttttttcttcattcctgaagctccaagttcccttctagtatcatttcccttcagtctgaagaacttcttttagccactttcttttagagcaggtccgttgtcaattaattctcctagtttttcttcatctgagaatgtcttcatttcatcttctttcctgaaaaatatttttactggatatagaattctgggtcaacgtttcgtttcttttttttttttttttttttgagatggagtcttgctctgtcacccaggctggagtgcaatggatggcacgatttcagctcactgcaacccccacctcccaggctcaagtgattctcttgcctcagcctcccgagtagctgagtagctgggactataggcatgcgccaccacacccggctaatttttgtagttttagaagagatggggtttcatcacattggccaggctggtctcaaactcctgacctcaaatggtctgcccaccttggcctcccaaagtgctgggattacaggcatgagccactgtacccagccaacatttcttttctttcaccactttaatgatgttatcccactgtcttctggcctccttggtttcttttttctttttctttttttttttttttttttttttttgagacggagtctcgctctgtcgtccgggctacagtgcagtggcgcaatctcggctcactgcaagctccgcctcctgggattacgccattctcctgcctcagcctcccgagtagctgggactacaggtgcctgccaccacggctggctaatttttgtatttttagtagagatggggtttcaccatgttagccaggatggtctcaatctcctgatctcgtgatgagcctgcttcggcctcccaaagtgctgggattgcaggcatgagccactgcgcccggccctctctggtttctaataagaaatctgtagtcatttagtagttcctgacctatacataatgtgttgattttcctctggccttgtccaagattttttcttgtttagttttggttttcagaagtttgattgtgatgtgtctagatgtgatttttttttttttttttagacagagtctagctctgttgcctaggctggagtgcagtggcacgatctcagctcacagcaacctccacctcccgggttcaagtgatcctcctgcctcagcctcctgagtagctgggattacaggcatgcgccaccatacccagctaattttctatttttagtagagatggggtttctccatgttggtcaggctggtctccaactcccaatctcaggtgatccacccgcctcggcctcccaaagtgctgggattacaggcgtgaaccaccacgcctggcctagatgtggttttctttacatttaatctgggcttcactgggccttttgaatttgtaaatgtatgcctttcacaaaatttgacaagttttcagccgttatttttaaaatgattttttatacctattatctctttcttctttctctctctgagacttcagttgcacaaattttagaccatttcccccgactctgctaccaataatctgtccaaattaaaccttttgatatcattccataggtccctgaagctctgtttaaccatttttctttttgtttttcagattggcccatttttattgctctgtcttcaggttcacttattcttttctcttccatctccatcctgctattgaaaccattcaacataaattttttatttcagatactgtatttttcaattctaaaatttctgtttcattcttttttataatttctgtttctctgttgagaatttctgtctctccattcatttcaaatgtttttaccttcatctcatggaacatagttatattaggtactttaaaatctccaggctgggcacagtggctcacgcctgtaatcccaacacgctgggaggccaaggcgggggaatcacttgaggtcagcagtttgagaccagcctggccaatatggtgaaactctgtctctactaaaaatgcaaaaattagctgtgcatggttgtgggtgcctgcaatctcagctactcgggaggctgaagcaggagaatcgcttgaacccaggaggcagaggttgtagtgagccgagattgtgccactgtactccagcttgggtgacagaatgagactccatctcaaaaaacaaaataaaatctccatctgaaaactataccatctgggtcattttatgtttgcatttgcttattgttttttcctttgaaagttggtcacatttttctagttctttgtgtgtcaagtaattcttgtaccctggacatttatcctgaccatatgttataagactctgatcctgttggccaatattccctggagaatatctatgtttttgtcttagtagacaaccacacttcagatattacaagttctttgtcatcttgtgtggctgttggttccactgtcagttcagttttcaagacctttgctgtgttgctttgggtctgtcccatgcatgtcctgcttaagggttaatctggggcttgggcagtggtttatatcattgttcagttctcaaagccttttctgtgctgctttgaatctaccctgtgcatgcatagctcaagagggaacctaagatgtatgccaattcacatacagaattaggagatcctcttgttcagctcattcctttgcagttctcctcccatattctttggccttcagagtcctcttttcccagtcctcaggccagaaagatggggtttctctgagttttacattcacataccaccactgcaacagttcaaaaccacaagagaaaatagaagaataaaaaaacaggaaacaatcctgcgtgggttgtttcttcaagttttgacccctctccacagtctgcttgcttttgttgacttttcagagccctcagttagttgctttttttgtatatggtctatagtttttaattcctatcagtgagagaaagagaaaaggtacagtgggcatactccatcttggccaacacctgcaatttattctgggttttttggggttttttttacccttatgataatactttttaaggctagttaaatgaagcagtggtaggaatggagaatctcttctgataatacttaaaactgtggcagcagcataggaagtttacttttcaaacttctgccagctttgctaaagtacaatgtcatgtcatatgcaacttcatttcatataggtcaggagaaaccgtatatgtgtgtgcgtgcacgtgcgcgcatgcatgtgtatagaaaaagagacacagtgataaaatagatgtggcacagtgttaacaattggtgggtcaagttttctaataaaaagttagtgggaaaactctaatcttaataaactctgtgatcttagtcttaataaccctaacctgatcctcagatcaacttaatggtgattttcagaataatttaaattggtcaaacttgggcatttaaagggagagttaaataattctagccaaaacttttcatgatcttaaggtgactctctttacttctgagagaataaacatgttctttgggatatttctgcattcttcccccagcctgctcttctaatttgtttactttaacaaattggaaattttgagtctggtaaaatagtggtcacctcactaaaagttgtgcattctgctactttagacaattccaagctcgagtgtctcggcaaactctgttggcacttgagaaagaagaagaggaggaagtttttgagtcttctgtaccacaacgaagcacactagctgaactaaagagcaaagggaaaaagacagcaagagctccaatcatccgtgtaggaggtgctctcaagggtaagtttgttaaacgttatttcggaaaactgttagtttctagtggtaaaatcatgtaagaagataatacataaatatacctgtggacacttctagtttgctgaatactgagtagcaaaaagaaggaagtcaaaggagagctaatattacagtgtgcagtaaaatcaaaatgcatcagtaattttgtgtcttaattaagaaagacctaacatttaggaagcatcaagattttctgagtttgaattgttagttgaaagaagatatgtagtaacatagcaggtgttgttaaagtgaagcttacatataccaaagcctcagagaatgatactaatatggttaagaaccctgccttcagagccctttgggaccagaaattagactctctatatacccaaagatcagcaataattttttttaattaacatggactttttttttttttgagagataggttctcgctctgttgcctgaaacgtggtagtgcaatcatagctcaccgcagcttcaaactcctaggctcaagcagttcttttgcctcagcctcccaagtagctaggattataggtgtgagccactgcatctggacaacactgactattttttagagtagttttaggttcatagcaaaattgagcagaaggtacagagaataataagcttttatttactaaatttatagcagttagacatgtaaaccaggctgtttttttaatctcttatttctttcctggtatcaatttatcaataatcagaatgttacttggtggttctagaattaggatatagggagtgtatggtcccaaaggctatttcatccagatcatgatgaagcttggttaataaccagccccacaacagagaaaacccctaataaatgggttaattttgtattctctagttccagtatatctctgctgatttccattgagagaaaatttaaaactgaagaataaaacttaggttagtttctgataaaactagataatgttataatgatgactgaaggaagatgcagaatgtcttttttggaaatttgtgaataaaagatgtggggtgactggaggagggaaaagaaggcagaatataagtaacaaagaatggataaaacgattctatttttgatttattaatttttttaaagattatttttaaaatttctttttttttttctgttgtagtggaaatactgtccttgagttgaggaagaataggtatactttatctggcatctaagttaataatgaaacattttacatgaggttttaatatttttgctcctagctccaagccagaacagaggactccaaaatccatttcctcaacagatgcaaaataatagtagaattactgtttttgatgaaaatgctgatgaggcttctacagcagagttgtctaagcctacagtccagccatggatagcaccccccatgcccagggccaaagagaatgagctgcaagcaggcccttggaacacaggcaggtccttggaacacagggtaaggactcttagatccagtgctttgctgacacaacaaagacttcacatttagggtagagaagtatttttaccatctcttttaattcctcttgaatatttagccatggtctatatatgctgtctgagaacataaaactatggtaattttagttttcttcttcatctccagcctcgtggcaatacagcttcactgatagctgtacccgctgtgcttcccagtttcactccatatgtggaagagactgcacgacagccagttatgtgagtgtggtttttggatattttgaagtgggaattattaagggtgggcagaggcacctattctacttcccaaaggcagtttcttctttatgaagatgaaagtaaccaggccaggcgcagtagctcacacctgtaatcccagcacaggctgaggcaggaggatcccttgagcctaggtgttcaagaccagcctgggcagcctagtgagaccctgtctctatttattaaaaaaaaaagtaaccagacaaaattttgtatatcctttatgtttgtattcctttgagtatgttagggttaaaagaccatttgttaatattttattaaggaataaacattaattaggtttatattttcattactgaacattgctttaggaaaatcaatggtggctattctggaagatggattgaacatacataaataagctattggaatagttcaggcaaggatattaaggggcggtatttgggcagggtagtggtaatgaaaggagaagggagcttggatgggagaggcttcagcagtagagttagaagatttgtctgatgggataatggggatgtagggaaaagataatgtgatttaaatgagacgttctcattttgtcattgatagtaatgagaaattatgatagttttccctcttatcctgctttttccttctggacatatttttcctctttcttcctaatccttagcatttctgtttttaagaaaaagtatagtagctggtggttaaataaacaagccagcctgagatttagtctaatgcttaacattgcctagttctttttttttttttttttttttttttgagatggagtctcgctgtgtcgcccaggctggagtgtggagtgcagtggtgcgatctgggctcactggaagctctgcctcccaggttcacgccattctcctgccttagcctcccaagtagctggaactacaggcatctgccaccacgcccagctaatttttttttttttttagtggacacggggtttcaccgtgttagccaggatggtctcgatctcctgacctagtgatccgcccgccttggcctcccaaagtgctggaattacaggcgtgagccactgcgcccagccctagtcctaatactaggttgaattctgtcccagtgcaagagttacctcataactaatttataactcccactacatgctaggaatgcaaaaataataattaagattttgagcaaaaattctgcctaagtgctcaggacaaggggaaggctattttttttctttttttttttttctttttaaacagagtcttgctctgttgcccagcaggctgaagtgcagtggcaccatctcagctcaccgcaacctcgacctcctggttcaacgggcatggcagcccacgtttgccatcccagcactttgggaggccaaggtaggagaatcactccaggccaggagttcgagaccagcctgggcaacatagcaaaaacctgaccctacaaaacaaatttttttttttttgagacggagtcttgctctgttgcccaggctggagtgcagtggcatgatctcagctcactgcaagctctacctcccaggttcacgccattctcctgcctcagcctcctgagtatctgggactacaggcgcctgccaccacgcctggctaattttttctattttttagtagagacgggatttcaccgtgttagccaggatggtctcgatctcctgacctcatgatccgcccacctcagcctcccaaagtgctgggattacagatgtgagccaccgcacccggtcaacaatttttttttaattagctgggtatggtggtgggtgcctgtagtcctaactactcgagtggctgaagcaggaggatcacttgagcccaagaatttgaagctacagtaagctatgatcatgccacagcactccagcctgggcaacagggcaagaacctatctctaaaaaataaatcaattataataataaagaaaaatcagcttggcatcgtggctcatgcctgtaatttcagcactttgggaggctgaggtgaaaggatcgcttgagcccaggagttcaagaccagcctgggcaacacagggagaccctgtctccacaaaaaatttaaaaattagccaagtgcagtggcttgcacctgtggtcccagctacttgggaggctagggatcacttgagcccaggagtttgtggctacggtgagctgtgactgcaccactgcactctagcctgagtacagagtgagaccttgtctcaaaaataaataacgaaaataaaaaagaaaatcctatgagcctttatagaaatggataacatacatttgtagatgtctggtttttctaatgtttcaagtcattttgtagaaacatgacttatgttaaaattaatatggtacaggaaatattaaacttattatttttgagacggagtctcactctgttgcccaggctggagtgcagtggtgcaatcttggctcactgcaacctccacctcctaagttcaagcaattctcctgcctcagcctcctgagtagctgggattacaggttcgggccaccacgcccggctgatttttgtatttttagtagagacagggtttcaccatgttggtcaggctggtctcgaactgacctcgtgatctgcctgtctcggcctcccaaagtgctgggattacaggcatgagccaccatgcccgacctaaacttatttttattttaaattcttttccatggatgttttatttgacctctccacacatttttctttaggttgcgttttgcttagtgatgtatagaagctcttcatagatgaagaaaatcagctaaaaatctataatacgagttgcaaatattttccccctactttgtccttgtcttttggcttcatgtagcagtaaccattatgcttttaattatcatacagtcaaatttaagttttctttttttttttttttttcgagacagagtcttgctctgttacccaggctggagtgcagtggcgccgtctcagctcactgtaacctccgcctcccgggttcaagcaattctcctgcctcagccacccgagtagctggcattatagacgcccgccacgacgcccagctaatttttgtatttttagtagagccatggtttcaccatattggccaggctggtctcgaactcctgacctcgagatctgcccgccttagcctcccaaagtgccgggattacaggcatgagccactgcactcagccttttaaagcttttttttctttttttttctaaacttcatcgaaatataattccgtggcttttagtatgttcacagagttgtgcaacccttaccacaatcaattttagagcatttttatcactccagaaagaaccttgtacccatacctgtaagactcgattccccaccattaccccaatccccaccctagcaaccaactgtttttttctctatagataatttaccaattctagacatctcgtgtaaataatataatatgtggtctttgtttttttttgtttgtttgttttttgtgttttagacagagtcttgctctgtcgcccaggctggagtacattggtgcaatctctgctcactgcaaccttcgcctctccagttcaagcatttctcctgtctcagccttctgagtatctgggactacaggcatgtgccaccactcctggctaacttttgtattttcagtaaagacaggctttcaccacgttggccaggctggtctcaaactcctgacctcaagtggtccgcccacctcggcttcccagaccgctgggattataggcgtgagccactgcgtccaggcagtgtatggtcttttctaactggtttctttcacttagggtagtgttttcaaggttcatccacgttgtgacatgtatcagtacttcattattttttattgccaagtagtattccgttgtgtggcttcacaacattttatttaaccattcatcagttgatacaaattttaattgttttcattttttggctattatggataatgctgctgtgaataccgtgtatacatttttgtgtggacatgtgttttcgtttttcttggctgtatacctaggagaggaattgctggatcgtgtgattaactccatgtttaatattttgaggaactgtcaaattgttttccaaaaaagctgtaccattttaccttctcacattcccctaatgtacgagtactccaattccttcccaacacttgttattatgcttttttggttattgtcattctaacagagatgtgaagtggtatttcgctggttttgatttgcattttcctggtgactaatgatgttgagcctattttcataggtttattggccttttgtatatcttctttggagaaatgactgtttaaatccttggcctatttttcctttggattacagtagtccctccttatctgtaggggatacgttccaagactccagtggatgcccgaaacttgatagtaccaaaccatttatatactatgttttatcttatacatgcactgtggccataacttttgcagtttgaggtatgacagcaaaactaactttttttccttcttcacaatttcactgatagaagattcattcttactgtaaatcttatcaacttcagcatgtgatttattttttatttttattttattttttttagtgaaagttgaggctgggcatggtggctgatgcctttaatctcagcactttggctctgggaggctggggcaggaggattgcttgagaccaggagttcaagaccagcctgagcaatatagtgagaccccatctctactaaaaataaaaatacactggctgggcatagtggcacatgcctatggtttccgttactatggaggatgaggtgggaggattgtttgtgcccaggagtctacggctgcagtgagccagggtcacgccactgtactccaccctaggcaacagattcagatcctgtctctaaaaataaaataaaacaataaaataaaagttaagaactttcacctttggcatatccaaatcatcagcatcgctactcttgtgctttggggccattattaagtataataagggttacttgaacacaagaactgcaatgctgggacagctgatctgatacgagtcagctgctaagtgactaatatgtggatgctgaacaaaaggatgattcacatcctaggtggaacaaaatgggaatatatgggatttcatcaggatagtcagaacgccttgtaatttttttttttttttttgagaccgagtctcactctgttgcccattctggagtgcagtagtgccatcgtggctcactgcaacctcagcttcccgggttcaaccgattcttgtacctcagcctcccaagtagctgagattacaggcttgtgccatcacacccaggtaatttttgtgtttttagtagagacggggtttcgccatattgcccaggctggtctcgaactcttgggctcaagtgatccacccgactcagcatcccaaaatgctgggattacaggcatgagccactgcgcctggccagaatgacttgtaatttaaaactgatgaattatttctggaatttttcacttaatatttttggaccaccattgaccatagataactgaaactgctgaaaatgaaaccatgagtaaggggaaactactctatttggttttttattgttgagtttaagagtcttttatgtattctagatacaacttcttttcggatacatgatttgcaaatattttctcccattctgggttgtcattttattttctcaatgatctcttttgaagaccaaaagttatttaaaattttgatgaaatgcaatttatctgttttttaaaattttgtccctgagctttcactgtcatatctaagaaggctctgactaatccaaagtcatgaagatttgcttttatacattttcttctaggagttttatagttttagctcttatatttaggtctgtgatccattcttagctaatttttgtgtatggtataaggaaggagtccaaattcatttttcttcatgtggatatccagtggtcccagcaccacttgttgaagactactcttttgctattgaatggtcttggcactcttgttgaaatatcagttgaccaaaatgtatgaatttatttctagactcttaattctattccattgatctttttgtctatccttatgtcaataccacacagtcttttttttttcccctacacgatctcgattactgcagatttgtagtaacttttgaaattgagaaggatgaatccaactttgttcctctttttaaagattgttttgactattctgattctcttgtaattccttatacattttaagattagcctgtcaatttctgcagaaaagccagctggaattttgatagtgattctgttgaatctgtaggttaatttaatgatattgacatcttaaaaatattaagtcttctggtccatgaacataggatgtctttccagttatgtatgtctttgaattctttcagtgttttgtaggtttcagaatacaagttttgcacttctttttctttaattaatagactttattttttagggcagtgttagctttgcagaaaaatggagtagaaagtacagagagttcccacatactccatccccacccctcaaccctgtacacagtttttcctattactaacatcatgcatgagtgtggtacatttgttataattgatgaaccaatattgatacattattattggttaaagttctttgtttacattaggattcactctaatgtgttttacagttctgtgtgttttaacaaatacataatattatctatccatcattacggtgtcattcagaattgtttcattgtcccagaaatcccctttgctccatttgttcatccctttctctctctccccaaatcccctgtaactattgatcttttcattgtctttatagttctgccctttccagaaaatcatgtagctggaatcatagtatatgtagccttttcaatctggctccttccacttaacaataaggttcctctgcatcttcttctgacacaatacctcatttatagtgctgaatgatattccattgtatagatgtgccacgatttgtttatccattcgcccacaggaggtcattttggtgacttacaagttttagcaattatgaataaggttgcggtagacattcatgtgcaggtttgtttgttttaaatagtcttgttctttcacctacgctggagtacagtagcatgatcctggctcactgcagtcctgactcctggactcaagtgatcctcccacctcatcctccctagtagctgggactacaggtgcatgccaccatggctggcttattattttttttttttaaagatggggtctcactgtgttgcccagcctggtcttgaactcctgggatcaagtgatcttcctgcgtcagcctcccagagcactgggattacaagcatgagtcaccacacccagccaggttttggtgcagacataagttttcaactcatttggctggattgtataataagactaattttagccttgtaggaaagtgccaagttatttttcaaagtagctatactgttttgcattcctaccacccatcaatgagagcttctattgttccacatccttggcagcattcagtgttgtcaatattttagattttaaccactctaataggtgtgcagcagtatcttattgttttaatttgcaattccttaatgacatctgggaagcatcttttcatatgcttactatcatctttttttttttttatatgcttattaccacttttttttttttttttttttttttcccttagagacagtgtctcactctgttgcccaggctgggctcaagcaatcctcctgccttatccatcctggtagttgggactataggtgcatgacaccatgcctggctaattttttttttgaagacagggtctcagccgggcgtggtggctcatgcttgtaatcccagtactttggaaggtgaggcaggtggatcatgaggtcaggagttcgccaacatggcaaaaccccatctctactaaaaatacaaaaattagctgggcgtggtggcaggtgcctgtaatcccagctactcgggaggcggaggcaggagaatcgcttgaacctgagaggcggaggttgcagtgaactgcgatcatgccattgcactccagcctgggtgacaagagcaagattctgtctaaaaaaaaaaaaaaaaacagggtctcactgtattgcccaggctggtcttgaactcctggcctcaagtgatcctcctgcctcagcctcccaaagtgctggaattacaggccactgtgtccaacttccatctatatgtcttctctcacttccttattttaaatttattgtgaagtattttactatttttgaagctatagtaaatagaattgttttcttaatttcattttcttttttccccttttttacatgctgccttgagatgtgatttaattttattttcagattgttcattgcaaatgggtaaaataggttgattttgtatactgatcttgtattctttgactttgatgaactcgtttgttatctaagaccatatcttctgcaaaaagagatagttttgcttcttcctttcccatctggactccttttctttgtttctcttgcctaatagccttgactagaacttctagtacagtgttgtatagaagtgacaagaatggacatccttgtcttgttcctgatcttagggggaaagcatctagccttttaccatgaagtatgatgttagtgtgggtttttcatagatgtcctctagcaggttgagcaagttggggaaactttttaagcatgtaaatgcttggaccctaccattacagtttttgattcactgagtctgggaaggaccggtatctttagttgtacaaaggtatataagaaaataaaaggtatataagttattctgatccacagggttgaaaatacctgctatatcatggttgaggtatcttatacttcattcttttaaaagctatgctgccactctgattcttccccctcagctgagcaccttggacttaatattattaggttcctaatgctatattcttaactctaattcttttggatactaaaccatgaaaaatggattgtattgcataggttaatttctttttatatactggttatgatgaggatatggtattaagatttgctttcacctataagtaatataagctacttgattatcccacttatggctaatttccttccttatcatagcagaggtggtactcagaacataattttattttccttttttttacatttcaataggttttggggaacaggtggtgtttggttacacaaataagttacttagcggttatttctgaaattttggtgcacccgtcacctgagcagtgtacactgtacccgatgtgtagtcttttaacccttactccccccatcctttcccccaaatccccaaagtccattgtatcatttttatggctttgtgtccttatagcttagctcccacttataagtgagaacatatgatgtttggttttccattcctcagttacgtcacttagaataatggtctccaattccatccaggttgcttcaaatgccatttttttgttcctttttgtggctgagtagtatttcatggtagatatataccacattttctttatccatgcattgattgatgggcatttgggctggttccatatttttgcagttgtgaattatgctgctaaaatatgcatgtgcaagtatctttttcatataatgacttcttttcctctgggtagatacccaggagtgggattgctggatcaaatggtggatctacttttagttccttaaggaatctccgtactgttttccatagtggttgtacgagtttacattccccccaacagtgtaaacgtgttcccgtttcaccacatccatgccagtgtctattattttttgatttctttattatggccattctcacaggagtaaggggttattgcgttgtggttttgatttgcatttccctgataattagtgatgctgaacattttttcatatgctcgttggccatttgtttatcttttgaaaattgtctattcatgtccttagcccactttttgataggattgtttgtttttttcttgctgatttgtttgagttcctggtagattctggatattagtcctttgtcggatgcatagatcgtgaagattttctcccactctgtgggttgtctgtttactctgctgattattccttttgctgtgcagaagctttttagtttagtttagccccatctaattatctttgtttttgttgcgtttgcttttgggttcttggtcatgaagtctttaccgaagccaatgtctaggagggtttttccagtgttatcgtctagaatttttatggtttcagatcttagatttaattaagtctttgatccaccttgagttgattttttgtataaggtgagagaggaggatctagtttcattctcctacttgtgacttgccaattatcccagcaccatttgttgaatagagtatctttccccactttacgcttttgtttgctttgtcaaagatcagttgactgtgagtatttggctttatttctgggctctctattctgttccattgatctatatgcctgtttttataccagtattatgctgttttggtgactatggccttacagcatagtttgaagtcaggtaatgtaaggcctccagatttgcagaacataattattgatggcccttgtaaattatttttagcttcttttatcaatcttattgattttttttattttgacccatatgaataatagtaattttgcttctttaggacaccatgtaaaattgaacctagtataaaccacatcctaagcaccagaaagcctggaaaggaagaaggagatcctctacaaagggttcagagccatcagcaagcgtctgaggagaagaaagagaagatgatgtattgtaaggagaagatttatgcaggagtaggggaattctcctttgaagaaattcgggctgaagttttccggaagaaattaaaagagcaaagggaaggtgtgtgtaattcaagtttgtgaagaggacttaacttagttgtgtgaaggttgagctgacctattaagtctgaagaaaactaaccttatagtttgtacctttgtatgatgtttctatggtagtactgtttctttctgtgtatcagccaaaatcccactgctgccttctatggttgtactgtttctgtgtatcagccaaactcccattgctgccttccatgaaaactccttggggtgtgggggcactgagtatgtttagaagtaaaggaagaagttctgaactgtatgaacaatttatattccccaatacaataagcaagcagctatgatccctgacatgcatatatgtacattccatgcatccctattaagtacttttcctaatgttattgcttgaaatatttcactttacctttgatactttgtctgaaatttctccaagggcttatttagattaacatagtaggtcatactgcagtgatttagattatagatattcgtattgttttttaaagacattatatttctaaattaaaggaaaaggtttaaaaattgagatatggggaatttttgggaaacaggaagcagttctgattctggagcctggagtacttgaaggcaagaggtagggcagaatgggctggaaagtagggaagtaaggcatatggggcttaaggcatgagaaggtgaaggagaataaagaagggtacagaaaatgaggtaggggagggtccacttccatttagacattttttattaggatctgtaaggagaaagtaatgtttcttttatacatccgtatccagaataacctactaatatagctcagctctcttaacaggatgtggtgtttgtggggttagctgggaaacttaaccatcacttatactttgaggagcaatcttttctgagttccaggtgacaacctggaagcaaactttggtaaagcagactgttagtaagtttgaaattgccttcatttgttacactaattagtgtcatccaagattgtcaaaagtgctctgggttcaaatggaacttgtgtgtctaggtagaagagagggatggttgcaaagcaaggtgttgagtaaggcttttaaaaaaggagaaccactccagcaaagaaataggctaggagggtggccaaatatgaaccagaaaaggaactaggtatctagataaaaactgtttcctaagggaaaagcttagtctgtaccagatatatagaaggaaaatgaaagtccattttagggccaggcacagtggctcacacctgtaatcccagcactttgggaaaaaaagaccagcctgggcaacatggtgaattctcatctctgtgggaaaaagaaaaggtacattttgttttcaactagccaaagaaggacctactctagattacatgggatttaattaggaataagaaggcattgacctctgagaattttttaatactcatttctattgtgttttttttttttttaaatagagagatgggatctccctgtgttgcccaggctggtctcaaactcctgggctcaagctatccttcccaccttggcctttcaaagtgctgggattataggcatgagccaccatgcagaccttaatgcttatttctaagctggtctctgaatctatttcatgaacttgtataaattcccatctgtgtataagtttgtacccttacataaatcctcatttcaataaatgtggtttctagttactgtcaaaaactgacttcaaagacttgccaactacttactctcagggaaaaatacaagaaaagaggaagccacaatcagggcctacacaaaggttgttttttctttgcgttgcacttccaaatcattttttccctcttctttcaaaaactttagcttctttcagatttctgtcctctaattcttttctatctcctgagcctccttagtgtactcacctcagacttttcagtcacactccatcattcattaattgactaataagcacatggcttactatctatgcctctttaccctaacctgcaaaaccctgcatggccaagcatggtagcatgtgcctgtagtcccagctactcaggagagtgaggcagaaggattgagcccacaagtttgagaccagcctgggcaatatagcaagaccccatctccaaaaacaaacaaaactccatgtggcttagcctttacctacctctccaaccccatctttttctattcaccctcttactatgctgcaactacactggacttcctttggattcttagacacagtggtcttttcctgcattggggcctttgtgccacctagtttgttagcctagaatctttccccagaactttggccccttatcatttaaattacagcttaatactgtcactttatcagaatgatcttccctgatcactggtcttaagtagccctcccttggcctccatctccctacccagtcaaacattctcacgtcacctattttattctttttcctaaactgattttcttgtgtgtgtgttgcccccaaatttgaatgttagtatcacataaccaaggactttgtattatgtaccactgaaacctaagtactcagagctgtgcttggcacatagtaggtattcaatgtttttttccttttagtagaaacctgtgttgttcaaaggtattctatttttttattgaatggataaagaatagaggcctagaccacaagttgaggaccttattccacttaaatcattttcatctgtattagtaacatatatgttgaggagatgagctccaaaggcagtttttgacagaatgagttactatgaggaataatacctcaagcaactttactgtttctagccgagctattgaccagtgcagagaagagagcagaaatgcagaaacagattgaagagatggagaagaagctaaaagaaatccaaactactcagcaagaaagaacaggtgatcaggtaatttttcttttttcatacacaaaactagaatttattgaaacaaatttaaacattataaaaatatagaaggttaaagtcctcccaacccccatttagagtttctggtagtttcttagctgttagtagccggaaagttgagcgggaaagtaatttaacaggtgacttcaaatggaatttgtggcatgtgaaataagtggtgcagtttattgacttcttagttatactccaaatcattatgttattaattctggcttaagctttttattctagctatgttccattaaaatgggattgcctaaagaaatttagtatatgcctggcactgctcagttgagtacaacagtactggtttagagtaggaataaaaattattggaaatgacttttgtggtacactcattttgtactgttagtggatgtctagggaaagagtacagtaaagctaatgttagaactagaaaatagcattttctggatgggagggacattgattttgtttatttaatgcaaacagcaagaagagacgatgcctacaaaggagacaactaaactgcaaattgcttccgagtctcagaaaataccaggaatgactctatccagttctgtttgtcaagtaaactgttgtgccaggtaagactacataggtggaagggacaatgcatataggagggcatttagaaccaacctttgactctctagtgccttgaagtctccttgacgtttacagtatcgagacatggtttttgtaagtctctgtcacaacataagctttgatgctgatgagggaggacagagcattgactattttccactgaagaaacatgtttcttatagaaacaaatacatatactgtttttaaaaaacaaaatcacccatttctaccactaagagatgattaccattaacactgttctgtctcttcttttgtgttgtatttttgttttgttttataaaaatggcagcttaccattttgtaatctgcttatactattaatgcaacttgacatctattatcaaatatatttctgcaacatttttgataaccaaagcttccatcttctttaagagaatttgaattgacagtaataatttatcttagagtaaatattatatttaatggaaaagcctcttggacttttaaaaattaaacagttctttctgtgggtattgagcacatgatttaaaacaagtttctttacagagaaacttcacttgcggagaacatttggcaggaacaacctcattctaaaggtgagttgtatttgacagccttgagaagaacttgctgataacaaatgtattatgtaataaatggtaaatatttttaattatgataaagggattgaaagacagggggactaggatactaggaatttagtataagcatatgctttatgataggaaagacatttgaaagagtatttttttaaagattcctcagtgcttcaaaatatttggtttaattgtaattttaaatttacactaaccaccaaatcttatactttagttactgtacactaaacagcaaagacactaagggaagtgtttcttttcagggaaaaaaaaatttaaagctattttatactcaaattggttttcttttcttcaaaatgtgttaaaagtggtgaaacatgaatatctacttgtaaatggtttggcaaaaataaaaataaaaaacattaaaatctaattaaacctctgtttctaaccgtcaatttattggaaatataaagcatggaggaacgttgttaaacaacacagcgggatggaattggcaaaatccagcattatggggctagcaacccagtttgttcaacaaaaattccccccaaaactctatagaataaaagagatttaagaggcatttgaacagtcacagtatacggatcttaactctgcattcccaattcaaacaaactttaaaaaaatttttttttatttattaatatttttttgagactgagtctcgctctgtcgcccaggctggagtgcggtggcgcgatctcagctcactacaagctctgcctcctgggttcatgccattctcttgcctcagcctcccgactagctgggactacaggcgcccaccaccacgcccggctaatttttttttgtatttttagtagagacggggtttcatcatgttagccaggatggtctcgatctcctgacctcgtgatccgcccaccatggcctcccaaagtgctgggattacaggtgtgagccaccacacccggccaaaacatttttttaattggtaaaatatgaaacttctcactggacatttgatattatatatatattcataaattgttcattttataggtaggtatcatgttttgggattgggatttttaaaaagcctcttttagaaatatatactgaaatatttgcagataaaatgacatgtctggaatttgctttaaaataatcctgttgggttgggtttggggagtagtgacagtggtagagaatctaaatggaacaagatcatctaagtttaggtaattggtaaattgtttaatgaccttttatatgtttgaagctttttgttattaaaaaaacaggttgccttcctgctttcaaacaacacaaaatattgattaatttatctggttgtcttgaagagtaaagcatttactcctagagtatgtatctagtctctctttctctaggtcccagtgtacctttctccatttttgatgagtttcttctttcagaaaagaagaataaaaggtacgttgtttttttgtttttttggtttttttttacttaagaattttctgttattataagtgaggataaattaggggttactgttatgaaaaaaattgctaagtgaggtatgtctttttccagtcctcctgcagatcccccacgagttttagctcaacgaagaccccttgcagttctcaaaacctcagaaagcatcacctcaaatgaagatgtgtctccagatgtttgtgtaaggagcagtatccttaagttaatgtaaatgggctagtggattgtttattcaaaaccacaaaagcttaaggttaaaattgaaaccactgacttgaattaagcacatgaaaagatgctcagcattactactcaacagggaaatgcaaatcaaaaccacagtgagatactactttatatcctctaggatagctataataaaaaattacgcacagtaacaagtgttggcaaaattgtggagaaattagaacatacattactggtgggaatgtaaaatggtgtagccactttggaaaacagtttggcagctctttaaaatgttaaacacagttaccatatgatcctgcagatctctgcccaggtatatactcaaaataattgaaaacacatgttcatacaaaaaatttgtacacaaatgttcatagccgtattactcatgatagtggaaacaaccccaaatgtccatcaactgatgaatggataaacaaaatgttatgtatccataccatgaaatattatttggcaacaaaaaggaatgaagtactaatacctgtcacaacatagatgaaccttgaaaacgttatgtcaagtgaatgaagccagatacaaagaccacatactatatgatctaattttcatgaaatatccagaataggcaaaagtgtcatggattgaggttttccaggggattagagggtggtggagagtgactgctaatgggtatagggtttctttttggagtgatgaaagtattctggaattagatagtgatgatggttgtacaaccttgtgaatttactaaaaaccactgaaatatactttaaaagggtcaattttatggtatatgaattatatctcaatttttataagtagggaaaaatcactaattttaaagccttttgtacttttaattttttaaccaacatagcaaaagacatttgttcttttttatataaaataccttttttggcaatgcaaaagttatgtgggccaatcatttttcttcagtaatgttctatattaaccgctatagactaatgacataatacttaaggtaaaaagaccctgtgtagacatttaagtcaaaataaataacctgtatcattggcattttattaaagttttaaggaggaaaaatcattctcttcaaaccagcctctggaagcttgtcatgagactgaaaagaattgagtatgtttaatctgaagacttttaaggggtgatgtgagcagtagctttagtaacttaaagcagtgttttccacatcctagggaatcatttggaggaagttttttaaaagcactttttcattttagtttcttctctgttgatgtatattttatatccagtaaactgcacaaatattgtacagctagatgaatttttccatgcaattttttcccatatcaagatacagaatatttccatcaactcagaagagactagcgagtcttttgtgactaacagtgcttaagccccattccatctaggtgccattggaatttccagggaagaagtccaagcatgtatttttgtctttttaaaaatactttctcagataattctgctacagttagtctactgactgctatgaaaagacagtgatgtaagagtaattaattacatattgtgttctggagtaaaccaccagagaacatgatgaacaggctagatttggatacagtggttctagattcagctgttcaaggatatgcttaattgttaaaggagtccaacttcatttacctttttttttttttaaccagtcttttacttgaattttgttaataagtacctaccagaattttcatcccctaaaaaaatcatatttaaaatgtctaagctaatatggccataagtagtatttgcataaaatgtatagattataaacatctattttactttaatcacatatataaatacatatatatgtatatatatatttttttctttttcttttttagacagggcctcgctctgtcacccaggctggagtacagtggcatgatctcagctcactgcagcctctgcctcctgtactcaagcattcctcccacctcagcctcccaattagctgggactacaggtgtgagccaccatgcctggctaattttttattttttggagagacagggttttgccatgttgcccaagctggtctcaaactcctgtgctcaagtgatcttcccacctcagcctgcctcccaaagtgttgggattacaggtgtgagcaaatgtacctggccaaatcttttttttttttttttttttgagactgagtttcactcttgcactcaggctggagtgaagtggcgtgatctcggctcactgcagcctccgcctcctgggttcaagcaattctcctgcctcagcctcccgagtagctgggattacaggcgcccaccaccacgcccagctaatttttgtatttttagtagggacggggttttgccatgttggccaggctggtctcgagcgcctgacctcaggtgatccacccaactcagcgtcccaaagtgctgggattacaggcgtgagccactgcacccggcctataattttttttttaactatactttgtttcttccagatgtacctcccacctttagttactaagtcagaaattcaaagtatgtgtcaaattggtaatgatctagaaaattaatctctggtatccatatgggttaaatcaaataggcactatttgtatactacaggtaaatatgtaaagtggtataatctctctgaggacagctaagtaatatagataaagaactttagtgtttataaccttttgaccttacaattctacttttaggaattaatcctaagaaaattaaaggatttataaagatttatgtataaggataaagtagttttaaactagtaaaaaacagaataacctgaaagttggttaatttcttatagacccacaatgtggccattatgtttttaaagaatttttaatagcataggaaggaagaaatacaaaaagtatgagaaagagcaatacagagtatcatgaatgctacagtttcactggttgtaaaactgcttttcaaatgcatagaatatgctatgcatatatcctaccagacatacatgaattgtctttaagaaataaataaaaattaggtatgtagcatagaggaagaagacctaaaaactaggaggatagcaaatcattagaatatttactaagtgaaagcagaagaaaaatagtatttgtgctttagttcataggtgaaatttgttgaggaacaaaaccattgcccaatatttttctttgtatggagaatcttcctggtacattttttggatgaagtatagtttactgtgttcatgatataaaaacctttttatatttgcctagatattctgatatgctatttctgtaccctgtgtcactgagctaatatgtctctctcagtaaaaaagttcttcatgtattgaaatattttagctaaactttatatggtctttatttcaggatgaatttacaggaattgaacccttgagcgaggatgccattatcacaggcttcagaaatgtaacaatttgtcctaacccagaagacacttgtgactttgccagagcagctcgttttgtatccactccttttcatgagataatgtccttgaaggatctcccttctgatcctgagagactgttaccggaagaagatctagatgtaaagacctctgaggaccagcagacagcttgtggcactatctacagtcagactctcagcatcaagaagctgaggtgattggggatttacaggttttacaaaccagattgtttactctcttattctgcatgtgcttgtcagttacagtaatcagttatcaagttcttactaactgccaggtactgtgctaagtgctttacatgagagtagggctgccccagatgaagtgtcaatgggatttagtgattgatttggatgtgagggttaaaagtaaattttgatggtagagaaactaagtggtccgagaggagtatagtaccattgaggaaactttgcaaagtgtacatgactgacgaaaaggaggcatttagtttttctttaatattgagtttaaaatagtggtaggatagcttttgttaattttatgtatttatttatttattgaaatggagtctcactctgtcgcccaggctggagtgcagtggcactatcttagctcactgaaacctccgtctcccgggttcaagcgattctcctgcctcagcctcccaagtagctgggactacaggtgcgcaccatcatgcctggcttatttttatatttttagtagagacggggtttcgccatgttggccaggctggtctcaaactcctgacctcaggtgatccacccgcctcggcctctcaaagtgctgggattacaggagtgagccactgtgcctggccagcttatgtgaattttaaataggcaactagagatgtgttttttaaaaaactatcttttgatagagaggtggaaatgaactatggaatagatatgagggaatggcttatggccagggtctgacacttgttttaggtcagctaatttaactaattccagttttaggaattctttgtaattggcaaatttttgcttttaaagctacattttgagaggccagatgcagtggctcacctctgtaatcctggcactttgggaggctgagggaggcggatcatttcaggccaggagttgaagaccagcctggtcaacatggctgtactcaaaaaaacttttttttgaaactttttccctacaggcttttaagcacatttgctagcatgtattcacattgcatgatttgggtttctcttttctttgcctaaccttttcttcttgaagaaaaaaaagtccagagaaaggataaagaggaagaaagtgtcaatgttagtgtttctcaatattatggaatatagagtagatatttactataggtaaataaagcataaatccagaaatgtatgctggacatggcttattcaccaggtttagaggaggttacctagattctgatttggggaaataatggacttgaaaaatgagactattgctgagtgcattggctcttgcctgtaatcccagcactttgggaggctaaggtgggaggatcacttgaggccaggagtttaagaccagcctgggcaacaaagtgatgccttgtgtctaataaaaataaaaaaaaaaaatagctaggcatggtagcactcacccagctatcatttcctgggctcaagtgattctcccacctcagcctcccaagtagtcccagatattagcttttttgttttacaacctttcagctacttgggaggctgaggtgggaggatcacttgagcccaggaaatcaaggctgcagtgagccatgatcgcaccactgccctccagcctgggtgacggaatgagatcctgtctcaaaaataaaatgaaaagtaaaaaaaaaaaatgaggctatcaaataaattgataacaaattataaattatttaaacctaaattttattgtgttaaaaaataaaagaataacataaaattataaaatgtgtacattaaggccaggtgcagtggctcacgcctataatcccagcactttaggaggctgagacgggtggaccatctgaagtcaggagttcaagaccagtctggctaacatggtgaaaccctgtctctactaaaaatacaaaaatcagctgggcatggtggcaggtgcctgtaatcccagctactcaggaggctgagacaggagaatcacttgaacccgggaggcagaggttgcagtgagccaagatcatgcagttgtgctccagcctgggtgacaagagcaaaactccatctcaaaaaaaagaaaaatgtatacattaagaatttatgaaattataacaaagttgatatatattattcctataagaattaacttatttttgattcttttagcccaattattgaagacagtcgtgaagccacacactcctctggcttctctggttcttctgcctcggttgcaagcacctcctccatcaaatgtcttcaaattcctgagaaactagaacttactaatgagacttcaggtaggatatacataccactatatccatgcctagtgaacacttgtttatctcagcaaactgagctgtatgtttttctttttttgagacagggtctcactctgtcacccaggatggagtgcagtggcacaatcaaactcactgggctcaggtgatcctcctacctcagcctcccgagtagctgggaccacaactgtgccaccaccaatttttgtattttttgtagaggtggggtttcgccatgttgcccaggctggtctcaaactcctggcctcaaaggatcctcccgcctcagcctcccactccctgggattataggtgtgagccaccatgcccagtctatgtgtttttccttcttaaagaagttgccggccgggtgcggtggctcacgcctgtaatcccagcactttgggaggccgaggcgggtggatcacgagggtcaggagatcgagaccatcctggctaacatggggaaaccccaactctactaaaaatacaaaaaaattagccgggcatggtggcgggtgtctgtagtcccagctactctggaggctgaggcaggagaatggcgtgaacccgggaggcggagcttgcagcagtgagccgagatggcgccactgcactccagcctgggcaacagagcgagactccgtctcaaagaagttgccataaattgtgaaatttctagagtagattagtacgaagtgaacacagtttcataaacacctgagacaggtgagtgtagttaaattaacagtgctgactgtgtaatcttgattttttttttcttctactctgttataatatccattttaagcattagggtttttttggtgatatattttcacctttccctcccactggcagaaaaccctactcagtcaccatggtgttcacagtatcgcagacagctactgaagtccctaccagagttaagtgcctctgcagagttgtgtatagaagacagaccaatgcctaagttggaaattgagaaggaaattgaattaggtaagtaccattgaactcatgtcctctggttcatgacagtatacaaataagtgattatttgtacttaagcttgatgcttgagcactgtaaatattcctagattgtattttttaaaaaagcaatatagaggatgacacatcagtaacttcatgtcctaataataggaattatgtcttctcctcttgcaatctttaacaaattatttttaaaagtattctagatactactaactggcaaatacaccagtgcctctatcccttaaaccaggaggtaaaagctacagggctgtatatgttcacagtgatttttaaatggaatcaaactttctcaacaggtaatgaggattactgcattaaacgagaatacctaatatgtgaagattacaagttattctgggtggcgccaagaaactctgcagaattaacagtaataaaggtgggactgattctttataatttcagttactttgtaaataatacggattggagcaataactgtcctcatgttaccatcaaatctttctaataatctctttcaatatgtccaaatatattaagtatcctttcagtttcattttttttaggaaatctctgctgatactttctggcctgctccaatctggacaagttatacattagctttcacacaatcaccacacacaatcaccttggaatttccatttattatcatcctaggtattcacattacctttgtcttatattggatacctagtttctttttatctttgttttttaaaggacacggtctctgtcatccaggctggagtacagtagcatgatcacggctcactgcagcctcaacctcttgagctcaagcaatcctcccacctcagcctctggaatagctgggaccgtaggtgcacgccaccactcccagctaattattttttgtagagacgggggcctctctgtgttgcctaggctggtcttgaattcatggctcaagcagtcctcccaccttggcctcccaaagaactggattacaggcatctaactttgcttttgaatttttttgccattctgagtctcaaagctttgtgtgaagttatttttccttctttctggatccttataggatcttattcttgtccccactattctgaaatgtcacaattacatgccttttcataagtttgttgtcacttatgtgctaggtactcaatggccatttcaatctgttaattccctcagttctgagaaattttcttcaatgggaaaattatttttcccctcagttttctctgttctcttattctctaattccttttattagaggtgtatatggcatctttggacagaacctctaaaaatttaactttttttctcctatattctctctttgtctttttactttactttctgagtatattatcagcttaatatttttggtctttttactaggtttttatttctatatttaattttcaagagctctttttaaaattttttacccctttgtcatctgtttcttcttgttttcttttttgtctgttttgatctctctcacactacaggctttcttcaagtctttggctctctattcgtatttaagtatgggacattgaaagctctgtgtatatggaaagaccttgacagctgtggacctcaatgtaggatgatctagtttggccattttattggaaaaccctccaatctttagatcctttctcttgacctgatcatagaagtcttctccctcagagaagacttctaattttctgcctggagcatataagcctggctgctagctttctgaaatctgagtgaggaaattggtctgaagaatagaagagcagggaggtgcatcttaactgctgcatatataacatctgatatatatactttttcctgttttctatgttatttctacccccctcagtggtgcctagtgccctctagtccagagcccttctgttttatactcactaggtaataaacttctggacttcgagaataggggagaggtagttgctgggctgggctatgggagcagaggagggaagctggggtctaccttcctgtttttttgtttttttttttcttcgagacggagttttgctcttgtcaccctggctggagtgcaatggcatgattttggctcactgcaacctctgcctcccagggtcaagcgattctcctgtctcagcctcccgcgtagctgggattacaggcacccgccaccaaaagcctagctaattttttgtatttttagcagagacggggtttcaccccttcataatcattggtcaggctggtcttgaacccctgatgtcaggtaatccacacgcctcagcctcccagagtgctgggattacaggcatgagccactgcactaggcctaccttcctcttaaatgggattcaatcactcctgtcttagctccaccctcagcctcacttccatgggtaattggtgctgccagttatatagtataggaaaatagccttgtagtgtaaatgtagctcagctttctcctctgccaaaatcagtttttattctaattggattgttacctcctgttctctttccagcttatcctctttccagaatttgttgttattgtgtcttttatagtagatttatgcctttaaaaatatctctttattatttctctatcagaagggctggaaggaatgtgtttcaacctgccagccataaccatagacttaactgaacttatttttaaaatacaatgtcttacaggtatcttctcaacctgtcccatgggacttttatatcaacctcaagttaaaggaacgtttaaatgaagattttgatcatttttgcagctgttatcaatatcaagatggctgtattgtttggcaccaatatataaactgcttcacccttcaggtctgtaatactaaaaacataatttaaagtcctgaagtagagagatttgtgctccatttagcaaaggaatttagtacaaaattcctgtcaatcttctagaaatagaccaattcaagtataagttagaagcattgataattttctcgttattttgaccaaagatctctttggtatttttttaactttttttggtccgttgtcaagcataaataaaagtagaattgtacaatgaactcccatgaactagtcatctatgataatcttagctcatggtcactcttgttttagctatactacccccactggatagtttttaaaacccagacacaatatgtcattttactcttcggtttgttcttaagaaggtttgctatggattttgatgataatatgaattctcaaaaatggttggaatgagggtattttaaatccatttattaagtacctattttgggccaggctcatgcttgatgcccttcatcattatgtcattaaatccttacaaacaatcttatgggagatggcagtgttattaaaactgggacatagactcagtctacagaggtgcctacgttccagtagagaacaaggaagactacaaaccatcagttttcaaggtattgagtataactacgatctgccaaacttgagaaatagtgagttttctgtccttcaatttccaggatcttctccaacacagtgaatatattacccatgaaataacagtgttgattatttataaccttttgacaatagtggagatgctacacaaagcagaaatagtccatggtgacttgagtccaaggtgtctgattctcagaaacaggttggtccttttcattcttataattctgccagctgtctcttaaaacatggatagttgccacttttttttttcttttttgaggcgagggtctcactctgtcacctaggttggagtacagtggcatgatcttggctcactgcagcctccatctcccaggttcaaacgattctcccatcttaaccttgctagtagctgggaccacaggcgcgcaccaccacacctggctaattttttgtattttttggtagagatgaggtttcaccatgttgcccaggctggtctcaaactcctggcctcaagtgatctgcccacctcagcctcccaaagtgctgggattataggcgtgagccactgcacccggccaagttgccaatttttaaagccttttgataaatgccatatcgaggaacatattatgttaagagagtatttacctaaaagtcaaaaatcattaagaatagtttaaaataattcaaagaaataaacacattgaggaaatagattaaatcagataaaagaattaatcactgagtattgtgatgatatatgtcaagatgagatataaaatatgaatattttgaggaatataaagtggattgtttagtcattctttgagtgggaccagtgccactctagcgaggatgccagcaaaatcaaggcactactcagtttcatagaccaaagcttaagtcaggcctaactgacctgttagccaagagaagtgggtaaaaccagagttcaaatacaaactatgccaaggaatggggtttagtgttcaaattaaacccagtgtgtccatcaggttcaaggggtgagcacagagcaggaaataataaatgaatactaaggactgagaaaatatagatcacgttcaggcattaactaggcaaaaacagtccaacatttttgctttgtgaaaagtactagaggactactatattcttttagtgatcattggtgttatagtatttgagtaaaagcagcctggtttaaagatgctgtgtctgcccaaccctgtgtcttgggtgaggtgttaactttgtttctgaggccactggtatacactaatagctggacttactctttacatttcttctgaatacttaatctatcagaagagattgaattagactctaaattatagttaacgtggaaattaaaagaaccctcaatgtgttcctgtgattgtaaccaaaagaaccagagaatcccaccttctcccctgagatagcagagtcaaaggctttcccagacataatgtagcagcatttctcatccagggcaccataggtattttgggtgagacaattctttgtgcaggtgtgttccaagcaatgcaggatgttttatattcctattcccccccacccacccaattaagtgcaagtaacaatcccctaagccgttgtgaccaccaaaaatccccccaaatttccaagtatgagaacccctggtatattttcactctacttaacattaaaatgacagtgctgaaattcccagggctatggaaattggaagcagaggttttttctaagccttttagaattggccatttgtggtctaatgaagtacgataacccttctctcagccactagaggctctaggaaagtccatagtattaaagaggcattgctttttactttgtcactgcttatcaaatttaatcagaaatttcacatagattcataaggaattaaaagccagaaaggggccgagcacagtggctcatgcctataatcaatcccagcacttttggaggctgaggcgggcagatcacctgaggttgggagttcaagaccagcctgaccaacatggagaaaccccatcctactaaaaatacaaaattagccaggtatggtggtgcatgcctgtaatcccagctacttgggaggctgaggaaggagaattgcttgaactcaggaggcagaggttgtggtgaactgagatcgcaccattgtactccagtctgggcaacaagagcaaaattctgtctcaaaaaaaaagccagaggccgggcgcagtagctcacgcctgtaatcccagcattttgggaggccgaggcgggcggatcacgaggtcaggagatcaagaccatcctggctaacacagtgaaaccctgtctctactaaaaatacaacaagatagccagccgtggtggcaggtgcctgtagtcccagctactcaggaggctgaggcaggagaatggcgtgaacccgggaggcagagcttgcagtgagccaagatcatgccactgcactccagcctgggtgacagagcgagactccatctcaaaacaaaacaacaacaaaagccagaaagggctggatgcagtggttcacatctgcaatcccagcactttgggaggcagaggcaggaggatctcttgaggccaggagttcaagaccagcctggtcaacatagcaagaccctgtctctacaaaaataaaataaaagccagaaagaaccttttgaaattgcttagtttagttgcttactttagtttctgcatattttttgtgaggaaaatgagatccaaaaaaatggaatgtcctacccaaagtaacagtgagtgagtagctgattagagggctaggacaccttcatgcatgcttctttttattaatctatgagacattttttccctatgcctccaaagttatataaatattttacaattacactgggcatggtgactcacatctgtaatcccagcactttgggagaccaaggcagaggatcacttgagcctaggagttcaagaccagtctgggcaatataatgagacctcatctctacaaaaaattaagaaattagccaggcatggtggcacacaccagtagtcccagctactcgggaggctgagatgggaggatcgcttgaacctaggaggcagagactgcactgagctgagatcgcaccactgtactccagcctcagtgacaagagtgtagaccttgtctaagaaaccaaacaaaacacacacatgcacacactttacatatatatataaaatacatatgtatattttatatatatcagaatccacgatccctataactatatatatactatatatatatatatatatatatatttttttttttttttaattatagtatagttttatggtggccaaaaaaggttggctcttgtgccaaggaaaaatgagagcaattatcaattttaaagtaaaatacatagatcattctgtgccgtggaggtatgtaattggagtagttaaagactgtatttaggaatattgcaccaatatcaggagtttgagggaattaattgagaaaaacagacaaaaggaacacatgaaaacccactcttttcatttataaacagttcctatgtccccttggagaatagcattattgcataggatagataaacccaaggaaaacaaaattaattgataattaattagtattataaagatttttttagtaaataactggaattacaagtaagagtaagataaaatatggtgttttacaagaaattttacaatacagataggactttataaaacagacttgcattgttttccattaaactctggaaggaagaatctaaacaatacttggaaagcctatctggaatagtaaacaagaaaggctatgacacctataaaattttaatttcctccatcataattcctgtcagtgtataaatcattgcaattgtatgtgttaatgtgtacagtacagggaagaagcctgtgctctgcttccatacttactttatataatatggaagcttgataaatgtttaatggtggccatgcaccgtgattgaaatatactttgtgtcaccaaagtggtgacattccttccgcattgggtggacactgccactgctctgtcttacaggtgcattttcaaaattaaccactggagggagttgttggcatagctaagatgtacccaaggtaccttttttttttaaagaccagctatgcagcttctttcatggcctatttttattatctccttctcttaaatctgggctcagaatccacgatccctatgattgtaacaagaacaatcaagctttgaagatagtggacttttcctacagtgttgaccttagggtgcagctggatgtttttaccctcagcggctttcggactgtacagatcctggaaggacaaaagatcctggctaactgttcttctccctaccaggtaagtgtaaaacaagcctgagcaaatatggagagggtttcttaatctctttattatctagataagctataaaagctactgtttactgataccgactcctagaatagatgacctagttttcaaatatcaccaagtcaagtaaaatgtaacatttttgtgttacagcattgaagaatatacacatacatgtgcaaacacatgactaactctgtaaccgagtgccagggccactcctactgcctaccacccatgtaatcttttataagtcattttctgtgatcttctctgtaaaatagggataacagtctctgctatgtgtttatcagaattgttatgaggagtaaatgaagtaatgtatataaaaagaacattagcacaaatgtaaagtcttttgtatggtggcattatatgcagaaattccttctaactcagctttagacataagacatttgctgattgaatatgtagcacaaacctgaactaatcatgtggaccccatttagatcacagctggagttcatgcaaactcagtaggtctacaaatttgaatgtgatagtccaaatatttcatcttttgttcttaaggataattcctagaattggctctattgatcacttctttggagagcttctccctttactgtaagggtgaggaacagtctactaaaatgtatgtcataaaataaacttagttaagcactgtaatacctttcaacttcctaccgaaataagctgccatggtagaggcagagaattattttagctgatggtgctttttgtgatttcaggtagacctgtttggtatagcagatttagcacatttactattgttcaaggaacacctacaggtcttctgggatgggtccttctggaaacttagccaaaatatttctgagtaagtattgatgaatgtcagggtctctgcctgtcccaataattttctgtttctcttgggtgctatctctgctttggcagccttagttttttaatccaaatgccatggttccagtagtttcagccagttttcattagagtatcagcagagcagctagtgcaggaaaaaggaactgcttactaaaaataagattcaaaactattcagacttcaggacatcattctgaatctagctgtatcttccagactacagctatagtatggaagcttccctgtttagatatgtgaaaagaagcatttcatgagaataattttctaactaattggtgttagccttaaattcctttttctttatttatttattttttgagacggagtctcgctctgttgcccaggctggagtgcagtggcatgatctcggctcactgcaacctctgcctcccaggttcaagtgattctcctgcttcagcctcctgagtagctgggattacaggcgtgcgccaccatgcctggctcatttttgtatttttagtagagatgcggtttcactacgttggccaggctgatctcgaactcctgaccttgtgatccgcccgcctcggcctcccaaagtgctaggattacaggtgtgagccaccgtgtctggcctaaattcctttttaatagcaattattaccaaaagttaataagcatcctttgaaaagacttacatttctaaactatatgctaattttaggctattttttatttaataagtggatagaaccaaaccagataactgactctcctggagaagaagtaagtggtctcttaataagcactgcttggtctcagaaccttagtactccctcaagcctgctcataaaacttactaagtcagccgggcatggtggctcacacctgtaatcacagcactttgggaggccgaggcagattacctgaggtcaggagtttgagagcagcctgggcaacatggcgaaaccttgtctctactcaaaatacaagaaaattagctgggtgtggtggcacatgcctgtaatcctagctacttgggaagctgaggcacgggaatcacttgaacctgggaggcagaggttgcagtgagctgagatcgcgccactgcactccacccagggcaacagagtgagactccgtctcaaaaaaaactaagtatctacgttccactttagcttatcttagcaaataagttcccagcctgtcacctattgttatattctttggttaaaaaaaaaaatgagtgttgaagatttaatgccccttctctattttcatctttgaataattgaattgtacttttctcttcatttaattcagaacttggccagtgttgtctcttacatgaacttttaaaaataggcttgaaatacaatgtaagacatataggatggatataggcatgtccacttggctatggtccaggcaggtctggctaacacaagcagaaacaagtggggtcagttggggtttcctaacagccctgccttatctaataagggaagtttctctgatcaaaagaaaataataagaagcaaaggtacaaacatattaagcagtagttagtttagtcaagcttacgattatcagagaattgtaaagaagatccactactggggtaggagaaaggagctgtagcctttttaatgacctagactctaggaaagttagaggaaataaaattcctttttcttctatttgtagaagaaaagtgctatgtcttagtacacagaggaaatttatagatttagatgagagatcttctttccctttatgtgcattgtatcttggcttttcccactatggtagcccttttttgtagttcttccctgggctttcaaaggactatttgaatgatctctaaccctagagttctaggtattaccttacaccattttggtgcataaatgtaccactgagttaaactaaaaggaattataattttcatatgcctaatcttgatggaaatggttttatatatttttaggctaaaagatggtgaattgtggaataaattctttgtgcggattctgaatgccaatgatgaggccacagtgtctgttcttggggagcttgcagcagaaatgaatggggtttttgacactacattccaaagtcacctgaacaaagccttatggaaggtagggaagttaactagtcctggggctttgctctttcagtgagctaggcaatcaagtctcacagattgctgcctcagagcaatggttgtattgtggaacactgaaactgtatgtgctgtaatttaatttaggacacatttagatgcactaccattgctgttctactttttggtacaggtatattttgacgtcactgatattttttatacagtgatatacttactcatggccttgtctaacttttgtgaagaactattttattctaaacagactcattacaaatggttaccttgttatttaacccatttgtctctacttttccctgtacttttcccatttgtaatttgtaaaatgttctcttatgatcaccatgtattttgtaaataataaaatagtatctgttaaatttgtgcttctaa

SEQ ID NO: 72 - DNA, 46055 bp, Homo sapiens
aattttgaatttttctttatggcgtgggagaggccacagcccggactccatcgactcccccggctcttagactagtaagtgcaggaacgattatttctttgttatctgagctcgcgtcttgagtagctgggcctgttgctgcttgtgtttttatggtttagggaggtggggactttggctggacacgaaggggaaatggaaaggaggaaggggaggtttggggctggggaagaagtgctcggcctggcttcatcttaaccatacttctatttaattaacacttcgcaagatacgttttggagcaaagcatctgccttccttttgaacatttctttacatatttgctgctcaatgcaagtccacagatcagcggcatccgcatctcttgtttgcttgttacaaatgcaaattatcggactccacccaaatttactaaatcagaatatacattttaacaagatttccctgagtgatttctatgcacattaaagtttaagttggtacatttcttgactgggaatattactatgttactcgatattgtctggcatgctgttagagtgtcaattttaaatgcgtgtcctgtttactgagtgcctaatactgtgcgggatgagactttagggagctgcagtctctttggaaaaacaagacagaacaaaaacagcaatgcttaaaaaaaaaaaagcataaaacataaaatttaaaaaaagcaagtacccagaaatagtgctatgggtgttcaagaagaatcaattggactgctaatggaaattaagtaattgaaggctatttgtggaggagcgcaagagacttccataaaaatgtgttttaggaagatggcaatgaaatgcaacagtcatttccgttgctgctacagctttgaaagtaccccagaacaaagaacttttcttctctttctttcttttttttttttttctttttttgtgacggagtctcgctctgtcgcctaggctggagtacagtggcacaatctcggcccactacaacctcagcctcctgagtagctgggagtacaggcgcacgccagcacgcccggctaatttttgtatttttagtagagacggggtttcaccctcttggccaggatggtctcgatttcctgacctcgtgatccaccagcctcagcctcccaaagtgctgggattacaggcgtgagccaccacgctcggccgcaaagaacttttcatatcattgggtggagttttcacagaagcagcagcgccaactcctgcaaaagactgtaattcttactgtattatttattgcatcttcctattggaaaatagctttagacccatcttttagccatatgaagatgtggtatgatatgaagaagtaaaaacctccctaaccaagagaatttgacaatattagaatatattccttaactaaaataacacttgctagctaacacttagcaggaatgcttcttttcattctttattgaatgaaacattatttagctcctgctgtattctagatgctgggaaaacaaagatgaatgaaatttgtcacacccttgaaaagctcacagtccagcaggatgacaaacatacaagcaaaaattacaatgaaatgtaatacattttataataaagatgtgtataaagtgctatagaagtgcaaaagagatgacatttcagccagtataaattctgtaaggaggctgggcatggtgcctcacacctgtaatcccagcactctgggaggatgaagcgggcggatcacttgaggtaaggagttcaagaccagcctggccaacatggcaaaatcccatctctactaaaaatacaaaaattatccgggtgtggtggcacgcccctataatcccaggtgctcaagaggctgaagcaggataatcgcttgaacccaggaggtggaggtggcattgagctgagatcacaccactgcactccagcccgggtgacagagcgagactctgtccacccccccaaaaaaaaaaaaattctagaaggacaaagactatgttggtgttgttcaggattgtatgccagcacctagcatagtacttggtggattataagcactcaactaatatctataagataaaataacagaatcttgaaggctaggtataagttgacttggaagaggatactctaaacagaaggaaaggctgatagaaagaaacagaaagtatttggtgtttagtatacctggaagtacaaaccgctagtcactagaagagactatggcaaagggccattagagctaagttgtgaaaagttttgaaaggcatgctaaggaatttaattttgtgagtaaaggaaccttcaaatacttttaagcaagggaatatctagatctcattttgttttaaagtatcagttctggtatggaaaatgaactggcaaggagaaagactgaaggcaggagaatcattgaaggaacactcagcaaacccaaactaagaaacattctccaaaacgactgacttggactcttcaaaattataaatatgaagaagcaaatacataaataaaaaagctggagaattgttatgaattaaagggtactaaagagacactactgctaaatgcatgtggaaccagggtgggagaagctataagggatattgagacaattggggcaatccgaatatgggctgtttattagatcatttcataacaaggttaaatttcctgactgattgtggttttgttggaaaatttccatgtttatgttagaaaacaaaagctaaagtatctaagagtaaagtatcatgatgtctgcaactaaatctattcaatccaaaactaaaaaaatttatgtatgtatatatttgtacatacgtacagaaagagtgtgtgtacaaagacggcaattgacaattggtaaatctaggtgaactgtatatgagtgcttattatactattgtaaattttttatttcctggagccttgaaatttttctaagtaaaaacagtaaaggaaaatagacaatagtgaaagacaaaaatgaaaaaagtgaaggcaactgaagttagaggacagaacggagggggatggtaaggagaagagacagggtaaattaatcagagaaatatttctgattcatactcacattggcccacacccaggtgtggtgtgcacccagtgcagtggcgtgatcttggctcactgcaacctccacctcctagattcaagtgattctaatgcctcagcctcccgcgtagctgggattacagcacactccaccacacctggctaatttttctattttcagtagagacagggtttcaccctgttggtcaggctggtctcgaactcctgacctcaggtgatccacccacctcagtctcccaaagtgctgggattacaggtgtgagccaccgcacccagcctcccacaccctctttttttataaccctctactccaataggagctccattgtctctgcattcttttcaccttcctggccatgccttttctagttctttctctacccactccttatacatggtgtttctcaaagtttggtaatcagctcatagatcttttcactccacatatttctctgggtaatttcactcatttctagtgttgttattttctcaagctacctatacacttatgagtgcagtatttctctagtgtctttcccctgaacttctgactttgaacatagaacataagcagttagatgtatttagataccctactgtcgctcctataatcaggtcctcatcccctagacagttgcagtaggtttgtaagtggtctctttgtcttcagtcatggtcccataaatccaatttccacgatgctgccaaaccattctttctaaagaagaaatacgagcatgacaattatctgcttaaaatccattattgtttctgatgtcttggtccttatccaccctccagcttcatcactcattgccccctgacaaaactttacgttgcaggatatgctttagtcacactgagtcttgtctgaatcccctgacatacctttctctgaaatgtttccatgttattccctctgatgggatgagtcctccctaggcccaccttaacctagccccttcatcaaagctcagcttaggcaaaaccttttccaaaaacctcaacccttatgggagaattatgtacccttgctttatttctccattaatatcatatacatatcccatcataacccatacactattgtatacctgtttactttctgcttacccatctctccccactgtaaactcttggagggcaggaatgtgtcttattcattttcatagcaagttatcactatatgttgttgaattaaacttgtattttaaaaaatctgatatagtaatctcaagcagcaaaaaaaaaagaatcaaagaataataatgataataatgataaaacttattgcctgccaggcactgtaaatactttacatgatttactcatgtactcctcaaaactctgaagtaagttcctattaatattattatttcacaggggaggaaactgacacagaaaggctaagaatctcttgaaggtcataaataagttatgacagtatagtagagccatgatttgaacctatgcagtataactccctggtcctcatccttaacccctacagtatacttcctcttgttgtttgtttgtttggttggttggtttcggttttggtttgggggttttttcttagactgaacctcattccaatttttatatttttagtagaaatggggtttcactgtgtttgccagtctggtctcgaacttgacctcaagtgatccatccacccaccttggcctcccaaagtgctggaattacaggcgtgagccaccatgcacggcctataatatgacctttattattgtttgatttgttatcaagagctccagatgtaccagtttgctggttccttagcctagaaatcttttcttaatgaaaagaagatgtaagtaaaaatgagagtaatttctagagatcatagagttatttaggatatttatgttgtttttttcttttttttggaaacagtttctcgctctgtgttccaggctggagtacagtggcgcagtcatgggtcactgcagcctcaagctcctgtgctcacgtgagcctcccgcctcacccttcagagtggctaggactataggtgagccaccacgccaggattttttttttttctttttttcatacagttgggactctcactgtgttgcccagagtggtctcaaactcctgggctaaaggcatcctcccacctccacctcagcctcccaaagtgctggggattacagcactttgaaccaccgccctttgcctatatgtttatgtttctaatgatttttcagattatttgagaaagcagtgtaagaaaaaaactagtttaaaaaatacataggccaggcatggtggctcatgcctataatcctagtactttgggaggccgagggaggcggataacctgaggtcagcagttcaagaccagccaggccaacatggcgaaaccccatctctactaaaaatacaaaaattagctgggcgtggtagtgtgtgcctgtagtcccagctactcgggagactgaggcaggagaatcgcttgaactcgggaggcagaggttgcagtgaaccgagatcatgccactgcactccagcctggccaggcaacagagcgagactccgtctcaaaaaaaaaaaaacaaaaacataaaacaaaaaaaaaaacacacacacaaaacataagggccgagtacagtggctcacacctgtaatttcaccactctgggaggccaaggccagtaaattgcttgagctcaggagtttgagaccacctaggcaacatggtgaaaccctgtctcaactaaaaataaaaaaaccagctgggcatggtggtacgcccttgtagttccaactactcaggaggctgaggcaggaggattgcttgagtccaggaggtcaaagctgcagagagctgagatcacaccactgcaatccagcgtgggcaacagagcaagaacctgtctcaaaacaaaaggaaaaatgctttaaggaatcacaaaagaatgagcttctattcagtgttaacaattaaaatcccacctaatccagcaaaaagaatttgtaggtctcattatgcttttggaaaggggataagtatacgtattttaagctaaaggaagactgctatatactctttcaatttgggcaattatcctctggaaagtacctaatgcttttaattaagtaatgatactaaaacaaaccttaattttttgtgttcttgttttgactgaggtagaaatttgctattctccactttcgcaagagctgtgattatttttggatggaacaactaactatctaggaattatctcagactgcatctttctaccctgacagattttgcatggttccttaatcctctgcatgtgccaattactgtatttaattagaaggagattagatagaagcactaataacccaagtcagacacacacacacacacacacacacacacacacacacagagagagagagagagagagaaagaaatatgacttagttcctagacatctttatcattgaaaaataattcccaaaatgacagacattggcttgtgtaggactctagaaatttgtatgcatagacactggaacagccaacaggaaaggactagaaagaaatggccctgtttcagaatggtggtactcaaattttccagctaatggtacataccaaagtttgaaagtcaaatacaatacaagccttattagaattagaaagaaataacaaaaaaaaatagcagtccagtttaaaccacccctctgtaatcctgactcccaattgtcagaggcaacactattaagtcttgtaattatttcttctggtatttacctccatatttctaagtaacattcatactattatttcatgatttttttttcaagtgtaggcactatataaatttagacaaatactgacttccattcactttctctccctttttttttttttttttttgagacagagtttcactcttgttgcccaggctggagtgcaatggcacgatctcggctcaccgcaacctccacctcctgggttcaaacgattcttctgcctcagcctccaagtagctgggattactggcatgcaccaccacgcccggctaatttttgtatttttttagtagagatggcatttctccatgttggtcaggctggtcttgaactcccgacctcaggtgatctgcctgcctcagcctctcaaagtgctgggttacaggcatgagccaccacacctggcccactttctctccttcttcctagtatacctacatcatcatttttggttaaataaattgtcaatgcttatactttttttttttagatggactctcgttctattgcccaggctggagtgcagtggcacaatctcggctcactgcaacctctgcctcccgggttcaagagattctcctgcctcagcctcccagatagctgggactacagccacatgcctggctaaattttgtatttttggtagagacaggcttttgccctgttggccaggctggtctcaaactcgggacctcaggtgatcctcctgcctcccggcctcccaaagtgctgggattataggcatgagccaccatgcccagccaatgcttatactttaaatattgtttaacagcttaacatttagtgctactaagattacatttcctttcttatacaacttttttcctagctattttttatatgcttatttttttaagcacttaccagcaatttggccacaagtttacagaacagtaaaactctgctcagaatggtcaaacacactaggcagtttatctatttccgtttttccttagagacattgttgctgaagccctctgtcctgtccttctgcggcagtcttcactggctgtgagcctcaggtcagcaaactactgcttttatagagcttgtgagctaagaatgatttataacttctaacagttaaaaaaaaatcaaaagaggaacaatattttgtgacacatgaaaagtatatcaaatttggccgggcgcagtggctcatgcctgtaatcccagcactttgggaggccaaggctgatggatctcgacgtcaggagttcaagaccagcctggccaagatggggaaaccccgtctctactaaaaatacaaaacttagcctggcgccgtggcaggcgcctgtaatcccaactactcaggaggctgaggcaggagaatcacttgaacttggggggtgggcggaggttgcagtgagctgagatcatgccactgcactccagcctgggcgacagagtgagactccatcttaaaaaaaagaaaaacataaaagtatatgaaattcaaatttcagtcataaataaaattttattagacacagctcctttgcttgagtattgtctatgactgccttggtgctaccctggcagggttgagcagttgcagcagagaccatatggcctgcaaaacctgaaatatttactttctggttctttacaaaaaaggtttgttgacccctgtcctaagcttgctcaaagctgtttcccctagatttttttatcaccattatcctgaaaattcttatcttttatcttaattctttcctcacacctgactgaaagtttggcctaatatagaattctatgatggggccgggcgtagtggctcatttctgtaatcccagcactttgggaggctgaggtaggaggactgcttgagcacaggagtttaagaccagcctgggcaacagaaaaagaatgggggaggactgtgaaggatcagatggaagacaaagaaaaggaagatgctaggaaatttcggattctagggctcccaatcagtggactcagccttagatagaagtttccagtggcatttgtctatagaaggtcctggccgtacaggacttcaagaccagcctggccaacatggtgaaaccccatctctactaaaaataaataaattttaaaaattagccgggcatggtggcgcgcgcctgtaatcccagctactccggaagcggaggcaggagaatcgcttcaacctgggaggaggaggctgcagtgagccaagatcatgccactgcattccagcctgcacgacagagcaagaccgtgtctcaaaaaaaaaaaaaggtcctgaccatagatttgatgaaatgtaaccttttttcttcaggcagccacaagatcgctccttcctaggaggctctcctaaatatcttcatcagagtatttttatcttgcgtttttgttttgtttttttgttttgttttgtttttgagacagagtctcgctccgtcgcccacgctagagtgcagtggctcagtctcggctcactgcaagctccgcctcccaggttcacaccattctcctgcctcagcctcccgagtagctgggactacaggcgcccaccactgcgcccggctaattttttgtatttttagtagagacggggtttcaccatgttagccaggatggtctcgatctcctgacctcatgatctgcccgccttggcctcccaaagtgctgggattacaggcgtgagccaccgcgcgtccggtctggttttgtttgtttatgtgtttgtttgttttggaaacaaggtccccctctgttgcccaggctggagtgcagtggcacaataatagttcattgcagcctcaaactcctaggctcatgtgatcctcccagctcagcctcctgaatagctcggactacaggcttgtgttgttttaaattaaaaaaaatcagggctgggtgcagtggctgacgcctgtaatcccagcactttgggaggccaaggcaggcagatcacttgaggtcgggagttccagaccagcctgaccagcatggagaaaccccgtctctactaaaaatacaaaattagccgggcgtggtggtgcatgcctgtaatcccagctactcaggaggctgaggcaggagaatcgcttgaacctgggaggcagaggttgcggtgagccgagatcgtgccattgcactccagcctgggcaacaagagcaaaactctgtctcaaaaaaaaaacaaaaacaaacaaaacaaaaaaatcctttagacatcccttgtgtttaataatccctgcttcaccttccttcattatttcagcaggaagaaaaagtgatataataaaggtgaagtcagccaactatgttttggtgtgttttctaagcccgtaaggacaattaagaaaagcaccttgtcaaattgggacctgatagttagtccaattagatgttatcaggaatctatttctagaagggctgtcaatatatgcactgccactatttgccattaggggtgccctctgcaaatcatggaaccaagccagcgctcagtttttacaacctgcaacagggtagtgggggttcatcagccagtggaatctgagagctgagcaagtatagtgctgcataccaagtgctgaaaggttactgagtgaacaaaagtggaatgaatgtgtattttaaaggccaattgttcccattcaaatctgagtttgaagggaaggaggcccaggccttgagatcattttcagttctgctacttgaataacaacatctttgttcctcaagtagcaacaactaaaagcagcaaagcccttctggaacttcagctcaaactagctgtgacttaattttcttcagaaaaggatccagattgaaatgtgaatatactagataatgtttttgttttgttttttcattttgtaccacagcaagaaggacccttttattaaaagtttccaaaatgttcacttggtcacaaccaagataatgttaacatatatttaatggtaatatatttaatgttaaattgatcattatgatatatacttatatagatatatgttagtgtatagcatattagtgtgtatagcatcttagaaagaacagatatatttatataaaaatatttgttacattcttaagtacaaagcagcttttattctcttgataattcttgattatatcccgacatttgtataaaaaattcactttatttagacagatcctaatttgctgttagtgtatcaagtggcattgccactttttatttttttattttttaaattttattttgattattttaaaattgacctataggaccgggcgcggtggcttatgcctgtaatcccagcactttgggaggccgaggcaggcagatcacgaggtcaggagatcgagacgatcctggctaacatggtgaaaccccgtccccactaaaaatacaaaaaattagccaggcgtggatggcgggcacctgtagtaccagctactcgagaggctgaggcaggagaatggcgtgaatccaggaggcggagcttgcagtgagccaagatcgcgccactgcactccagcttggatgacggagcaagactctgtctctaaataaataaataaattgaccaataataattatacatatttgtggggtacacagtgatgttttgatacatataatgtatagtgaataggtcagggtagttagtatatccatcatcttcaacatgtcatttatttgtgttagtaaaattcaatgcactccttctagctatttgaaactagataatatattattgttaactatagtcatcctacagtgccatagaacactagaacttattcctgctatctagctgtaattatattactggaaaggggtcccaatccagaccccaaaagaggattcttgtaccttgtgcaagcaaaaattcaggacaagtccataaagggcaagcatgtctattaagaaagtaaaggaataaaaaaatggctattccataggcagagcagtggcatgggctgctcaactgagtatacttatatcttgattatatgctaaacaaggggtggattattcatgagttttctggggaaagggtggggatttcccagaactgagggttccttccctttttagactatatagggtaacttccagacattaccatggcatttgtaaactgtcttggtgctggtgggagtgtcttttagcatgcaaatgcattataactagtgtataatgagcagtaaggacaatcagaggccactttcattgctctcttggttttggccacgttctttactgcatcctgttttatcagaagggtctttgaggcctgtatcttgtgccaacctcctatctcatcctgtgactaagaatgtctaacgtcctgggaatgcagcacagtaggtcttagcctcattttacccagctcctattcaagattgagttgctgtggttcaaatgtctctattttgtatcctttaaccaatctttccctattcctccttcctccccacctttcccagtatcctgggaaagatactatccctctagtatcctctgttctactaggtaatgtttttattttattttattttattttattttatatatttatttatcagatggagtcttgctttgtcacccaggctggagtgcagtggcgtgatctcggctcactgcaacctctgcctcctgggttcaagtgattctcccacctcagcctccccagtagctgggaccacaggcaccgtgccaccatgcccagctaatttttgtatttttaatagagacagggttttgccatgttggccaggctggtctcaaactcctggcctcgagtgatctgcccacctcggcctcccaaagtgctgggattacagacgtgagccaccacacccagccggtgatgtttttaaatgctttaaaataactcttttaaggcccatgcctgtaatcccagcactttgggattacgccaccagtgtggtggcgtgtgcctgtggtcccagctacttgggaggctgaggcaggagaatcatttgaacctgggaggtggaggttgcagtgagccaagatcatgccactgcactgcagcctgggtgacggagctagactgtgcctcaaaaaataaaataacataactgttttaaaacactcatgtcttagatttggggtaattgttatttcattttacagtgtattgcctatttaatctagtgtcacaccacagcgtattagaaagaacatggaagacttacaggtttggacttactgcattgcattgacagattgtctaatcttttttatcctcagtttattcttctgtaaaaacgggaataaaaatcctccttgtcagggataataccttgcaggatagtaagggttaactgaaaagatgtatgtgaagatacctaacagtaaaggggtattgaataaatggttaatgttgtttccttatcttctcactaccaattccacctgtcacagtggatgctcagtagatgctgctggtaaagaaacatattctttttttttttttttttttttgaggcggagttttcgctcttgttgcccaggtgggagtgcaatggtgcaatctcagctcgccacaacctccgcctcccgagttcaagcgattctcctacctcagcctccccaatagctgggattacagacatgcaccaccatgcctggctgattttgtatttttagtagagacggggtttctccacgttggtcaggctggtctcgaactcctgacctcaggtgattcacccgcctcggcctcccaaagtgctgagattacaggcatgagccaccacacctggccaacatattattttaataactgactataacccacctacagccattttcgctactataaagaaaggaaaattcatttaacttaatgaagaaaagcaacacaagcaaaacaaactgagagagtaatataatgccaagaccaagatctctccagagatagtttaaatctgtgtttacattttcccctacttcagggctcttctgggatgctggtagtgacctatttcttaaccaagatggtggtttcaagggtgtgttcatggtataattcattaactatacacttaagatttgtgtactttctatatgtatatattattcttcaattaaaaatgtaaaaaaatttctctgcagaaatcatgcccaagttcaaacaacgaagacgaaagctaaaagccaaagccgaaagattattcaaaaaaaaagaagcctctcactttcagtccaagctaattacacctcctcctccaccaccctcaccagaaaggtaaggcttaatgtggaacagaaaaaatattagagagatctgatcagtttaagatagagtttcagatttagcaaataaaaatagaaggcaggccgggtgcagtcattcattcctgtaatcccagcactttgggaggccgaggtgggtggattacctgaggtcaggagttcaagaccagcctggccaatgtggcaaaaccctgtctctactaaaactacaaaaattagcctgcgtggtggcgggcaactgtaatcccagcttctcgggagacttaggcaggagaattgcttgaaccagagaggcagaggttgcagtgagccgagatcacaccactgcactcaagcctgggcaacaagagcgagactccctctcagaaaaaaaaaagaaggcccagttaaatttgaatttcagataaacaatgaataattttttcatataattatgtcctatgtgacatttggaatatatttatactaaaattatgcatgctttatctgaaattaattttttattttaatttttatttatttatttacttttgagactgagtcttactctgtcacttaagctggagtgcagtagcatgatcaaggctcactgcagccttgatttcctgggctcaagagatcttcccactctgtctccaaaacaaacaaacaaaacctctagcttgggattggccttctcttctattatttttctttttaaaaaaaattttaaaaaatagatgttgatgctgtgttgcccaggctggcctcaaactcctggcctcaagtgatcctcccaccatgacctccaaaagtgctgggaatgtaggtgtgagcactgtacccaccctcatgtttttttctacataaaaaataatgcaggattatcttctagagctaattagtatgatcaaataaccaaaaccccattaaggaaaaatgtcacatgacagcaaataatcaatccagaccaatatgatcacactcactgtgaaggtgagaaaacttcatctttattacgtttccccaacagacgcactgcattgttctcttgaaaacacacagctcatgtcctcctttaaaacccacatcctctttaaagtaacacacggccaggcgcggtggctcatgcccgtaatcctagcactttgggaggccgaggcgggcggatcatgaggtcaggagatcgagaccatcctggctaacacggtgaaaccccgtctctactaaaaatacaaaaaaaaaattagccgggcgcggtggcaggcgcctgtagtcccagctactcgggaggctgaagcaggagaatggcgtgagcccgggaggcagagcttgcagtgagccgagacagtgccactgcgctccagcctgggagaaagagcgagactccgtctcaaaaaaaaaaaaagtaacatacaaacatgacaatacaaagtaaaaaattacatctgaattctcacatttcaaaaacatacagtaaacatcaaataaaaatttatttttataagaatttaggggaactatcatgtagctataagtgtaatacatatattaagtatcatagataaaaggagtgctcccttcagcagcacatgtaaccatagatacaaagatttaaatataaaagatttaggataaaaagaatcctctcttaaaaaggaaaacaaaattatatgtatatagcagctatgacacccatctcacaactttacaggaacagtatccaaaaataccagtattttcaaaatatttaaaataaatgtagtaataattctatgcccatctttttcaaaataaaccaataaaatatatagtatatattagacatgttagtatatctaagacatgttaaaaattacaactgaattctcacaattcagtcacaaatctaaacagcaaataaaaatttctatgacaggaacttagggtaactaccaatagctataaatagaagagattattatgtaagtatcatagataaaaagtgtactcgcttcaggggcacatataataatacagaaaacatttaaagataaaagatttaggataaaaaggattctctgttgaaatgaaaattatctttatatatatatatacataacagctataactcatgaaaaaatctacaggaacagcatattttcaaaagtacaacaattttgaagctatttgaaataaacctattaataattcgatggccaacattttccaaacaaaccaataaatgcatagtgtgtatgaagctatctgttacagtctatggcactcatatttttacaaagaattctgtgctaatctgagtgtctgcactgtgccttcaaatgctcttggactgtggcaaccaagtccataggaaagaggacctccaggttccgccccagggaggttggaattcagcggtataaaaatagaggtggtggtgcagaaaggggtggaaccagaaacacccctggtttctcactgttctctatggattcctagaagtgagaggtgacagcgtgctggcagccctcgctcgctttccgtgcctcctcacctgggcgcccactctggccagccttgaggagcccttcagcccgccgctgcactgtgggagcccctttctgggctggccaaggccggagccagctccctcagcttgcggggaggtgtcaaggaagaggcacgggcgggaaccggggctgcgcgctgcgcttgcatgccagcttgagttctgggtgggcgtggtttggcggcccccacactctgagctgtcggctgccccggccagcccgggcagtgaggggcttagcaaccggaccagcagctgcagggggtgcgcggggtcacccagcagtgctggcccactggcgctgtgctcgatttctcgccgggcctcagctgcctccccgtggggcagggctcgggacctgcagcccgccatgcctgagtcttccctgccatggtgggcccctgcaccacctgagtctccctgacgagcgccgccccctgctccacagcacccatcgcatgcccgcccaagggctgaggagtgtgggcacatggcgcagggctggcaggcagctccaactgccctcccggtgcgagatccactgggtgaagccagctgggctcctgagtctagtggggacttggagaatatttatgtctagctaagggattgtgaatgcaccaatcggcactctgtatctagctcgaggtttgtaaacacaccaatcaacactctgtgtctagctcagggtttctaaatacagcaattgacactctgtatctagctaatctagtggggacatggataacttttgtgtctagctcagggattgtaaaggcaccaatcagcaccctgtgaaaatggaccaatcagctctctgtaaaacagaccaatcggctctctgtaaaatggaccaatcagcaggatgtgggtggggccagataagaataaaagcaggctgcccaagccagtagtggcaaccagtgggggccactttcacgctgtggaaggtttgttctttggcactttgcaatgaatcttgctactggtcactctttgggtccgcactgcctttatgagctgtaacactcaccatgaaggtctgcagcttcacttctgaagccagtgagaccacgaacccaccgggaggaacgaataactccagacgccctgccttaagagctgtaacactcaccgcgaaggtctgcagcttcactactgaagccagcaagaccacgaacccgccagaaggctgaacacatctgaacatcagaaggaacaaactccggacacgccacctttaagaactgtaacatggcgagggttggcagcttcatttttgaagtcggtgaaaccaagaacccaccaattccagacacagaagtacccccctggttctgggaggacgacttgatcactctattcagctccgtctagaacagtccaggttcttctagatgatctgcacaaatggctcctctcctccttcctggtgtctgtcattagcaatggaataaagttcctgctgaaaattcacatctcccctggatccggtgttctggaagtgagagagaggatgtcatacttaaaggaggcggctctctagacaggaaggttattcacgtcccacatcaagtctaactagagttcagagcagttgagaaatcaaattttatctcctgtccttcattctatagcctgcttctgaaccatcgtgttcagctgtgaaactcacagtttggtaaccctgactccaaaactcactcaatatacccaaggtcagccccagtgatctgcttcatagcaaggactttgggtgggtctgcccagggagtagggcaccctcaaagaatgtggctttggacttcatcacaactggggccttttgcattacttaagagctaaactcgtaaccatgctagatccgtttctaatgtgacaacatcacaaaccctgagtccagaagcctaatccataatcctacctcctcatgatgaagtctcatgctctgtgctgaacgtggttagctgcacaagatgtgaaccaaagcttcactgaaccctcgacccaaatcggtaactcaagtgtgtcaatcataatgaacctccccgaactcagtatttatgattatttttgagtcagggtctcactctgttgctcgggctggagtgcagtggcaggatcagggctccctgcagccccaacctcccaggctccagtgatcctcccacatcacctggctaatttttgtatttttatggagaggggatctcgccatgttgcccaggctcgaagccggatcaagcaattgggttcctcggatttccaaaatagaccccaatattctgcctttaccccagaggacacagatgtaccttccctcaggctgatgacctcaggcctcacagtccctggagctctaggaaacgcggtgcgatctcgtgcccacacccagtgctctgggttataagcctggatctggaaaaacaaacgccccttaagaagatggggactccccaggatacccctccctccccttgtccagcctccagcccacctgattcctccccacctcctccacctacccccaccccgcctacctcctccaactactccagggaaacccaagccctccagcgcatggaacggaagaactggaaccgaagtttatggaacaagggtatctgggagtggttcttcccgtacaggaagtagaaaatgtttcatttggaggcctcgttgtcctcctccatgtcattggccaggtagctggggacagaaatcaggttgccgctcagggacaccaccaggagagacctctggctgaggtcagcttcccagagaggagggcaggggacgatcctcagctcaggactggcacccaccctgcagaaccatgccttcctcaggagggccctgattgtcagagacctgctgaagggcgtctcccactccttcaggatgaagacaaaaacccaactggtggccgagagtggtggcttacgcctggaatcccagcacattgggaggctgaggcaggaggatcatttgaggccaggagtttgagatgagcctgggcaacatagcaagaccctcgtctctataaaaaatgtaaaagacacgccagacgtggtggctcatgcctgtaatcccagcaatttgggaggctgaagcaggtgggtcgcttgaggccaggagttcgagaccagccccatatctactaaagatacaaaaatcagcctggtgtggtggcacacctcttagtcctagctacgcaagaggctgaggcacaagaattacatgaacccaggaggaggaggttgcagtgagccgagattgggccactccattccagcctcagaggcagaacaagactctgtctcaataaataaataaataactgtccaggtgtggtgtcacagccctgtagtcaaagctaatccggaggctgaggtgggaggatcactggagtacaggatatggaggctgcagtgagctatgatctcaccactgcactccagcttgggggacagggcaagtctgtctcaaaaaaataaaagaaattgaatacattgatattgtgccaagaccctgccttctacaggcatctagtctaatgggactgggagtaatcagggcagatgacgtaatcccaatatcacattataataggatgtaactggagagctacaagcatgtaaaagttgcaagatgagggaaggcatcacagaggctatggggtgaactgactttaaggaatgggtccttcccttcagaaccacatgtgtgcgggacacccagacagaaaacacaaacgcaaagtcgagtggagggcatttggaaagagcggtgaagccacaccaggaaacaccaagatggcgagccagtttggttgtagagattatagagagggtggaatttgcactgtggaccctggcctcaatttagaaagacatcagctaaggaagttgttcaggtgggcagtgagggtgttgtgctttggaaagacgctcaggctgcactaggaagcccccaggcttggggagagactccaggaggccccagcagggagcatttgacagtggattcgagtgatgcaagggggacctgaactgttgcctctgtcatgggaacccggaggaggtcgatggcgtttgcagttgatatgggaaggagagagacagaagaaccagaaatgtctgcttgctgggggaagcatcgtgtccgctcctttgctccttttcttctccccttaggagcggtttatggttccttttgttttattcttttatttgtacactggcgttggaatttggtttttttggcttttttttttttttttttttttttttttttgagaaaaagtctcgctctgttgcccaggctggaatgcagtggctcaaacttagcttactgcaatgtctgcctcctgggttcaacgggttctcttgcctgagcctcccgagtagtttggattacaggtgcacaccaccatgcctggctaatttttctatttttagtagagatggggttttgccatgttagtcaggctggtctcaaactcctgacctcaagtgatctgcttgcctcggcctcccgaagtgctgggattataggcgtgagccaccgcgcccagcctgagtttctttttagaaacagcagtctaaaaacaagatagtataatcctcttttttgtacacagagtaaagaggacaaataggtgcaagaataaatgaaaggctggaatcccacttcccccgctgtcccagggtattggatattgacagataggaggaagcaaaccactcacagagccaggaataaatgaatgcattggtattgccgggagaagaggccggcgcggctaaaatatgctatgaccatagccaggagatactggtggagagaaaggaacacagaaagggagaggtcacatcttgggagaggaagatcgtggagacagtggaatgggggtctagggagggtttgcccatcagagaagggacctgagtgttggggtgactgtgctcatgtggaaattgcggggtggtggggtatttgaaggtcggatgcaaatccgagaagctggaggaaggcatgttggtgatgctcccaggatggtgggctctgatgagatctttgaaggagtgtgtctaggtcggctggtatcaggagggtcttttgtgtgccaggcagagaactgtcccaaagaactgagagtaaaggggctaggagcttcagggctgcggcctgactgtggcccagagctcagatcccaaatgacccataggagaggcaggggccactcattcactcagcaagagaccagcagagtcctgagggagatgctgacaaataataaaaagaccaagaatagccgggagtggcagctcaagcctgtgatcccagaagtttgagaggctgagacaggaggatcaagtgagtccaacagttctagaacaacctgggcaacatagcaagactgtttgtataaaaattattcgagcatgatggcatgtgcctgtactcccaactgctcaggaggctgaggcaggattgcaagagcccaggaattagaggctgtggtgagctgtgatcatgccactgcactccatcctgtggaacacagctagatactgtctcgaaaaaaaaaaaaaaacaggtgggcaccaagactcaagactgtgggagccagaggggcacagtggctcacatctgtaatcccagcattttgggaggccaaggcaagcggaacacctgaggtcaggtgttcaagaccagccaggtcaacatggcaaaaccccatctctactaaaaacacaaaaattagccagccatggtggtgcatgcctgtaatcccagctgcttgggaggctgaggcaggagaatgccttgaacccaggaggcttcagctgcagtgagccaaggttgagacactgccctccagcctgggcaacagagcgagactgtctcacaaaaagaaaagaagactgtgggagcatctggtgggaagtgctggagggagagaagagaggaactgtgggtttagaagctgcaccctccccctggcagtgcactgaagcaggaacacggttccgtggagaacaaacttaccttgtctgacaacctcaaatctttgtcccaggcgaggaagcttttaatgacaggatcctctgtgattagagagtagatgtcagcttgaaaagcaggacagggtttccgtgggagcagcagggcagcaaggagaagtgtgtctcccagggggaagtctcaggattgctgccacaggtgaggtggatgggaaagaggagaatgactttcactgggcaagggagagaggctcccgctctgagactcccctgagaagaggctgaaggaggccctgggtgtgagaatctacaggatgtagagctggcaaaaagccagaatgccctcccagcagacacagagggaccactgcagagtcataaaggaattcccatcatttcctcatgagacagtcacatcagggtgtgactatggcctaggtatccccctctatggatggagacacttaggtttagaaaagtcagcaagagacattaagtttcagagggcacagctgaagccgctttctttgattttttattgtgatttattgatttatttatttatttattgagatggagtctcgctctgtgggccgggctggaatgcagtggcatgatctcagctcactgcaacctcggcctcccgagttcaagcgattctcctgtctcagtcccctgagtagctgggattacaggcgtgtgctaccacgcctggctaatttttgtatttttagtagagatcagattttactatgttggtcaggctggtctctaactcctgacctgcctcggcctcccaaagtgctgggattacaggtttgagctactgtgctttttcttttgagacagagttttgctctgtcaccccggctggagtgcagtggtgccatcatagctcactgcagcctcaaagtcctgagttcaagcaatcctcttaactcagcctgccaacatgctgggatctcagacgtgagccaccgcacttggcccaaaaccaagctttcttatcccaattgccaacctaatcctaatcttctatcatctcctaagtgtccctcatgagtgatcacttctgagtcctcccgcatggagagctcacccactgggggcatatttttcccattggaaaagtgtggttattggaagtttcctcttttttaaaagaacaggattggaggtgctctctggggtgtcctcctaccaagcagcctgttgaaagtctcgtggtgctcagggagcacgggtgacactcgccattgcttcagcttcatcttgagcccacacagcgtctccgccacccaggtctcctcaggctcaggggcgagctccttctctggctcctcctccgatgactcctcagattcgtccgaccactccctcttccttttccagcaaagggacccacacagggggctgggatctaccccaggggctgagtaaagaaaccaggccactgtataatgcttctgcaattgaactccttagagccagacccaaaacgccaaaccactctccatcctccccagcctcgcagactgctggcttctccaagccatctttccgtctttctcctttgctgaaccccatgagccgctccttcccctccccattcttccatctctctgtcctcagaacacttcctcatttccttccctcatccctagttctctgagtctctcctttttttttttttttttttttgacacagagtcttgctttgtcgcccaggctggagtgtagtagtgcaatctcggctcactgcaatctccgtctcccaggttccagtgattctcctgcctcagcctcccaagtagctgggattacaggtgcccgtaataacgcccagctcatttttgttcttttagtagggatggggtttcaccatgttggccaggctggtctcaaactcctggcctcaagtgatccgcctgccttggcctcccgaagtgctgggattacaggtgtgagccactgcaccctgcctcagtccctccattcttcccacacacctcctcaggtgctccttcctgacttctgggcccgtccttgtttttttttttttgttttttttgttttttttgccacagggtctcagtctctcagactggagtgcagtggtgctatctcggctcaaagcaacctctgcctcccgggttctagagattctcctgtctcagcctcccaagtagctgggaatacaggcgtgcgccaccacacccggctaagttttgtatttttagtattgactaggtttcactatattggtcaggctggtctcgaacaactgacctcaggtgatccacccgcctcagcctcccaaagtgctgggattacagacatgagctactgcgcccggcctttggttttcttttgaaacagggttttgttctgtcatgcaggctggagtgcagtcgtgcagtcatagctcactgcagcctcaaagtcctgagttcaagcaattctcttgcctcagcctcccagtgtgctgggatctcaggcatcagccacagcacctgtcccgaaaccaaactttctttttttgttgtttttttgtttttttgagacagagtctctctctgtcacccaggctggagtgtagtggcgcgatctcagctcactgcaagcaacacctccggggttcacgccattctgctgcctcagcctcccaagtagctaggactacaggcgcccaccaccacgcccagctaattttttatatttttagaaagactgtgtttcaccatgttagccaggatggtctcgatctcctgacctcgtaatccgcccgcctcggcctccgaaagtgctgggattacagacgtgagccacagcgcccagcccaaaaccaagctttcttatcccgagagccaaactttatcaactccagcctaatcctctatcatctcctaagcgtccctcatgagtgatcacttctgagtcctcccgcatggagagctcacccactgggggcatatttttcccattggaaaagtgtggttattgaaagttttcctcgtttttaaaagaacaggattggaggtgctctctggggtgtcctcctaccaagcagcctgttgaagtcctcatggtgctcagggagcacgaatgacactagccgttgcttcagcttcagcttcattttgagcccacacagcatctccgccacccaggtctcctcaggctcaggggcgagctccttctctggcgcctcctccgatgactcctcagattggtccgaccactccctcttccttttccagcaaagggacctacatgggaggctgggatctaccccaggggctgagtaaagaaaccaggccaccatgtaatgcttctgcaactgatcaccttagaccccgaccccgaccccaaccccaaaccactctccatcctccccagccttgcagactgttggcttctccaagccatctttctggctttctcctctgctcaaccccatgagccgctccttcccctccccattcttccgtatctctgtcctcagaacacttcttcatgtccttccctggtccctggctctctgagtccctccttttttgcttgtttttttgttattggttttttttttttttgtttcgagacagaatcttgctttgtcgcccgggctggagtgtagtggtgcaatctcagttcactgcaacatctgtctcccggattccagttattctcatgcctcagcctctcaggtagctgggattacaggtatctgccataatgcccagctcaattttgtacttttagtagagatggggtttcaccatgttgaccaggctggtctcaaactcctggcctcaagtgatctgcccgccttggcctcccaaagtgctgggattacaggtgtgagccactgcacctggcctgaatttctccattcttcccatacaccctcctcaggttctccttcctgacctctgacccttcttttttttttttttttttttgagacagtgtctcactctctcacccagactggagtgcggtagcacaatcttggctcactgcaacctcttcctcccaggctcaagtgattctcctgtctcagcctcccaaatagctgggattacaggcgcgcaccactaccacctggctaatttttgtacttttagtagagatggggtttcaccatgttggccaggctcgtcttgaactcctgacctcaggtgatccatccgcctcggcctcccaaagtgttagggttacaggtgtgagccactgcacctggcccccttccttcaccttagtcaatcctatcccacctcttcttcctccagtcccctcacctgatggtcccgacacttcatcatccaccacctcctggagggggtaccctgaggtgctcagctgggggctctgctcctcatcctgggggtgcggttgatggctggtcatgatctttcccaaaatctatcccaacccacggaacctagtctctgttctatccaaggccttcttctggactctgctaggacccagaaggtgtgttatcaattctcgaggctgagagaagtcaggagtggagaacagctctgagaagatgcagttgtccacttgagctcccagatgcccatggagtccagtccttccaatcaggaaggttggaatctctgatgtcattggtcattccaacctggcaaccagtttgaagaaaaacacatgtaactgccaggctggtctcttgtcctggagatcctgggtgaatggtatctcctgccactgtcccaacctcagaccaccatccaaaagcatcttcagggtctccgcatccatctgttccctgtcccagcagaggctgtgtcttctccactcaaagcctgaagcattttggggtctcctcttctctgtacatgcccatttcagagtccagtctggtgggagagggagggtgggaaagaaaactagggtaagcagaaactatgaaaccttacaagtgtgagattatcatatacaagagatcccaggaacattgacttgatgaaaaagtcacatcagagcactcaatttggcagagcttttctgccgaatgtttactgacattcactgtccgagattctatactgggggtacacgtgtcctctgccgtaaggcatctttgagtccaagagacattttgaggcctgaaaatcataggaaactgcccatgagctcactcatatttccaatggtgtccccagtttcagggagtccatggattacctaaggccagcccctccagttcggctaagaaactctagtctatatattaagttttgtatcatatgtattgctctgaactcagaaatttccctaccatttatggattctatgaataaaatatcgcatgtacaaaaagactaagtcgaaaaatctcagctgtgcacagtggctcatgtttgtaatcccagcactttgggtggccaagggaggaagattgcctgaggccagcagttcaagaccagtgtaggcaacatagcatgaccccatctctaaaaaaacaaaaccaaaccaaattagccaggtgtggtggctggcaccttgttccaactacttgggagactcatgcgacaggaagatcgcttgagcccaggacttagaagctgcagtgagctatgatcttgccaccgcactccagtctaggcaacacagcaagacgttgtgtcaaaaaaaatttttttgataaaaaataaaagagttggatgacattcagagaccatccaaaaaacctgtcagttcctggccgggctcagtggctcacgcctgtaatcccagcactttgggaggccaaaggaagtggatcacttgaggtcaggagtgtgagaccagcctggccaacatggtgaaaccccgtctctactaaaaatacaaaaaattagccaggcatggtggcgggtgcctgtaatcccagctactcaggagcggggactggagaatcacttgaactcggggtgcggaggttgccgtgagccaagatcgcaccattgctctccagcctgggcaacaagagcaaaactccgtctcaaaaaaataaacaaagaacctgtgagtgagttcccatatggcttcctaatgggctgtggctctcctaggagtctcttgctcatgggaaaggcccaaactgaatgaggaagcagatcccattgctatggaagtcccattggtaggaagctctgcttttctggagttcaaatttccattcatgacgctttaaaccgccagagctgggtgggtcctgacaaaacagtttgctatctctctcctagttaacaggctttcatatattagaagatcaatgttctgaccccattaaaagttctcttttgtggaatgaaaagctctgatttaacccatcttcaaacctggtttgcatattcttctctcttctggcacaccaccatgcctgattaagttttttttttttttttttttttttttggcagggacagggttttgccatgttgccgaggctagtcttgaactcctggtctcaagcaatctcctcacctcagcctcccaaagtgctagcagtagaggcatgagccaccacaccaggccaaggctattattctgacttaggggttttttatttgtttcattttgtttttcctacagagtcggtatttcttcaatagatatatctcaaagcagaagctggctaacatcatcctggaacttcaattttcctaacatcagagatgcaataaaactttggacaaatagagtatggtctatatacagctggtgccagaactgcataacccaggtatggatgtgacatccctgttttcagtgctatagtttttctacacacttggtgtttatatacatatgtgctcaagtcagtccaaccctcaagctaaacttagataagatgaaattattgagtcaagtctgcctttgcttctataaaaacatacatcaagtcactttctggttcctgttttcttgtccttatcatattactcataggactcagaattgtttattattaatttcagagtttagaagtattgaaagacaccatctttccatctcgtatctgccaccgagaactttacagtgtaaaacaacagttttgcattttggaaagtaaattatgcaagctccaggaagcactgaaggttggtattgtcaaataaaaagcaaatctggaattaggtaaggagacactttttttgaaaagactattgcaatagggaaaatgctcaagtcataagatttatatctcaaacattaagcgaaaaagttttctttgttagcaaggaatacaaagggtagaacaaactgggttatggggaagtaagatgaagagctgggataatctgatcagatagctgattggatcagggaacatcttttcctgaaggttcttcagcataccaatgcttgcttaagcccaagaataggtcaaggttctagggcctatggggagggctaaatcctgactaaagtttggtcaagttagtagatatattgtccagattggtcagtggcagtgaacagttcagctaatcacttatgagacaaagaatgggaatttggagggtctgtgtctggctttgtcagataaatgagggagccatccataaaacttatctaactgatgtggaaaaagttggttccacatcacttccaaaataaaaaattatttcctggacataaaactgtgggaagatttttgtttgtttgtttgtttctagagatgggatctcactatgttgcccagcctagactccaactcctaactcctgggctcaagtgatcctcctacctcagcctcccttagtagctgggactacaggcttgcactattgcacccacctaggatggggagattttttggccatccttattttccagaatcacagagctcaggtgaagttcaatattgtcagtattaaagcagaagatctgaaaaaaattttgccagctgtttgtaatttttttttttttttttttttttttttttttttagacagaatctcactctgttacacaggctagagtgcagtggcatgatcatggctcactgcaaccttgacctactggctcaagggatcctcctgcctcagcctcccttgtagctgggaccagaggtgtgtgccacctgcccggcaaattttttagttttttatagggatgggggtctcactttgttgcccaggctagtctcaaactcctggcctcaagtgatcctcctacctcagcctcccaaagtgttgggattgcaggcgtgagccatggcacctggcttgtttgtacatttttaaatagcaagtcagacataaaaataaatttatgcacagcaaaataagatgcaaaaatatttgctcaaatatcaggaaaaggattaattattgaatatataaagaaccactacaaatcaatacaaaaaagaccaacaacttagcagtaaaatgaggaaataatatgaacacagcattcacctaaatacaggaatacaagccaggtacagtggtacacacttataatcccagctactcaagaaactgaaatggtagaatcacttgagcacagaagtttgaggccatcctgggcagaaagaaaaggaatacaaatggttcttaaatacatgagtagggccaggcacagtgactcatgcctataatcccagcagtttgggaggccaaaacaggcagatcatctgagatcaggagaatcacttgaacccggaaagtggagactgctgtgagccgagatcgtgctgctgcactccagcctgggtgacagagctagactgtctcaaaaataaaataaaataaaaataaaataaaataaaataaataaatacatgagtaggtgctcaacttcacttaagagtgaatcaggggctgggcgcggtggcttacccctgtaatcccaccactttggaagactgaggagggtggatcacttgaggtcaggagttcaagactagcctagccaatgtgaaaccccctctctactaaaatacaaaaattagctgggcttgttagtgcatgcctgtaatcccagctactcggatggctgaggcaggtgaattgcttgaacccgggaggcagaggttgcagtgagctgagatcgcatcactgcactccagcttgggcaacagagcaagactccatctcaagagtgaatcagggctgagcgcagtggctcacgcttgtaatcccagcactttgggaggccgaggtgggcagatcacttgaggtcaggagtttgagaccagcctggccaacatggtgaaaccctgtctctactaaaaatacaaaagttagccaggtgtgatggcgggcaccagtaatcccagctactcaggaggctgaggcaggagaatcacttgaacccgggaggcggaggttgcagtgagccgagatcacgccactgcactccagccagggtgacagaatgagactccattaaaaaaaaaaaaaaaaagtgtgtcaagactaggtgtggtaccagtgacaaagcctcaaagaatatttgcataaacaaaatgtctttattttaggcagcaggaagaaagagaaaagttatcctactacccctattaaggcgacttcccaaactcatttacagaacttttacttacatctcatttcgctaaaacatagtcatgtaattatacctagcaactagggaacctgaggaatgtaatctatcatctggattacagtgtgtccggctaaaagtcaggtttcctattactaaagaagaaggcaaaaatgtatattgggaggcaattagtagtctctgccacacacaaaaaacagaaatgcaaaataaacttcaatgagtaatgcctttagcctatcagattgacagaacaaacaaatcaaagaccaaaagttttggagaaacaggtgctctcttgttattgagaatggcctaaattgataaaacctctgtgggctataattaattaacatctatcaaaatttttaaaatatatatcttttgatgcaaccaaattttgtacatatgtacaaagttatttattgcggtgtgatttgaaaaatagcgaaaacttacaaagaaaactgtcaaagaatatgggattaatttaatacattataatccattcattcaatttaatactatgtagccgttaagaagaatgaggtagttctgtatgtactaatgaggtatgatctcaagaacacaccatcagtccccctcccccaggaaaacttttttaaagaatacactaatggccaggcgtggtggctcacacctgtaatcccagcactttgcaaggccaaagtggatggatcacttgaggccaggggtttgagaccagcctggccaacatggcaaaaccccatctctactaaaaatacaaaaaattagcctggcatggtgacatgcttctgtaatcccagctactcaagaggctgaggcaggagaatcactggaacctgggagacacaggttgcagtgagctgagatcgcgccacagcactccagcctgggcaacagagcatgactgtgtctcaaaaataataataataataataataataataataatacattattaaattaagtgtaaaggtatattcagaacagtgtttataggatgttcccatgtattattaaaatgtataactttgggaggccaaggtggttggatcacttgaggtcaggagttcgagaccatcctagccaacatgatgaaaccccctctctactaaaaaacacaaaaattagctgggcgtggtggcgcatgtccatagtcccagctactcaggaggttgaggcaggagaatcatttgaacccaggaggcagaggttgcagtgagttgtgatcgtgccactgcactcaaatctgggtgacaaagcgagactgtctcaaaaaatattatttgagacaaaaaaaaaaatagaataattttttttgttcgtttgagacaaagtaccgctctgtcgcccaggctaaagtgtagtggcgtgatctcagctcactgcaacctccgccttctgggttcaagcagttcttctgcctcaacctcccaagtagctgggactacaggtgcccgccaccatgcctggctaatttttgtatttttagtagagacaggatctcaccatgttgcccaggctggtcttgaactcctgacctcaagtgatctgcctgcctcggcctcccaaagtgctgggattctagacatgagccaccacaccaggcctaaataaaattattgagactaggtgggactccaaaaataaatagcaaaaaaattaaattaaacataaaataaaactaattgaccagttgagattttggttctggaagtaaattcattgcttttttgaattcctataattttgtaactttgtcagagaagtttgctgtgggtgacaaggcagtattcaaacagaccttaaaaattaaattttttagctggtcatggcatacacacctatagtcccaatttctcaggggactgaggtgggaagattccttgagcctcaggacactccagcccactgcattctagcctgggcaacatagtgagaccctgtctctaaaaaaaaaaagttttcttttattttaaaaagtctagaatgaatgtgtgtgtgtatgtgtgaaataattctataaaccttcccttctctccttcacctctagtgtacacactctacctttcatgacttttctcctatttcagctctccttatattttaaccccaaatcactaatctcaatgtaccagggaggaggatgatatagaattaagaatgggccaggcacggtggctcacgcctgtaatcccagcactttgggaggccaaggctggcagatcccaaggtcaggagatcgagaccatcctagccaacatggtgaaaccccgtccctactaaaaatacaaaaaaattagctgggcgtgttgtcacacacctgtaatcccagctattcgggaggctgaggcaggagaatcacttgaacccaggaggtggaggttgcagtgagccaagatcacgccactgcactccagccctctagcctgggcgacacagcaagactccatctcaaaaaaaaaaaaagaaaaaagaattaagaatgaagcttatgttatttccttcactaagaaagcacctagaaggctgtatcagtcaaaattctttttagccacaagtggcagaaacacagggcaatccggcttaagcccataaaaccagtaagtctagggtatggctggattcagaggctcaaatgatattgtcaacattctggctctgtctcatctttcagttctgccttctttacagtaagtttatttctcagacagactctccctttgcactagcaacatggctgctggcagccttagattcttattctcataacagaaccatctcagccaagagaacttggcctgggttatgtgtctagtccttgagtgagtatcctgaccagatcacgtggactgagggaatgaagggaaacccaggtgcttttataccagaaggaggaatggctacaggtgagggctagtccctgggcctgtttgccccacttcagaagctctgctctgtattgctgggagggctggctcctacaggatacattcctcaagctccaggtcacctggttcctggttatgatggcctattgcgagacactgatgagagactagagggagggagaaggcaaggagtttcctcccctcctctttactgcatgatttctccagcaatggtagttgttgccttcctggccccatctcccactggataaatactccatgtttctttctttttttctttttttcttttttttttttttttgagacagaatttcactctgtcacccaggctggagtgcagtggcgcaatctcagctcactgcagcctccacctcccgggttcaagcgattctcctgcctcagcctcccaagtagctgggattacaggtgcccaccaccacgcctcgctaatttttgtgtttttagtagagatgaggtttcactgtgttgtttaggctggtctcaaactcctgacctcaggtaatccacctgcctcagcctcccaaggtgctgggattatagacgtgagccaccgcacccagctaatgtttcttgattctctgggtaaacctacctccagacctctggatataccacctccaccttttgtttctccagcctcaggaagttaatgccttcctgctgttgctaatctctagattgcctcatggtacccagtaggcctctcagctcttccattataaatgtaaccaagtgcctgtattacattacccctcttttcaatatccagagtggtttctattttcctgactgatatatgcaggaaaatatccactccaaactcccctaagcaaggcccctatgtctcaacattgtgctcattggtctggagagaagcttctggaattccatccctgctcccagaatttgtgcctcaggatgaattagccaaaggagaaaaaggcaagtcatttaactcctctgggcctcagtttcctcctctataaatttgggatgataccatttgtgggagactgaatacatggcagcctccaaaaggtatattcaagtcctaatccccagaacctgtaaatactgccttatttggacaaagggctttacaaatgtaattagggtaaggattttgagatgaggagatcttcctggattatctaggtggaccctaagtcccaggacaagtgcccttatgagagagacacacagagaatgcatacagagaagagaagcaatgtgaccacagagatagagattggagtgatgcagccacaaaccaaggagtgctgacagctactagaagccaaaagaggcaaggaaccgattcttccccagaggtatgggaggcagtgaagctcctacgacaccttgatgacagacttttcgcctcaagcactgtgcgaaaataagcttcaattgttttcaaccaccaagtttgggataatttgttacagcaggcacaggaaattaatacaccgttttacttcatagggtcgttgtatttgtttgctagagctgccataacaaaataccacaggctgggtggcttatacaacagaaatttactttctcacagtctggaagcaagaagtctgtggcttcttggttagtttcttctgaggctccctcctgggcttgtagatggctgtcttcgctctatgtcttcacacagtcttcctctgtgtgagtacattcctgatatctctctgcatgtccaatttcctcttactgtaagaacaccagttagaatggattaggacccccaccctaacggcctcattttaacttaatcacctctttaaagaccctatctccaaatatagtcacattctgatgttctggatgttaagacttcaacatatgaattctgggacacaattcagtccacagtagtcatgttccagatcctttgctttatcagtttcttgaaagtactatattcttggctgtattaagtatttttttcctctgcaaggaactcttcccctagtccttatctcccttcgtctgctaagtctcaatttattcttgagatcatggctaaatatcacttcccaagcctccagctgttcatgctcatagcacacttcgttgctcttattgaagtattgttttgtttcaagtgtgtttgtgcatgtttgtttgagatgagatctcactatgttgtccaggctggtctcgaactcctgggctcaagcaattcgctggattcagccttccaaagtgctgggattacaggtgtgcaccaccattcctggccttctgtgcatgtttaatgtctgtcttctgtcaccgaactgtcagctccatgaggtgacacacagggctcacattgtacctatagtgcctggcatatagcacatacaaaataaactaatgaatgaaatgaagaaacttatgattataaatgagaaaatatcaggaagcacatggtacgctgagaaagcattcaatacatggtagctattattttgatgactctcaccctcaagaatcaaattaacttgttatttatttgccaaatgtgatgtcttcttccagaccatctcagaaagttcttcctgtccaagctgtggtcaaacatgtcacatgagtggtaaacttacaaatgtgcctgcctgcgttctgatcacccctggagactccaaagctgtgcttcctcccacactgccacagccagccagccattttcctcctcctcctccacctccacctctgccacctcctccaccaccactagcacctgtgttgctcagaaaacccagtctcgctaaagcacttcaggtaggtaacaatctagtaatgatatgttttgatatgttttggtgagtgtgtaatataggagtaaagccaagtggccttttaaggccaggctaatcagggcttgggccagaaggctatattttgttctgattccgtatcttaattattgtgtttttaaaatctcagttcctgagaaattcctagaagctggattgagaaatgaaagtgatgtgtgtgaaacccagtagagtggaagatttctattcgcttctcagcatggctttttcctagggaagaaaacctccctaggaaaccaaatttagaatagaagattgcttagagagtaaagtcagaacaaagagttagtggattccaaagtttcatatcattaggctggagaaccaatctctatttcagttacttatttaccaaggggaccagacaatttgtgaatcactaagacaggcatgaccctgttttaaaatctgctgaattttcactatggataatttggtttaatgtagctgaattaaatccagagtcttcccaatcctcacacacacacacacacacacacacacacacacacacaaaacaaaacctggagcctattgttatatttgccctaattatacctctctgattgtatacattcttgttctgtggaaactgagtcatctttctaggtaattcaagcaaaacttcactttaacccgattaactccttcaactcttgtcttattataatgactcccggggaagatgcaatattgcaggaaactagtccatctcttatttgttagcaaagtcttagcttataaaaacaaaattgcggggtgggggaagccttacattttgatgaatgcttttcaatgggtgataaaaatacgattattcttggttgagtagaaagaatatgacaggttcctagggtagataagagttacctcttaactctgagtctttaaaaactagatttggatttgcatttcaccagttgtgctggttccaatttgaattctaaccttaccatgtattttaaggctggaccattaaaaaaagatggacccatgcagataacagttaaagatctgctgactgtaaaattaaagaagacacagagtttagatgaaaagaggaaggtaagatgtcattgaccacatacatgctctttttgcttttaacaatataggctcatgcctataatcccagcactttgggagaccaaggtgggaggatcacctgagcccaggagttcaggaccagcatggggaatatggcaagacctcatctcaatttgtatacaattggggtcgggggtgctggagggagaagtcatttcatttcaagttaagtttttgatgtttttattttagtagttttggatttcccaacaaaatgtatatattaggaaatgatttaattaggcaattttatctcccaacccttagtctgaagaggtagagacatcctttgaagctctggaataaaaattgggtagcatactggatatatcttacacaaactcagcactcagatatttgccgtttttgcatgtttacattttgagtgatattttaaaatttgttttaataatgtctcattttataattaaagcttataccatcgccgaaagcacggaatccactagttaccgtctctgacttgcagcatgttaccctgaaacctaactccaaagtgttatcgactcgagttacaaacgtcttaatgtaaggaactgcacagtactatgctctactactacttaaaagaatgatattgttgtacaaaggcctaaagaaaaggaaaaaaagattttttgtgtgtatttctaatgttaaaagttatatatgctcattatagaaaaactgaaatctacagaaaagtttaaaaaagaaaacaaaaattatctaaataatcctatcactggagatagccactgttaacatactgctgtttatcattctagtctttttctgggcatatggtttattgccccatttaaagatgctgtttattataagatatggcattgatttaataacagattttgggagaaaaagatatactatcaagaattttaggctgggagtggtgggttatgtctgtaatcccaccactttgggaagctgaagtaggaggattgcttgaggccgggagtttaagaccagcctgggcaacatagtgagagccccatctctaaaaaaaactaattaaattaaaaattagccggatgcagtggtgtgtgcctgtagtcccagctacttgggaggctgaagaaagaggatcacttgagcccaggagatcaaggctgcagtaagaagtgattgtgccactgtactccagcctggacaacagagagagactccatctcaaaaaaaaaaaaaaaaaaaaaatcataacctaaatgtcttaaaacaggattttatctatgaaatttacatacaattaactgcatattttgaagatgtcaaaatgacactttaagttaattttcaaaaagataggaagagttcatgatatactgaatgggaaaaactatatctacaatatgattatacacagacagatacacacatataccatatttgcttgattccaagacacactagttttcatattatataatttctgaaagcaacctgttttatttatttattttttgtatttttttattttttgagatggagtcttgctctgtcgcccagactggagtgcagtgatgcaatatcggctcacagcaacctccacctcccgggttccagcaattctcctgcttcagcctcctgagtagcagggattacaggcgtgtgccacagtgctggctaatttttgtatgttttaatagagacggggtttcactatgttggccagggtggtctcaaactcctgacctcaaatgacccacccccctcggcctcctaaagtgctgggatttcaggggtgagccactgcgcctgacttaggttatgacatttaatttctgtaagtcttcagtggacatccttgcctatcaactctgtacatggctgagtttttccctaggatggattcttacacatgtaactcctgggtcaagaagtattacatattggaatggctatatcatcttatgttcccatcggcatctactgctattttttttctttttttctttttttgagaaggagctctgtcacccaggctggagtagtggcacaagctcggctcactacaacctccgcctcccaggttcaagcaattctctgcctcagcctcccgagtagctgggattacaggcacccgccaccacgcccagctaattttcgtatttttagtagagatggggtttcaccatcttggccaggctggtcatgaactcctgacctcgtgatccatctgcctcggcctcctaaagtgctgggatcacaggcgtgagccaccgcaccctgcttctactgctattttttaatgtaacacatagaactactttctaggatgttgcctatagaaatgattgctttcctttgggaaaaaaataataaaatctggcaagttctaattttttttttttttggagacagagtcttgctctattgcccaggctggagtgcagtggtgcaatctttgctcactgcaagctctgccttccgggttcacgccattcttctgcctcagcctcccgagtagctgggactacaggcgcccaccaccacacctggctaattttttgtatttttaatagagacaaggtttcaccgtgttagcaaggatggtcttgatctcctgaccttgtgatccacctgcctcagcctcccaaagttctaatttttatatctttgttttatcagcactcctggaaaaagtcagatggatctgcggaaactgcttagaaaagtcgatgtagagaggtaatacactctcatatctttatgccttctacgtccattttaaaagttgccataaaatacagctactgttattttcaatacctttgcaggagcccaggtggaacccctcttaccaataaggaaaatatggaaacaggaacaggactgactccagtgatgacgcaggccttaaggagaaagtttcaggtaaccctttaggaaaagaatattggttcctttgcttgaaaataatttggcctggtgtggtggctcatgactgtaatcctaacactttgggaggctgaggtggggagattgcttgagcctagcagttcaagatgggcaacatggtgaaactctgtctctacaaaaaatacaaaaaattagccaggcgtggtggtgcatgcctgtagttccagctacttgggaagctgtgttggaggatcacttgagcccaggaggtcaaggctgcagtgagctgtgattgcaccactgcactccagtctgggtgacaaagcaagaccctgtctcaaataaataatcataatcataatttatgatcataatttaaagcagctttcttagtaacaataatttttaaatggtaccgtattttgcaaagtattttcatatttaggcttcataaaattctataaaatacaggtaggattggccgggcacagtgagtggctcatgcctgtaatctcagcactttgggaggccgaggtgggcagatcacatgaggccaggagtttgagaccagcgtggccaacatgacaaaaccctgtctccactaaaaaaatacaaaaatggccgggcacggtggctcacgcctgtaatcccagcactttggaaggccgaggcaggtgaatcatgagctcaggagtttgagaccagcctgaccaacatggtgaaaccccgtctctaccccaaatacaaaaattagcaaggtgtggtggcggatgcctgtagtcccagctactcgggaggctgaggcaggagaatcacttgaacctgggaggcagaggttgcagtgagccaagattgtgccactgaactccagcctgggtgacagagcgagacttagtctcaaaaaaaaaaaaaattagccatgtatggtgactcgtgcctgtaatcccggctacttgggtggctaaggcatgagaatcgcttgaacccaggagacggaggttgcagtgagccaagactgcaccactgcactccagcctgggtgacggagtgagaccctgtctcaaaaaaagaaaaaaaagaactataggtaggattatcatgtctatctgtaaatgtctgattttattaatccctttagtacatatttttagtaaatatttactaagcacttcctatatgcccagcagtgtgttgaagtactgggaatatagtggtaagcaaaaacagatacagattactgtcttgaagctttcagtctagtggggaaaataggcattcatcaaataatcccatatttgtataatatcacatggcagtatgtgctatgaaggaaaggaatgaggttctgtgggaacccagagaggaacttgatctagcctggatgatctaggagggactcccttaggaagtgatgatgcttgaggtgagagtcgaagaaggaagaggcatttactggatagggtaactgtggggtgggtccaccatgagtgtcaggaaggagagagttccaggcaaaaagaacaaaattcgtaagagttccatggggtgagggatcatggcctattcaaggaactaagaagtgaccagtgtggctgtaacacagagagggagcccaatggtggtgaaagacagggatggagatgtagttaggagtcagaccctgcagagttgaaaggaaaaggtcttgagagctttctttgtcacattcatatacaaccacatacccaacccagtagatcagctggccctggtgtgacttcttccaaaccctgttgatcttagtcatctccctaattgcctctatcattagatctgtgaagaacagccatccgtcggctgcccctgctggagtgctggaacacagggctgctggcatctttggctttgaagtttatagttcgttctctctctggatgcagggacatagcagactccactgctgacactttccaccccaatattgtcttccttttgttccgtgtttgagaatcagtgctttttgtgggacaatataatttctctcttaccaatcaacttggtcctactgggcactatacagctttctgcgtagtggagatgtgaccaggttcttctttcctcctcttagagcatgctacccctaatcaagttccttggtgatacccaaaattgtgaagggcaggagcaaagggacgaggcctcacgggtcttagccccttgctttttctgtttagctctaagatctttgttgtcactgcccctacttcatagcaggtacagtgagttgagaactctggaaatggataaacgataataaattgtaaagccacatattgaacaacaacaaaaatcacagataagacctatggcatatgttgtgctgccaaaatctactcaggaggaggatgtctagttaaaattgttgttagatatagatgacttatcccacccaacccttaggcttctttttttcttaaactgtgaagcaactgtatcaggttttgcattggcttcaggtatcagaaatctgactatagtggtttaatcaaatagggacatggcagagtgtagtggctcatacctgtaatcccagtgctttgggaggctaaggccggaaagtcgcttgaggccaggagtttgaaaccatcctgggcgatatagcaagactctgccttgacaaataaataaataaattaggacttttttttttaatatatacaactaactcatttattttattttattttaattttttttgagacggagtctcgctctgtcgcccaggctggagtacaatggcgcaatcttggctcgctgcaagctctgcctcctgggttcacaccattctcctgcctcagcctcccgaatagctgggactacaggcgcccgccaccacgcccggctaattttttgtatttttagtagagacagggtttcaccgtgttagccaggatggtctcgatctcctgaccttgtgatccacctgcctcggcctcccaaagtgctgggattacaggcgtgagccaccgggcccagcctgtttttttaaaatttatagacgaagtctcactatatctcccaggctggtctcaaactcctgggctcaagtgatcctcttgtctcggcctcccaaagtgctgggattacaggcgtgagccaccgtcctcggcccacaactatcttttttttttttaaatttattttttatttcaatacgtttttggggaacagaaagtgtttggttacacaaattagttctttagtggtgatttctgagattttggcacacccatcacccagccagtgtacactgttcccaatgtatagtcttttatccctcaccccaccccaccctttcccccaagtccccaaagtccactgtatcattcttatgcctttgcatcctcatagcttagctcccggacttatttttttaatttaaatatttctttgggcagtaggaagtccacaactataatacagtggcttcaccatataatcactgttcttccatccttaatgtgtggcttttatcctcttaatacaaaatgcctacatttcctgaagcctcatgtccacattctaggcaagagaaggagaaaggcaaatgttaattaagctatgcctcatttcttcaaagaagccctatccaggaacttctgattgcatcagggaaactgggaaaagtggtttttacaatctgaatgcagtgttgccatgcaaaaattctgggttctgttgagaaaggagagttgtacttatcacaggaatataattgatattataattgggactttttttttttatagctggctcaccctagaagcccaactccaactctgccactttctacaagcagctttgatgaacaaaactgatgccaactctgcctcactccatgagatgatccataacaaatacagataaaaacacccagctgggtgcagtggctcacacctgtaatcccagcactttgggaggctgaggcaggtggatcacctgaggtcaggagtttgagaccagcctggccaac

SEQ ID NO: 73 - DNA, 31285 bp, Homo sapiens
gccagtcaccttcagtttctggagctggccgtcaacatgtcctttcctaaggcgcccttgaaacgattcaatgacccttctggtgcgtaagggggaaagagctgggggacgggagacgccctaacgccctttgcctctttcagctcccttcttgggaggcaagcaggaggcgattttagggtcgggctggggctcattcagttgattgatttttctcaaatatgctctaagcatctgttacatgccaagcactaatcaggatgctaaggataccgcagtgaaacagtctccgccccgtggggcttacattcaggcggggaatactgtcaataaacagcggtaatggagaaactacagcagggcgaagggaatggacccgagacgttggtagctacttgattttcaagtccgagagggcctcactgataagaacactggagtattacttgtagtctgaacttgtgcatttcttttgtgtattccatttgggcataaaagaaggaagattagtaaaggcagtttatgggtgtaaaattagagcagcagcacttattgaaaacataaacaatgaagttatggctgatattgaccacttatacctcaagcaccgtactaaggctttacatcgattattagttatgttaatttcccaccaactctaaggggtaatcctattattattttattgataaaaagactgagacttaaatttgctcagtgctacattaccaaagtgaccggactggaatatgaacccagcccccatcgtgtgctcttaacaccgcaatgcacagcacagtaaccaggaagccttagctgtgtttggtaggcactcatcatttaagatgctgtatgcggccgggcgcggcggctcacgcctgtaatcccagcactttgggaggccgaggcaggtggatcacgaggtcaggagatcgagaccaccgtgaaaccccgtctgtactaaaaatacaaaaaaaattagccaggcgcggtggcgggcgcctgtagtcccagctgactacaggctgaggcaggagaatggcgtgaacccgggaggcggagcttgcgatgagccgagatcgcgccactgcactccagcctgggcgacagagcaagactctgtcttacagaaaaaaaaaaaatgctgtatgctgggactgtgctactagatcttgtttattccttccaaaagccaagtgaggaaggtactgatattgacctcattttacagatgagaaaacagaggttttgtatcttgcacaatcagtaagtggtagagctaaatattaaagctcatgatttattcactatcatacactatttcgtggttactcattacgtctctaagttttgtcagccaacgtgtgaatgaaaatacaactactcacaaaggaaggccaaatgagcaagtgaatcagcacaaacttattttcttagttaaaagactcaaggaccatatgatttcccgagtaatcaaaggacctactcttaagttttgtcagcagtgtggctttaaggtttttttggtttttttgttgtttgcattatagtaggttaaactggctttatcaaagatatagtatttcaggctcacagttacagaaataatactaattattaatttgatgcttaatgtgtatgaggcactgtggtgatttttcatattccagtactccagcctgggtgacagtgcgagactctgtttcaaaaaaaaaaaagcaaaaaaacccccaaaatttatatttcaacctaagatgtatttttatatctctacacatacatacgaaagaaaagtttcacaaaacaatgcctaactttgcagcatatgagtcatgctttttctattgtttttactttttaaaaaatgctaatcaagatctactcatggggctgggcctggtggttcacacgtgtaatcctagcactttgggaggccgaggcagagagatcagctgaggtcaggagttcaagaccagcctggccaacatggtgaaaccctgtctctagtaaaaatacaaaaaactagctgggcgtggtggtgggagcctgtaatcccagctactcgggaggctgaggcaggagaatcgcttgaacccaggaggcaaaggtttcagtgagccaagatggcgccactacactccagcctagacaacagagcaagactccgtctcaaaaaaaaaaaaaaaaaaaaaaaaatcatgagttcctgtctactgtttgacaaacatttaggggacagcagtagttgcctgggaatggtccaagctccttgctcttcctatttatttgcatgagactctagactgaagtaaatagcttttcagagaatagtattaatctatttgttcccaatcagctaaagctttaggctagtagtattttaattactttaagtcctaaaggccccatctcaggtctgctatgtgtatttactcagaaatgccttcaaatctgggactttagttaagtgaaattatgcagtataaacttctggaacatacaaatatagtctagtacaatttgtactttgtgtaacattggctttttgaatttcctaagcctcacattctttgtctataaattatcacacaggattcttgtgaggattaaataaaataacatctgtgaaatgcttagcataatgcctggcatttagtaagtgctcaaaaaattctagttgctctagtgtggttgcttttcttccatgtgtttgaattgcagttgacatctttaataggtctgatgtattgatattagccagagatggattatcactataaatttttattctaggctaaacattgagggatagacaattttaattactttatttctagaaactgatagtagttatctttgtgactctcttcgagtagagttgacaccaagtattttatttgctatattcaatccttagtaagaaagccatatattgcctgtaatatatgatgttcatctcaaaactgtcgtttgctcagttgcctgtgttcctttgacccggttgatataaagggcaagatgatattgttcttcatagagaggccttctttgtaatatcaaatggatgcaattttttacatttaaaaaaagcagtttgttaatgacatttttacatttatattcactttattatgacatgttttaacttaagatcataagtaacattagataatatattaatgttttctatttcctctaggttgtgcaccatctccaggtgcttatgatgttaaaactttagaagtattgaaaggaccagtatcctttcagaaatcacaaagatttaaacagcaaaaaggtaatatagatcaccaaagaacaatggttatgtgatcttataagttttaaagttatgaataacaatatttaaagatgttatagcattttttaaaatgtgaagctagaactatatttaaattttatttgatggatttatgaaagggtcaagtacagaataatgctgtcatcattacattgttatataaccaggaaaattaagcaagatacttatattgatatgtagcttcccttttggtaattaccttgacttgtcagggaatattaggaaaatcagaaaggtgttagatgtgtaaaaaaattgtatgagtaattatttgaaaatgtacaactaaggaaagaatatattgtttcatcaaaagttgtaattagaaatttggggccgggcaaggtggctcgtgctcgtaatcctggcactctgtgaggccaaggtgggtggatcacatgagttcaggatttcgagacaagcctggccaacatggtgaaaccccatctctactaaaaatacagaaattagccaggtgtggtggggtgcgcctgtggttccagctactagggaggaaagtgggagagttgcttgaaactgggaggcagaggttgcagtgggctgagatgacaccactgcagtccaggctgggtgacagtgagactgtctcaaaaaacaaaaacaaacaaaaagagaaagacaaaaaaatttggaaattgtgttttgtgtgtagttaaaacacattgacatcaaccatgatctgtacaattcatttttccgcagaatctaaacaaaatcttaatgttgacaaagatactaccttgcctgcttcagctagaaaagttaagtcttcggaatcaaaggtgaggagcttttatatgccagctggtttatcaagtgtatcatcaaaaacatctgaaagtattgtatttgattagaatgggttaagtgtatgaatcaaggttataagtaaatctgtaaattaatgaaatgagttatcattagaactctagcaagttttacatttctgcctaggtcattatgtttaaatgtgcccttagttcacaattataatggtcttcaattctcaatcacttctatgtttaaattgttcattacctagtaaacatttcaaaattatgtgatgctttgatttattaagtaccaccatttgagttgttttgtttttgtgtatttgtttgtggggaagggtaagtgtttttgaagaaaagtgggaaaaaatgccaatatctaagagaggtttgctactgagaaactgttaaggagtggtgagagattaaattcttaatagtcttgtggcttgtgcaagagctactattactcttttcataagtttataaacaggcaagctgcatagtactttttaaattttatttatgtattttttttttgagatggagtatcactctgtcacccaggctaaagtgcagtggcgccatctcagcttactgcagcctctgtccccacaggctcaagcgattctcctgcctcagcctccccagtagctgggattacaggcacgccccaccacgcccagttactttttgtgtttttgctaaagacgaggtttaaacatattagccagttgggcaggctaggctggtcttgaattcctgacttcaggtgatcagcccactttggcctcccaaagtgctgggattacaggtgttgtccaccacacccagccgccatataatactttttaaaagacagctggggggcgcacagtggttcacgcctataatcccagcactttgggaggcaaggcaggtggatcacttgaggtcaggagtttgagaccagcctggccaacatgtagtcaaaccccatctctactaaaaaatacaaaaatgtgctggacgtggtggcacgtgcctgtagtcccagctacttgggaagctgaggcaggagaattgcttgaacctgggaggcagaggttgcagtcagccaaggtggtgccactgtactccagcctgggcaacagagcgagactcagtctctccaaaaaaaaaaaaaaagacagccgggcacagtagctcacgcctgtaatcccagcactttgggaggctgaagcaggtggattgcttgaggtcaagagttcgagaccagcctgacccacatggtgaaaccccgtctctactaaaaatacaagaaaattagccgtgtgtggtggcacgtacctgtaatcccagctactcgggaggctgaggcaggagaactgcttgaacctagggaggcagaggttgcagtgagccgagagattgcaccactgcactccagcctgggcagcagagcgagacctatctcaaagataaaaataaagtaaaaaagttgtacaaattaataggttttttgatgtgaaaaatattcagagttggaaaaaggcttaggttgttcattcatttggcagttgcctaagcctcatattctgtaatatagagctatgttgttctgtatggaagcatagccacatgtgtctattgagcaactgaaatgtggctagtgctattaaagaactaaatttttaatatttaattttaattaatacatatttaaagacatactcgattttgttagtggaacgcttttaaatatttttggaacaacttgagtatgtgaatttactttctcctttctatgttttatgaaattaaatatacataaacatttctgatgaaaatttagcattgaattaagacgtgctataagtgtagaatacaaagaaaactttaaagacttagtacaaaaatataaaacatctcattgataattttataccaatgacatgctgaaaaaatatatttgatatgttgggttaaataaaatatattaagatttttactttttaaacacactactagaaaaatttaaatgcataggtggcttgcattatttttattgggcaggactattatagacactcttttcttagaaattgatgtaagtggtttgacttaaatttcttgaagaaactgttctgtaattttgtaatttataaagccccttagaaaactaaattacatacaagtttgtatggagccccaaaataatagtccttccccataaaaaatttcatggagtgtgaaattaataaacatgacactgatgtcacccccacctcctgccccacttagaaacatctgaaacagatttcattcaagatgttgatgcctttcttccatttttagatggaaaagatattctttttctagccattgtgtcagaaagtctgttggatataaaaagatatagtgtgaaaattatatgtcttatttagaataaagccaatgagaaaattagaatcagagcttatgctgtttcagtttttatttctttgcatctgtatattttcctcttcgggtatcaaagtttaagtcgatttctctttgtaagattctttctgagatagcataattaaatattcaagatgtgttgctatttaacattagagggaggcagtcagtagctttattcataaagttccacctgttcttttcactgggctgattaggaaaatcctgatttattgggttgaaaatttctaaacctaaaatgtcttgagatttttagaatattttatttatcagatgagtggcctacacaatgtttaacagtgtaatgtttaaaatagaaactaactgattggatcccttcatcttttctgataactgaaaaacaaatttggctgtcatatctgtgacatctaaatttgcttataagtttttttggcttttaaacagaaggaatctcaaaagaatgataaagatttgaagatattagagaaagaggtaagcagtgctttaaacttagtgaaaagtacacatgatagaaagagagttacacagatttaagagataaggattctgttgcagtgtgaggagtcctgcagtgaggcaaacatgccatccagaacagtgcctacaggaaaacagttcttacagtatttcacagatctatccgggctatgttaatgtggtatgctggcaacgccgagattaaagatagcccacttaatgaaaaactgataactgaaaaatcattatgtcagttgattacaattatatatgtggatcaaatatttatatctatccatcgttcacagtcttcctgtatgctaacttatgttaacacaacatagctagaggatttcttagtgagcatgcaatcctagctggttagactgtgatgaagttaggctaactcgatgcattgctctgcacaataggtataggccttcctcatgggtgaaataacatagagctgtgctgtttgatatggtagctactcaccacatgtgatgatctaaattaaataagaactcaattcctcagttgcaataatcacatttcaagtgctcagtagccacatgtgattggcagctaccatactggacagggcatttccaccatgacagaaatttctattgaacagtactaacctaaagaacccatttactttcctagcaatgctaagcagctcactgtgaactttgcttctctgcagtcttttttttctgtttccattgctgaccaactcttttcctcatggatatattctttcaatatattaaaatctttcatttgattacagtcgaatgttggctttcaaccaagagtatgtcagagtaactgtaaatgtctgctcagttgctctgattcttttttatgtattctaataatgttagctatcattttactgagggtacatgtaggggttgatacttacaggaataatcactgagtctcagtgagatagctggtaagtgagtggtagagccaggattagaactaataatttacaccagtgacttcattgggtatagaattttagggtggcaggttcccccccattatattaaaaatatcatttcattgtcttttggcttccacattttctgttgacaaatattggtttgggtttttttttgttttttgtttttttaatctggtaatagcagcaagaatgatggcttgccaatgcctagtacattctcctcagaagcccagctctgccttcttgaaataaaaaacatttagcattttaagctaatttgaatttgtgtaattgaagctagagaaaataactattataggtggaaataccttaaaagtgaataaatagcggccgggtgtggtggcttacacctgtaatcctagcactttgggaggctgaggcgggtggatcacgaggtcaggagatcgagaccatcctggctaatatggtgaaaccccgtctctattaaaaatacaaaaaattagccgggtgtggtggcccgtgctggtagtcccagctattcgggaggctgaggcaggagaatcgcttgaacccaggaggcggagcttgcagtgagccgagatcgtgccactgcactccagcctgggcaacagagcacagagcaagactccatctcaaaaaaaaaaaaaaaaaagtgaatagatagcttaattgtacttggaacttatggcaactaaagttcttatgttcttaaaatgcattaagacttttaagatgtatcataggtaaatatgattattcaaatagctagtaacattagaatatctacaagcataatgtcaaaatcagagatttttccagaaactttaggggtgattattggtagcatctccttatgttggcattctatcagtgaatcatttattatcaccttgtttttgtccagattcgtgttcttctacaggaacgtggtgcccaggacaggcggatccaggatctggaaactgagttggaaaagatggaagcaaggctaaatgctgcactaagggaaaaaacatctctctctgcaaataatgctacactggaaaaacaacttattgaattgaccaggactaatgaactactaaaatctaaggtatctgagcctcatgataatatttacaattgaataaatataaacacgttttttagggccgggcacggtggctcacgcctgtgttcccagcattttgggaggccaaggcaggcggatcacctgaggtcgggagttcgagaccagcctgaccaacatggagaaaccctgtctctactaaaaatacaaaaattagctaggcctattggcgggcgcctgtaatctcagctactcgggaggctgaggcagaagaatcacttgaacccaggaggtggaggttgcagtgagctgacatggcgccattgcacttcagcctaggcaagagagtgcgactccatctcaaaaaacaaaacaaaacaaaacaacatacaccaggcgattcagattcattttgttaagcaaacatgtttcaagaaatcctttctcagggacttgctttagagtcttgcaatggactttccagcatatagaggtaagtgaccacccaaacaacctttcaaaaatgaaccaacaggccagccacagtggctcacacctgtaattccagcgctttgggaagctgagacggatggatcacttgaggtcaggattttgagactagcctagcctaacatggcgaaaccccatctttactaaaaatacaaaaattagtcaggtatggtggcgtacacccgtaattccagctactcaggaggctgaggcatgagaatagcttgaactcgggaggctgaggcatgagaatagcttgaactcgggaggtggaagttgcagtgagcaacacggcactccagcctgggtgacagagtgagactctgtcttacaaaaataaaataaaaataaaccagcaagtcacattaaggaaaagagggataagaacagtagactggtacagtggctcatgcctgtatttccagcattttggaaggctgagggctggagaattgcttgaggccaggagtttgagaccagcctgggcaacatatcaagaccccatctctataaacaaattgaaaaattagctaggcatggtggtggtgcacaccggtaatcccagctactcaggaagatgaggcaggaggattgattgagcccaggagtttgagattatagcgagctatgatcatgccactccactctagcctggacagcggagcgagacttgatctcttaaaaagaaaagaaaaaaaaattaaatcaatcagtaattatggtgtaggtcaaagactgttctctctaccaaagtatattaaagtcaaaaacataaccccagtgataggtagaaaaatcaatatttgtgtattttaaatatgtcttagcagaaaatatttctgaattttttacgtgtttgttgtatttagttttctgaaaatggtaaccagaagaatttgagaattctaagcttggagttgatgaaacttagaaacaaaagagaaacaaagatgagggtgagtgctgcccttggcaggtttgctgtgtctggatctggggatcagtacaactttctcatttcctaaaacaggtatctttgttgtgtagggtatgatggctaagcaagaaggcatggagatgaagctgcaggtcacccaaaggagtctcgaagagtctcaagggaaaatagcccaactggagggaaaactgtaagtgagtgaatgtgaagagaaattgttaagtggaagcaattcttgatttgagtctcttcacaaattattgtttactgagacttcaaccttctgttagtacttatctcattgcctccctccagttgccctatttctctttttaaactagaatgagccctaatcattctcaaacatgttgtgctacaaagttgtatgagtgcattacttttgtacatcttctgtattattaatgatgaggaaagatttcatgatcttatgaaagtggtcattagattgaaattgagaaacactggtataggaaattgtgatttatgcacaatcctagcctttgattttgagctttaatatacatataataaaatgtgtggatagtaagtattcagtttggtgactttagcaattgtatacacctacgtaaccactaccaaacaagatagagaacattttcatcccttcagaaagttccttcataccccttcttgtccccctgctactgcctatgtcatgtccccatccccataactactttctcacttacatcatcataaattagctttgcctttttttatttattattattattatttatttttttttttagagatggggcattgctttgttactcaggctggtctcatactcctggactcaagtgataccaccctggccttcagagtgctggagttatagacatgggccactatacctggccagttttgcctttttttaggacatgcaaaagagaaagagcatgtgtgtgtgttgcttcttttgtttgatgtaatttttcaagattcatccaaaccgttctgtatactgtaatttttcctattttatttctgagtagtggttcaccttatgaatatacctccatctctttactcttctccttttgatcattatttgggctgttgccagtgtctgccattaaaaagactgctgtgaacatgttttatgtttttttatggacacgtttttatttctcagagaaatttctaggagtagaattcttgggtaatagggtagtgtatatataatgttttttaaaactcagaagtgtttttgccatttttatacaccccctggcaatgtatgatagtttcagttgttccagattctcaccaacatttaatgttgtcagtctgtttgattttagcctttctactaggtaggaagtggtatctcctttgtgattttaatttgttaccatgaatgttgaccttatttttatgtgcttattgaccattttatgtgcatatcaccttttgcaaggtgtctattgaagtcttttgtccatttcttgcattggacagtttggtggaggtaaacagataagtaattgaagaccaggtagtctgggacaaaagctttatgggcacacaaaatgctatttagtatgttggatgggtggggaaaccaggaagaccacaaaaagaatattatttctaacacttgggatactgtaatgatggttcttgtcatcataggtttttttgtcagtatatattcagaaaactttctcacttaaataaaaattttagtcttctattttgatgtaaattgtgaatttgagaaattacataaaataatagttaagagttagggctctgtagtcagcctgcctgatacaggagtatctggtacataagcattatgtaagattattaaataacgaaactagaatgtattaacatatgcaatttttgttttagtgtttcaatagagaaagaaaagattgatgaaaaatctgaaacagaaaaactcttggaatacatcgaagaaattaggtaatatgagcagtagctttaaattgaaccttatttttttaatactcagtcattttcatcatttttctgttattttccctgtgcctaaatagatgtgctttttaagataatttgttttaatgcagttgtgcttcagatcaagtggaaaaatacaagctagatattgcccagttagaagaaaatttgaaagagaagaatgatgaaattttaagccttaagcagtctcttgaggagaatattgttatattatctaaacaagtagaagatctaaatgtgaaatgtcagctgcttgaaaaagaaaaaggtattacagtgttttatagttactttgtttagataagtgttacatacaacatttaggaaaaatactactatgctaaaacaaccttttaaatataattagctatactaacattttaaatataattagctatatagctatacaacagcaaaaacctgtactgcattttagaatattttactcttataatgtttgttttctgtttatttcaatacagcatattacctgtcttgattgaaatatatacagtcatataattcttgacttttccactaggtggctgtgtaacaatcagtagataacacagaacaagatttgtgggttttattatttagcacatagtatatattacatggagtaatgatacaaagttcacagttttgttttcttctttggaaataccatgctaaaagcagtgtaatggaatattatgggagtccaggtttctcagtcttaatgttcttatctaattccagtattcttgatgttttgcgttttctagaagaccatgtcaacaggaatagagaacacaacgaaaatctaaatgcagagatgcaaaacttaaaacagaagtttattcttgaacaacaggaacgtgaaaagcttcaacaaaaagaattacaaattgattcacttctgcaacaagagaaagtaatttaccaccatatttttttaaactgttcattttgtgtcatacatttccctatgtctctgaacacctttaaattgtgtatatcctttgatctaccaattctatctttagagtcttatcctgaggacataatcatggatatgctgaggatttagctacgtattttcactacatgttcaccctagggttatgaataatgtgggaaaatgacaacagatacagcaaaatagggaatttttaaaaaattttctggctcattcttgtgttatttaggctatataaacatttacacttaccttgtaaaagactgtctaattacagaagaaacaaagcaatttttaaaatccagattatttatagaacattttacatatcagtgagaagaaagaaagtccactgaaaaattatgggcataggatggaaacagagaaggagaagttctggcctgtaaatatagaaagatactccaccttagtagtaaccaaggaagtagaaataatatttttttcacttacaaaattggcacaaattaaaacatttgataacacaaaatactggtgagagttaagccaacaggtacttacatgcactgatgtgaaatattatagtgttggacaacctacaacagctaaaggaattgagtagatctatatacactgacctggaaagatttcagcaacagagtatatatcatttatatccctccccaaatgtatatgtatatataagtgtaaagaaaaataccagaaggcatatatattccaaactagtagctatctctgcaatgggaaaactaaaattagggggggaagtcgtcaaagataatattaacatcatttgtaatgttagaattatttcacaatggtgatgtatttgtatattgtatagcttaaaaaataattttatgtaatatggaaatcaccacacactttttacataatatgtgaaaaataatgttaatatcaaagccagttgtaaaacagatatatatatataaaatataattttagattaagaagtttctgcatgtgcgttgcatagaaaaaagcctaagatgatatttgccacaatgttaacaaggtataggaaataatctatgaaaacaaatatgctatttctatattgttttaagtttccttgaatctgttgaatttaggtttcatccttctttatctgtacttttttttgtctcctagtacaacctcacaatgccattccaaattattttggtggttttctgtttggatataggaattatcttcgagtcttcatcagaagctctgttcttttcaagaggaaatggttaaagagaagaatctgtttgaggaagaattaaagcaaacactggatgagcttgataaattacagcaaaaggaggaacaagctgaaaggctggtcaagcaattggaagaggaagcaaaatctagagctgaagaattaaaactcctagaagaaaagctgaaagggtttgtattaataggatctcatgtttatgtatgacttcagatgtatttattttgagtactttttttagtattctcttatcaatcatgtgagcgtgttaggttggaattattttataattaagtagtaattattaattattttacaattaagtagtagacacagaatgtgaacacaaaatgtacatgcaaacaagtaagacagccccctcttttaagttaaaagttaaaggttttgccccctttttttaaggccaaagagagtttaaataaacaaatgacaaaagttttacacttctttactactctgctaatttctgaaatttattgaacatcagcattagaacaataatcaactcagggctggatgtggtggctgatgcctgcaattcccatactttgggatgccaaggtgagaggactgcttgagctcaggagtttgagaccagcctgtgcaatatagtgagacctcgtctctactaaaaattaaaaaaaaaactagctgggcacggtggtgtgtgcctgtagtcccagctacttagaaagttgtgggaggagaatcacttaagcccacgagattaaggctgcagttagccgtgatcacgtcactgcactctagcctgagcaacagagtgagactctgtctcaaaaacaaacaaaacacaataatgaacttgggggaaaaaaataaagaatccctcccattaataaatagcattcccatttttgtctatgcacttacatagtgtaagttatacctttaattacatttttccgggagcacaaacacttcagaaatagcaatcaaaatgcaaagcaggctggcacaatggcacatgcctaaagtcccagctactcaggaggctgagatgggaggatctttagagcccaggagtttgaggctgtaatgctcaacgattatacctgttaatagccatggcactctagcctgggcaacgtagcacaagatgccacctcaatcaataactgataaaaagcaaatgagaaaaaataattataactgggaaacattcagaagtaagaaatctcttatttacagtagaaagactgaaatcttggctgggtgcggtggctcacacctgtaatcccaccactttgggaagccaaggcagcgagatcacaaggtcaggagttcgagaccagcctggccaacatggtgaaaccccatctctactaaaaatacatagtaaattagcctggcatcgtggcgcacgcctgtaatcccagctattcaggaggctgaggcaggagaattgcttgaacccaggaggcggaggttgtggtgagctgacatcgcaccactgcactccagcctgggcgacagagggagactgtgtcccaaaaacaaaagaaaaactgaaatctcacttttttcccgaactctagttccttataatttctgccacattatgtttccttctcccatacacttatttatttcattttgttttgttttgtccatagtaattgctaattttttatttattaagagaaactattccttagcctacatattcatatttcatagttcaggaacacaggttagtgacaaacactactacatttatttaaattaaaaagtctgatttgattcttgagttcaaattgcaaatatttaaatccttgggatctgatcattaaaacacttgttgtcaaaggactgtgggctagatatgagtttgtattattgtaatatatctcacacctgtgtatctgtctcagtggatacttttgttattaatcttttctgttttcttatgattagtgatgcaaatgaacagcaaggtttttcatatccctgcttttgggggaacaatacaaaattgtaattaggggtgttgttctatactacagccaatctcagggaacaggaatcttgggaaaataagataatgtcattttaagagaggaaagaaaattgagataattttttattccaactcaaaaaactgtggtccaatggtcaagagataaggatttttattactaattctgttagctagctggttgattctgagcaaaacaatcttagtttctttgatcttctacttcattagatataaaagagttttattagatggtctctaagatcccttctagcctggaaatttcaagcttaagagaaaaacaaactaagaattgaaaataattcctctaggggacagggaagaaaatatttttattataaactctttagtcatatttgattgctcttgctgtggtgtgtatatttttgaaatccggcacttgttacagaatgaatttgatcagctatttttcttatctcagtgtccaacttagtctataagtacacaatgcttatttacaatttttagttctgtatattctttaaaagatctctcataagctcatatgcatatctaaaaattttatcaccactttggaaatatattatttccaaaatatccctgagatttaatagcatatgtatataaaaatgacttaaaacccattctgtctatgcaaaataatccattaaagaagttattaagtctttcagtaatagagtattatgtgggttattcatataatcagaataaatccacaaagtcttgtaactctgtagtttaaaatgaagtggctttaattgttcatggtatttctcaagtgtctaaatggagagaatgaaactttattcaatccagatgttttttgactggtaatcttttgcagtctttagtcctggctagtatcttaagatttggttttatagtcttttatatcctactaccttcttcacccaaatttttaaagtaaaataagcaggaaagataagttgaagctagtagaaaaatgcataaaaaacatgctttcgaggtaagtcataaattaggatctgagctatttagcaggtaatgcagtggtgaagatatgagctatatgattcacagtttcaaaggtaaatactattttctttcttagggtagtaattgtaggtggcattttatctttcaattatttctttttcttaggaaggaggctgaactggagaaaagtagtgctgctcatacccaggccaccctgcttttgcaggaaaagtatgacagtatggtgcaaagccttgaagatgttactgctcaatttgaaaggtatttttcttgggagcctgcactcttaaatatgatgtgtgcagaaaggggtgtttaccccaggaaatatgtgagcaaagcagtcacacaaaggatgattcatactagtttaaattccataatcaccaaccgtaagtgggcatttagcattatctggtaatcttattgtatttatataattcccctttataatttatagaaattcccctttctcaccatccacttcaacttttatgtgctgagccaggtgcggcagcatatgcctgtagtcctagccactgcataagctgaggtgggaggatcaagtcatgtacttagaagcatttggtgcttctgccctactctcttgatgttatcattttcataaagaattcagaagtttttatctcttgctaaacctataaagagacccacatttatactcatcctatcttcccacctattacagatgaaatgtcctagtcttttaatcttcagtgacctcattctatcattttgttttctcataatttgaaacctttttactggaatttttccaatcaatattaaaacatgttaatgtacatctgtctgtaaaatatattaattagctggccactgtggctcataccagtaatcccagtgctttgggagaccaaggcaggaggattgcttgaggtcaggagtttgagaccagcctgggcaatagagtaagaccttgtttctacaaaaaaaaatattaagaattagccaggcattgtggcacatgctacttgggaggctgagggcaggaggatcacctgagcccaggagttccaggctgcactgagctaagatcacaccactgcgctccagcctgggtgacagagcaagactgtctcaaaaacaaacgaaaaataaataaaatacataagttgttttaaatacttctctgaccctaacttccttttgtagctgtctcacaccaccagtcattcccttcttaaccccaaattctactccttttcagtccttttccttctcctcctttttcttctcttgacagagaagattgtctctatatccacttcctcacctcccatgccttctacttattttctccttaaataaaaagtttattttgggtggaactacaaattacaaaggccaatataatgaatacctatatattaatgttaacatttttatttatcacatttactttagctcattttgggggagagtttcctttcttttatttaataaatacaaaagaatgcataacatgtacataaactgtagagcttgaagataaaactgacatgcatgaacctataaaagacaaccagtaagccaaaagattttcaacaacttagtatccatatgtaagttcctctgccatcccatgaaaatgggacagataacactgtcctgaagtctacactaattatttccttgctttttcccccctgtgtattataattttatgacacgtatatccatacaaataatgcattatgtaattttccttctccttgaactttaccaaaaaatgtcatcatagtatatgccgtttcctgggacttattttttcattctgcattatgtgtgttttcaggattgaattgtgttgtctgaggctatggtttgttgatagtcactgctatgagtattttattgtatgaatataccacaacttatttattcattctttggactttgagttgtttcccatttggttagttattattagttattttgtgactataagaatacatgtatgtaagaatttctctaaagccaaaggtatatgaatgttcaactctaaaacttaatatcaaatcactttccaatgtgggagtaagaatctacactcccactagtgttgtataagtttccatttatcttctttgccaaagcttgttagacttcttaaactttgccagtgtacttagtgtaaaatggcttcttattgtggataattcatctttccttttccataaaatgcttgtttatgacttttgtttatttgtctatagggttatcatcttttcctcattgatttgtagaggttttctttatcagccatatgggttacaggtatcttctgccagtttagcttatttttttattttctttttggtttcttctgatgagtggaaattcttgatttcaatatggttaaaatatttatctgtatgtgggtacttttgcttctcatttaagaacttctttctatctcaaggtgtaaagatattcaaccagttttcttctaaaagtcttaaaatttcactttccatttttccacctagaactgatttctgtgtgtgtagcaatatagggatcaaattcattttttgttttccctatggacaaccaactgcctagtttaatttaattcattaaattgtaccttgtttccccagtgatctgttcccacatgtgatacattatgacagacacatagataaataatttataagtgtatatgttttatttataatttttattgtatcagaacatataaatcatataaatatatgtaaattttatatatatatatttattgctaatatcaatcctgtaaaggaatttcccttctcgttagtttgaagaatagtgcttcagggggtttttatctattctgtgattttagtcactatccatatactcgtggcattaaaatttatttcatcaaaccagacctttctttacagctccatattcacatatccagttacccacttgacatcttcaagtagatatcacactgtcttttaatattaacctgtccaaaccaactcttgatccttccattgctttctacccctagtctctcattgtttttattgtaatcagtgacatcatcttcccagcttttcattctgtaaatcttagagtcatccttcatcattctctcttccttacccccaatattcagtctatctcttgaattttcctactctgcttccaaaagagatcttgtgtctttccattgccagctccttagtctaagcctcctttatcactcacctgggctgataaataattgttttggagttgatccttcaattttccattcttttcccctgccctaatccatcttcctcatagctctagagtgagctacacatttaattaaacacctttttattttatttatttgtttattttgagtcggagtttcgctcttgttgcccaggctggagtgcaatggcactatctcaggtcactgcaacctccccctcccaggttcaagtgattctcctgcctcagcctcccgagtagctgagattacaggtgtccaccaccacgcttggctaattttttgtgtttttagtagtgatggggtttcaccatgttggtcatgctggtctcgaactcctgacctcaggtgatccacccgtctcggcctcccagagtgctgggattacaggcatgagccaccacgcccagcctacttggacacctttaatggttcccgtctgtccgccaggtaagcccactgtgccctgcggtgatgaccctcatgccaccagcttctgctccagcctttcttactcattaggctctagtctcacttcttattttttaaattgtgagtaattttcatgcttggtagttgatttcttttccatctctgtatgcatacttcctgcacctagtaggcacttgatttttttttctttgaatacacagcagatgccatgtaaactcattagtacttgcctcagaacactgaattcttacctgtgttaaatgcatgaatacattaaaaactttttagttttacttagaagtatataaagtgtaaactaatcagttatgattgtcatacgcaatagttagaaaactactttgacttttttttctttttaataagctataaagcgttaacagccagtgagatagaagatcttaagctggagaactcatcattacaggaaaaagcggccaaggctgggaaaaatgcagaggatgttcagcatcagattttggcaactgagagctcaaatcaagaatatgtaaggtatatagagcaaataatggccttagaaccattaagacaatttaatgttgaaagccagctagtaactgtcccttggcttgcttttggccatcttatactgcaaattaagaatttactcagttaaaaaatgacacttcttgaagagttccttgaggtttaaagaaaaaaaaaggaaaaattaatgaaagtggctataaaatgtttagtgacctcttctctctcaaaccaaaggatgcttctagatctgcagaccaagtcagcactaaaggaaacagaaattaaagaaatcacagtttcttttcttcaaaaaataactgatttgcagaaccaactcaagcaacaggaggaagactttagaaaacagctggaagatgaagaaggaaggtaatctatgattagaacctgagtgccttgttaactcagttacgatgtgattttttaaataactatgtttttctcaatttaattcttccatgcagaaaagctgaaaaagaaaatacaacagcagaattaactgaagaaattaacaagtggcgtctcctctatgaagaactatataataaaacaaaaccttttcaggtttgtcagttaggagtaaacttacttgtgtttattttagggactcactttgttccctattatagtgaggacagtgactcgggttttctgcaagatcattttgctctgcacttacagtgccaatttagctcactattaaaggtttatacattttattaaattatgcataattttttcccacattattgaagtataattgacaaatttaattgacataattttttcaatggaccctttgtggtttaaaaaaaaactttgtaatgtggaacttaaaagtttggctcagagggcttgcctggtatgagcttttgataattaacctattttaatttgtggtatgacttattgcaaatactcattgtttctcaatatactgatcttttaaaagaaaaaagaataaatgctgattttggaacttagaagtacagtattggttataatgtggtaatctaactgatacagataaaactggccagctggcttttttaccttgtttcttttcctctgttttaatgatctttaaaatgaaaaatacaaagtttaaaagattctcatagagaatctatggagagccctgagaatatgtgaacataccttgttttcatttgtgtttttaattttctttagtgtttatggtttatatgaaactagtaagatcaaactgttttaagtcttaactttatttaaaaaatctttttcagctacaactagatgcttttgaagtagaaaaacaggcattgttgaatgaacatggtgcagctcaggaacagctaaataaaataagagattcatatgctaaattattgggtcatcagaatttgaaacaaaaaatcaagcatgttgtgaagttgaaagatgaaaatagccaactcaaatcggtttgtaaaatgacttttcattttattaaagatattggagtgggggttattctaactataatacttaaataaaatgaatatctttggtatcagaaaaaaataactgtttatagaggaaaattgagctgtgatttagtggatttattttagagtgttgaccagatgggcattcaatgttctaaagttttctagctaccttcttaatatattgaaaattacttgagtaattggatgaattcattaagctttacatatctatttccatttgcaaaactgcaaactccttgatgtaaaaccataaagagaagcagtgttcaaaaatatttgggcatttaaattttttaacatatgtattgagatataattgacaacccatacaatccacccattgaaagtggacaattcagtgttttttagtatactcacagatttgtgcaaccatcaccatagtcaattttaggacattttcatcacctcaaaatgaaaccttgttatccttttcctaacactctcctatctcctcaccccaccccacccttcagccctaagaaaccactaatctactttctgtctctgttgatttccctattgtggacctggcatattcatggattcaaataatatgtggccttttgttactggcttctttcagtcaattagcataatattttcaagattcacctgtgttgtagcatggagagtactttattttttttatagcctaataattcattatgtgggtataccacattttatttattcgtttgtcagttgataaacacttgtttgcacatttttggctattatgaataatgctaccataaacattcatgtacaagtttttgtatggacatttgttttttcctgggacatattatttccctgggaaataataggagggaaattgccagatcatttgataactctacatttaatcatttcaggaagtatcagactacattcagatgagatcgggtgcgttcagggtggtatggccatagaaaggtcaggctgtattcaaaagtggctcataccaatctatattctacaggcggtgtacgagggttccaatttctccacattcttaccaacatttgttattatctgacttctttatcctagccattgtagtgggtatgaagtggtatctcattaacttaacttgcattttcttaattggtaatgatgttggtcatcttttcatgtgcttactggccatttgtatatcttcatgaaagaaatgtctgtttatactctgctcatttttaaattggattattagtctttttattattgtgagaattcttcatcaattctggacacaagtctcttatgtattatttgcgaatatcttctcccattctgtgcattgtcttttcactttcttgatgatgtcctttgacccaaaaaacttttatgacgtccagtgtgtctatttttttgtttgttcgttccttggtatctatctcctctgccaaattcaaggtcaggaagatttacccctgtgttttcttctaagagatttatagttttagctcttacatttagattattgattgattttgagttaatttttgtatgtggtgtgaggtaagggtccagcttcattctttagcatgtggacatgcaatagtccccacactattttttaaagagaatattcttgcctccagttaatggagttagcatccaattaaaaaatcatttagactgtacatgtatggatttatttctagactctcaactgtcttccattgatctatacatctatccttgtgccaccacactgtcttgattactgttgttttgtagtaagttttgaaatcaggaagcgtgagtcctctttgtatttttcaatatggttttgtctattctggacctcttgcaattctatattaattttggaatcagtttttctacaaagaaaccagctgggattctgatgggaattgcattgaatctgtagatcagtttgggacatattattatcttcactaggttaagtcttctaatacatgaatatgggatatttttccaattatttagatctcatttaatttctttcaacaatgttttatagttttcagagtataagttttccacttctcttgttaaatttattactattttattctttttgatgttttgtaaatgaaattgttaatttcatttttggattgttgattgccagtgtatagaaatacaattgattttaatatatttatcttgtatcctgcacccttgctaaactcattttagttctaatagttttttagtggattccttaggatgttcttatagatcatgtcttttgcaaatagagatagtgttacttattttccaatctggatgccttttatttctttttcttgtctaatatctctggctaaaacctgtagtataatacagtgttgaatttagaagtaatgaaaatggatggacagccttgctttgttcctgatctagggggaaagcattcagtctttctccatgatatatgatgttacctgtatgatgtatatagcgtgacattattagatgttgatttgttggccagccgaggtggcttacgcctataatcccagcactctgggaggccaaggcaggtggatcacctgaggtcaggagtttgagaccagcctggccaacatggtgaaacctcgtctctactaaaaatacaaaagttagctaggtgtggcggcgggcgcctgtaatcccagctacttgggtaggagaatggcttgaacccagaagacagaggttgcagtgaaccgagatggagccattgagcctgggagacaacagcgaaacaatctaaaaaaaacaaagatgtcgatttgtcatagatgctctttatcaagttgaggaagttcccttctgtttcctagtttgttgagcatttttatatgaaagggtaatgaattctatcaagtgcttcttctatttctattgagattatcatgtaatttttttattctgttgatatgatgtattttattaattgatttttagatattaatctaaccttctgagataaatctcacttggttatggcatataattatttttatatgttgctgaggggtttttttcagccatattcctaagatatactggtctgtaggttttctttgctttgtttttgtttttttaatgtctgtctcattttggtatcagggtaatggtgacatcacaaaatgagtgagaaatgttccctcttttctatgtggaatggtttttgaataattggtattaattcttcattgaatgtgtggtagaatttattggtgaagccatctggaccttggtttttcttgtgaatattttttggttactaattcaatatctttacttgatataggcttattcagattatctctttcttcttgattcggttttcttcttgagtagtttatgtctttctataaatgtgcctaatttgttggtatataattgttcatagtattcctttataatcttttttttatttctgtaaggtcagtagtaatggcttctctttatttctgattctagtaatttgagtcttttttttttaagtttctttctttttttaaatttttagtggagaaagaactttatttttttgtttggtttttgggtttttttagagacaggatctcactctgtcaccaggctagagtgcagtgatgcaatcacggctcactgcagcctcaacctccctgggctcaggtgatcctcccacctcagcctcccaagtagctgggactacaggcgtgcgccaccacatccggctaatttttctactttttgtagagacagagttttgccatgttgcccaggctggtctggagctcctgggctcaaggaatctaccagctttggcctcaaaatgctgggattataggcttgagccactgcacctggccaagaacttttcttttttataatttcatcttttattttagatgtgggggtacatatgcagatttgttacatgggtgcattgcatgatactgaggtttagggtatgacaggtcccgtcagccaggcagtaaggatagtactcaataggtggtttttcagcccttgtttaatggctgaaaaatccaacatccgattactctcagacattttttctccttgtgtccaaatgtataggttatacttttctgtttattggcatgccttgtaatttttcattggaaagtaaatttttagatcatatattgtagcatttctgggtacagctccccctccttttgggggctttttatttgcttgtttgcttaatgagtggctcaattattttagggaaacatatcccactacctccccagaccccaacagtattgtgcctctgatgttgctgttcagggaggtacagttttaggtgtgcccacaattaccctgggatgacacttgctttggtagggctgccttcctctctttccgtgaacatagtgactgtaaactccagtagatgctggctccttgcttgattatttgcaacagtgccttagggcataaattgctctataaactaatccaatcaaattctggctcctttgtagggattgcatacgagagcagtgctggatatttattctgactacagaagggctcgtcccagctgtcatattccctagttttctcctgcaaactaactagcctactgttcagcctgtatcttaaatctcctcccatttctctctcactataaccaccactgttctttaatggttccccaacctttttggcaccagggaccagttttgtggaaggcagtttttccacagaccggatcacccagcttgtgatgggtttatgtggatggtttcaggattaaagtgttccacctcagatcatgaggcattagattctcataaggagcatgcagcctagatccctcacatgtgcatttcacaatagggttcacactgctgtgagaatctaatgccgcagctgatctgccaggagggggagctcagggggtaatgcttatgcttcctggctcaccacttacctcctgctctgcagccgggttcctaacaggccttggatgggtattggtctgtagcccggaggttggggacccctgctttagagcacccttaggcttcagcttctccaagctctgttgcaggtgaagtcagttcctttgaaaagaaatgaggagctccctgttttatggcctacttgtcttttccgccctcctttccccctcccccgacaatatccctgagccaggactagagctgaaattggggacaatggcagttttctctctgagtgacatcctctgccctaggagctgagttttcagtggacttgtggggaagagatgaggaatagcctcaggccctcttgagtaacctcctggtgtagaaccatccccctcatgagccagagaaagagtcatcggggcccagcattttcaacacactgtgcccaaggtgagcccctgttccatgaatggggctgactggaggaagggatcccccacctcacaattgcatttgtccaggatataactgcagccacagggagctggggacaaaatgagaaactctgatgtcctggtcctcctgggagggaagcttctgactcggagttgggggaaaagagggccctgtgcttttggctgtagccgtctggcgtggactttgccttgctaagctgggagtgggaagaggggaaggagttttggcttaaacactgcagactctctttttcaccaaatttttgcagattttcttgaatagatgtttcttcatttgctatttttcccttaggtcaattttcagaggctttaactggttaatattttataacttttagtttcactagggagcaggtcagcagaactttcatgctgtcatgccagaagtccatctcagcaattacttttgagttgaacttttatcagaaaaatagctttgtagctgaggaggggcaaggagatttaaaagactgtatctcctttgtcacagctgtttcatgtcattttgtaattcagtcttaaagcctgtgtctagtagtgatttttgctgttgagtgtgataatacataaacaactttggaatttgcccgcaacattggtaacacatttcactgacatactctttaataattgtttattacctattatttctttttacctaggaagtatcaaaactccgctgtcagcttgctaaaaaaaaacaaagtgagacaaaacttcaagaggaattgaataaagttctaggtatcaaacactttgatccttcaaaggcttttcatcatgaaagtaaagaaaattttgccctgaagaccccattaaaagaaggtaagacatgaataaatgtataaaagtgtcctcttcctttggatttgcttttatagcatttagcaagtcatccattttatgaactgtgaaaatttgttgacaccttctgataaaagcagttcttactgagattgttgtgtacaatgactgttttcttcctccttctacgctttcttttctgtatacctggattctgcctgttcttcaaggcaaatctcaaatcttccttgaagctttgcatgactattttgtccctgtccacacaccccaaattactccctctataatacccttagcattttaacctaaatgtctcttaggtccttaatcattttctgatttgtagttttagagaagtaaatttcttatttcttgactgtgaatgtttgtctttcacgataaattaaagttggttgaaatgataaatctaaaaattatcttacagaatatattgcttcatctgccttaaagaagatacaaggcctgtttttagtttataatgatggataaattcgttttaatctagattactaatccttcttttcaataattcttctaggcaatacaaactgttaccgagctcctatggagtgtcaagaatcatggaagtaaacatctgagaaacctgttgaagattatttcattcgtcttgttgttattgatgttgctgttattatatttgacatgggtattttataatgttgtatttaattttaactgccaatccttaaatatgtgaaaggaacattttttaccaaagtgtcttttgacattttattttttcttgcaaatacctcctccctaatgctcacctttatcacctcattctgaaccctttcgctggctttccagcttagaatgcatctcatcaacttaaaagtcagtatcatattattatcctcctgttctgaaaccttagtttcaagagtctaaaccccagattcttcagcttgatcctggaggtcttttctagtctgagcttctttagctaggctaaaacaccttggcttgttattgcctctactttgattctgataatgctcacttggtcctacctattatccttctacttgtccagttcaaataagaaataaggacaagcctaacttcatagaaacctctctatttttaatcagttgtttaataatttacaggttcttaggctccatcctgtttgtatgaaattataatctgtggattggcctttaagcctgcattcttaacaaactcttcagttaattcttagatacactaaaaatctgagaaactctacatgtaactatttcttcagagtttgtcatatactgcttgtcatctgcatgtctactcagcatttgattaacatttgtgtaatatgaaataaaattacacagtaagtcatttaaccaa

SEQ ID NO: 74 - DNA, 12309 bp, Homo sapiens
cctttggacgcgcgcctcggttccgaacgcagcggacggcgcctcaggcagcgcggcggacagcccgtcctccggcgcgccgcgagcctcggaggaccctagcgacggtcgtggcgtaagaccggggggacgcggcggtagcggcggccgttgcgattgattgcgctggttgcctgcggcgtccacttccttggccgcccttgctacactggctgattgttgtgcagccggcgccatgtctgtgagcgagatcttcgtggagctgcagggctttttggctgccgagcaggacatccgagaggcgagccccctcccttccccattccctttgcctttccatgcctagttgggccacttcgcccggccctcctctgtcgctcagtctcgggcggtggggacgcctccgagggtgggttgcttcccctctagctttaggttaggcactccccgcccccgcccaaaattttgctgctctgtcctgattccccgtgttcgagtctcagcttctcagcatcacttgcctcgtttgtgtcagttttccttcttttcagcacttgtttatatcgaaggctcgattagcacctggtcttcagcgaatgagcgtttcgtgtatttttgttggtgtcttaaaagcacatgtgatctgcttaaaactctcctgtgatttcctatgccacacaggataaaaaatcagactctactgtggctcacatggtttctcttcaatctcgtttatgctctctgtctttgtgtatgatgttcactttacctcttctagtgccccaaatagcttcctgcctgtttgcttttcctggaatttgcttctttcccgttcttttcctgattgtctcgtatttatctcattggcgtcacagtctaagcgatctatttcctgttatgttttctagtagcacattaactttttttaatgtgtgtaatattgattattttaaaaaaatcttctccctcattgtatgttaaaccgccagagggaagggattgtgtgcttggttccccggtatttacacagtgcctcgcacataagtatgctcagtgaatattttaaaaatgaattagaggcggggagcggcgcctcatgcctgtaattccagcattttgggaggccgaggcggccagatcacctgaggtaaggagtttgagaccagcctggccaacatggggaaaccctgtctctactaaaaatataaaagaacattaactgggcatggttgcgcacacctgtaatcccagctactcgggaggctgaagcaggagaatggcgtgaacccgggaggcggaggttgcggtgagctgagatcgcgccactgcactccagcctgggtgacagagcgagactccgtctcaaaaaaaaaaaaaaaaagaaaaaagaattagaaatacccgactcttgtgttgcatttaactcttcattttgcaagttgcgttcacacacgtcatccattataatgtcccaattgaatacttgggtttaatgggtggctattattctttaaagggtatctgaggaatctaaggctttttagtgactttttgaagtcttacagaggaaataagtggaaaagtcaggattcaaacttggttatgatagatcacataagctatctaatgtgttttgtgtgagtgtatgacaatgattctgttgagtatctgatttttatttttaattctctctaggaaatcagaaaagttgtacagagtttagaacaaacagctcgagagattttaactctactgcaaggggtccatcagggtgctgggtttcaggacagtaagttctttgttttgtatccaattatcagtctcttatttagagggagagtttctatccagaagacattttataatgaaaaatggctatcatgctttatggtgagtaaaaattgaagaagtaggtgatttgataattttggttgatttttcttccacttccacacagtatggtttaaacagagatgttttctattgcgagggcattctactgatgataattacaattgcttaacccatttcctgtttagaaaaaaaaagtgcagctctctgccagcacagtattctcagggtaagcgggaaaagggtttattattatttttttaattttttttttttctgagacggagtttcactcttgttgcccaggctggagtgcagtggtgccatctcagctcactgcaacctccgcctcctgggttcaagcaattctcctgcctcagcctcctgagtagctggtgttacaggtgcccgccatcacgcccagctactttttttttttttggtatttttattagagatggggtttcactttgttggccaggctggtcttgcactcctgacctcagatgatccgcctggctgggcctctcaaagtgctgggattacaggcgtgagccactgcacctggcccaagggtttgtaactcttttgtgttatctagtgacttttatttggccctttgtgtgtgtgtgtgtgtatgtgtgtatgtgtgtatatgcacctgtgtgtatttgaatccagcctttcagtgattgaataccttttaatatgagattaacagtataaaatgttctcaaattaatgtgtttataatcagcctcttgaatgaaaataaaatatgtcaagtttagacatggaaccttcattgtaaggtattgccagcacagctaaaggagctgaagtatattttcagatacaagaatgatataataatgcatttacacgtgccagaggcaagtgatttttcttaatgatacggagttggtcatcctgattgtgaatacttggtaaaggcttttttctgccaaatatgggaggaagaagcaatccaattttaggcatcctctgaggagtgaacaggaatagcagctggtgtgcatctccttaaggatgacgttatttatgacaaccaaaccaattaccagtgtgtctcctaatatattcccttttagcaagttgtttatttttcagtatagctaattagtagggaaactggggatgatattttgaaagccaggttgaaaagcacagatgtgtacgttagttgtgaggtttttttgttgattaatttccagatagattacttagattattaagcaagaactgtatttgaaatttggttaagtttttcatttggttatcttttgtgactagttccaaagaggtgtttgaaagctcgagaacattttggtacagtaaaaacacatctaacatctttgaagaccaaatttcctgctgaacagtattacaggtttgtaagaaaaatagcattattttataatgttaagtaaaaaaaaggagaaaaattatgtgtaccaaatgattgcttacaactaggcaaacatcctgtgtagaagtaacaaaaagagaaaaaaccgaactaataatggtcatgacaaaaattggtgattttatttttttcttctttttactgtctaaatcttaaggaacatgtattacttttgcagtgaaaaagcaattaaaaagaaaatgtggtatgagggtcaaaagtgagaatatctttttgctatattcaagtttcttgtgaaattggatgaactatagttagtgaaataatgagattaggtggcagtatatatatggagtcgagttttactttgaagcttgaatttcactgccaagtgatgtaattagctaatattttatgccatgttttcttattaaaatcaacactgttgattttaagatacaccattattttatgtaccagtagggaaggaaaattttgccagtcataaatgtgaaacatgggccaggcgtggtggctcacacctgtaatcctagcactttgggaggcctaggtgggcagatcacctgaggtcaggagtttgagacagcctggctagcatggcgaaaccccgtctctactaaaaatacgaaaattagccaggtgtggtggcttatccctgtaaccccagccacttcagaggctgaggcaggagaatcgcttgaaccaggcaggcggaggttgcagtgagccaagattgtgccattgcactccagcctgggcaacagagtgagactccatctaaaaaaaaaaaacaacttgtgaaacatggattgtgaaatgtctcctggtttcataggtgttaaactgggaaaaactgcacctgaatcaaaagtttctacttattttaattttcttactgaaaaagatgttcttttaagacgtatatatcagcagtaaataggatgagtattttcagggggtgggtagtataaccttatgagaatattcttttaagggagaggttgacaaaccactagtggctgctgcctctgggagctaagaattgcttttgttttttcaagagttgttaaaaaaaagaaaatcccagataagaatatgtaacagtgaaagcgtcccacaaagcctaaaatatttactacttggccctttacagaaaacatttgctgatccttgctgtaaggcaggggttcccaacccccaggccatggactggtactggtctgtggcctgttaggaactgggatgcacagaaggaggtgagcggtaggtgagcgagtgaagcttcatctgtatttacagccgcttcccatcacttgcagtactgcctgagctccacctcctgtcagattggtggcagcattcgattctcatagtagtgcgaaccctattgtggactgtgcatgcgagggatctaggttgcatgctccttatgagaatctaatacctgatgatctgaagtggaacagtttcatcctgaaaccatccgccccccttctgtggaaaaattgtcttccatgaaaccagtccctggtgttgaaaaggtcagggactgctgttgtaatagctgaagcacagagagaggtaggacagtagaacaggtggggtctttagagaccatcttctctggaggtcacacacaggctgccctctggctggatttggccttcagaagggtttgtgtgacctgcattatgttgagaccttttttttgaatgtattgccacatttgagaatcaggaggcattgcataaatatccacaggttgtaaaatttccttttttcaggcttctagctcagtattctattttaagtgcatttgtttagtgattgcaaatggtaattttgtgaatcagaattttcttggtattctgcactcaaatcaaaatggaggaatacgttgaggatgatacataactgcagttgtcttcaatcatcagttacaaatttttatttttttcagagcagtatcactgttcttactgattaaatttagaaggcacaattgctcttgtcatctgtaatcttcagttttcttttttctgtctttttttttttttttttgagacggagtgtcgctctgtcgttcagggtggagtgcagtggtgtgatcttgcgcactgcaacctctgcctcccaggttcaagcagttctcctgcctcagcctcccgagtagctgggactatgggcgcctgccaccacgcctggctaatttttgtatttttagtagagagggggttttgccatgttggccaggctggtcttgaactccttacctcagattgatcaacctgcctctgcttctcaaagtgctgggattacaggcgtgagccatcgcacccggcgtaaattttcatactcatcaaaattagaccatatttgtcactgattaaacttaattgttataaattcgaacttgtaaaattaatgctaaatgtcatatttctctttatatattgggggtttgtgtaagattttatttgaaaaatgatcgcatttctaaaccgtttgaacatggctgtattaaacccatctttctgaaggtccctaaccttggaggctaaatgtgcttattttcatgcagatttcatgagcactggaggtttgtgttgcagcgcttggtcttcttggcagcatttgttgtgtatttggaaacagaaacactagtgactcgagaagcagttacagaaattcttggcagtaagtgtctttattagtgggatctgcagaatcaggcatggttgcttactttttggtggaaagggtggttgtactttgtttattaaaacaaacaagaattaactaaaaaccacttatagttgtagcttggtatctgaggatgatgcttccagagctcttccaatacccaaatctgaggatgttcaagtcccttatataactggtgtagtatttgcatataacctatacacattctcccacatactttaaatcatctctagatttcttaaaatatctaatacagtataagtgctatgtaaatatttttttttttttgagacagagtctctgtcgcccaggctggagtgcagtggtgcaatctccgctcactgcaacctccacctcccaggttcaagtgattctcctgcctcagcctcccgagtagctgggattacaggtgcctgccactatgcccagctaattttttgtattttttttttttttccgaaatggagttttgctcttgttgcccaggctgtagtgcaatgacgcaatctcagctcaccacaacctccacctcctgggttcaagcatttctcctacctcagcctcctgagtagctggaattacaggcatgcaccaccacacccggctaattttgtatttttagtagagatgaggtttctccatgttggtcgggctagtcttgaactcctgacctcaggtgatccgcctgcctcagcctcccaaagtgctgggattacaggcgtgagtgaccgcactcagccaattttttgtatttttttagtagaaacagggtttcaccatgttggccaggctggtcttgaactcctgacctcgtgatttgcccgccttggcctcccaaagtgctgggattacaggcatgagccaccacgcctggccttttcccaaatattttctatccatagttggttagcgcagagggccgactctacctggaaatgtaaaagctaaaaataacaatggcaaacacatttgcacttgctttagtttttaaaattgaatttttaaaaatttcaagcctacagaaaaattgaaagaatagtacaatgaatacctgtttacatgccacttagatttaccacttgttaacattttgctacatctgcttaatcttctcattttgtgtgtgtctttgtcagccatttgaaagttgcaaatatcgtaactcctttctgaaatgctttatcatgtgctttctaacaagaagtatattctgtgacacaactagatactgtttttgatagtatttttgagggaagactgaattgaattttgcttaagaactcaaaaaatccatagtgaggtctagttgccaaggttgtgaatatattaaaaagccagtttttaaaagattcatcctttcttcacttactttgggagaaattatgtgtatatttttatattctgaggcttaacttgcattcacagcatgactttattttcatgtgttttttagttgagccagatcgggagaaaggatttcatctggatgtagaagattatctctcaggagttctaattcttgccagtgaactggtaagctcagtaacttgctggttgcttttttgatctttctgcttcactgtcagtttttttttttttttttttttttgagacagagtcccgctctgtcgcctaggctggagtgcagtggcgcaatctcggctcactgcaagctccgcctcccgagttcatgccattctcctgcctcagcctcctgagtagctgggactacaggcgcccgccaccacacccggctaatttttttttgtatttttagtagagacggggtttcaccgtgttagccaggatggtctcgatctcctgacctcgtgatccgcccaccttggcctcccagagtgctgggattataggcgtgagccactgtgcctggcccactgtctgtttttaaaatgggtaccaaaattcagaacgtcttaattcttttctaagccatctctcggtcaccaggtagtcactgactggcactgtatgtgttacaatttactaggcatcagagaaaagccagatcaaatgatgagtgcatacttactgagttaagaatttttaaccgatgataagacctcttccttttagggtagtggcaaaacatttattcctggtaactgttaatccatgtaattgttttggacactcatttgtctatataactaagttattcttatcctttattcctttaaccactatctagggaaattgccctgtaaaagtctaaagaaaaaaaaagctgtcagtagcaaaattgagtagttgtgatagagactgtgccagtctgcagaggtgaaaatatttactatctggctcgttaagaaaaagtttgcttgtccttgctccagaggaaagcagtccagggctggtctgatgattccttgatctttggccctaggttcttctagcttcagcttctttcttatgttccagaactgttgctctagtcacatcttcactctagccagcagtaggaggaaatagggaaaatggtatgccctcccgctttaaggacatttctttgaagttgtacacacaacttctgttaacattctggtgccttgcctgcagggaggcagaaatggagtctattggagtgggtatgtgtgcattgaaaacctgaggaagatggtgagaatggatgatggggtccacttgtaggctgtaccacttgtctggcttgttggagacacctgaccagtaaacaggaagcatcttgttagtattagttaagtgtaaggtgtctttaggaccatacatgttggggccgggcacagtcgcttacgcttgtaatgctggcagttttggagaccaaggtgggaggatcccttgaggccaggagttccacaccagcctaagcaacaaagcaagaccccttctctatattaaaaacaaacaaacaaacaaaaaacccgtatgttgacagtgcactaaaggggtaagcctggaaaagtggagaggattttacagaaaggggaatcttttttattattttaatatattttttaaagccagtcaaatggagcagtagggggttgtatactgacaccgagaaggggagtcttgggttgggtcttgaaatcaatgttagttctccttcaagacagggttacactaacataattttagattcttatcccaagtctgccttacttgattctaggtgactggagttgcagcttagtaggtgggctctagaaatgtgatcatttggccaaggttggaagaggtagtggagctgctgtgattattttgtcgtttctttcttcgatatgatagcagatgagctgtaaagatgcttgtgtaatgtaacactttattatgcaatagccagtttaagaaattagagaaattttagatgttagtaatgttaaattttacttggcagaactggtctcattttcagtgggattcttttcagagaagctcctgtcttgtctgtacttgtgtgtaccctgagatagaagatcagcgtggctgtctaggcttgcggttcttctggttgtgattcagaggaagatgcgctgagaaggagccatgttgtaacaagcccctgttttctctttcctggtacagtcgaggctgtctgtcaacagcgtgactgctggagactactcccgacccctccacatctccaccttcatcaatgagctggattccggttttcgccttctcaacctgaaaaatgactccctgaggaagcgctacgacggattgaaatatgacgtgaagaaagtagaggaagtggtctatgatctctccatccggggctttaataaggagacggcagcagcttgtgttgaaaaataggaggctctccttgctcctggccttgctgacctcagcggttgccaggaaggggtgagcacagagtgcctcttacggtagttaggatgctcagttgctaaacactgcgctttattttcttaaccagttgtggtgtgagtatcagaattgaaacacttttttgggggtaaaaaatatagcctttacatggacagaattttttttgttgtttcagtgaatatgcctgtaattcagtgtatttcagttccgtcagaaagtgtaaatgttagtttcttggtaaagtccttttcttgcttaccttgactgttgatgtactgattgagaagttcattgtctcgtttgtgattcttccagatgtgatgcttgatattttctatatgcgagttagccatccacacccaggcatagcctggatacagtataaaaatagataattaaaaagatggttgccaagcaaggaaaacttattttatattttcccttccttattttaagcattgtgagtaaatcagatgttgaattcttttgccaagggaattatagctgcaggttctctctcactgccatcaaactgtaaaagattaaactgcgaagtcaagctcaacagattattttggaaagtttttgtattaagggatttagtaacatcattttgttttccaccaggcagggagtagggcttagtgttttaaaacacctctgctttctgatgttgccttaatattctgctattgcagcaattaaaaattgtcttcatgtacatttggaactaacacgtgatgtgatatattcctaaactatgaaacctttttcctagtagtcagctagatcatttgttctgggagtataaagccacccacgtaagttaataagcaaaatcctgactattatgttgttagagaaaaatgctttgctttgtctggaagaaagataaaatagtgaattataaataagtcaggccgggcgtggtggctcacacctgtaatcccagcacactgggaggccgaggcagggggactgcttgagctcaggagttcgagaccagcctgggcaacaaagtgagactccatctctatataaaaacaaaaaccacgaaagcacacacaaaataaatcagtgggatttggtaatgtgttttagagtaagaaatttcaggttgttggtgactatcccaacagtcatgttttaaatgtacagtttggggcaagtcatgtaaatactgttggtggtcttccccacacgccccaattttcaggtagtactaagagtatgtgccaggaaactcttgctattgaattgagatgattaaaatggtgacttaatccgtagttattttgcacccactgaaaggaaagtgctttccagaataatatgaagtatctaaaagtgtcaccttttcttgcctgatcaacaatttgggcttcctgtttgtacaaggggccatttggcatacctttcacagcttttatcaggccaagttaaaggctgactacattttttcatcatgaggaaagcagttgaaatgaggcatgagttactgtgcattgggattttagaacaattttcttgtgacagctctttttgtgaagttaggttcttaaaagtgcccatgatggtcacttaaaatgtgcagtaatagcactgccaggatcaagcatgaaaggcttttaaattagatcatcccacagacaatacgtttgataatagttttttcttttaacctctttaagtattgattctgcttgagaatattgaagtacttgccagaagttgtggatttcagttttaacaaatgctattaaagtggagaagcacactctggtcttggaattccatttgaggatttagaagtgtcatgtttataactattcagttgtgtttgttgctggcttgttgtaaagcaataaaatttttttggtctttttgtaagtgagtgtgctgctgtaagaaatctcccatgtgcataacaaattctgaatattttttgaggctaaagaagaccggggtgacaagcagatactgctgtgtaatggttacactaaccaaaagacaccagccactcagagttctatactgtaaagcgcagataacatttgtgtgttataccttgattggggaattaaaagtcatttaactgaagatgttgagaaacctgggctctggttttagtataccggaattacttttttccaattttagaaaatcaagcaggttagagaaaatagagatgaattaggggacactgtcttatggattcatttataagaagagaaccagccatatacacttggggagatttgccacatcttaaacttgaataatagtatgagtaatgcttaagggagtttaatagagaaggaaagctttggcagtgttttgagaacttaagtggctaaagagatgagacaaacatgcaggtcgctactggcatagtttcataattgtgtactcggaaattaaagtttgcttgtttcttggtctggattaaa

SEQ ID NO: 75 - DNA, 43549 bp, Homo sapiens
agcaaaccaatcgcaagcctcgttgagtggaaggggtgggatcttccccggaagtgttggttaaagcccctccaatcagcggctcggtgcggcaagtttgaatttcgtggaggctcgggttgtgagggttcctgcttcggagtcggcggtggtcgtccagaccgagtgttctttactttttgtttggttgaggtttcacgctagaaggtggctcaggtaggtgggtgctggagagctggacggagaacactggcccgcttccgttgaaggtctagaagggtctgaggaccgggggctgcgagcgggagcaagtcagaggcaggctcctttaggaccgtgttacctgcccttcccgaagctgataatgcgagcctttagaagagtccatatgtttgccctgacctctgtaatagtcagcgtttcaccaccggggcgtaattgacctttggggtgaaactgttcttcactagctccgacattaaattcccgtagctcttcccaggtcccatggcaactaaaaacgcccggttgagaacctctagtcaagcaagattaacgcattctggactttcaagctggaggaaacgccactcagccaaacaaaatttaggtgtgtgtggagccagggctgccttgcttgggatcccagcttcaccaccttttagatatgctaatgtgagcagttaattgacctcatctgtatgagagcgataatagttaactacctttcagggttattctgataattgtacctttaatgttgtcctcgctcgctctttctcttgctgtggatagtgctatcctgtatttaatacataagtcttaatttttcttcaatctttagcgaattaatattgcaggagataaatagtagaagacagttctttatgaaaagcacagtccattgtcactttccttgggtcttagaggagaatgttattagcatgcaggtcagacagattctcgttttttatattttgttgattgcttagaatcatgtaacaatgtattgcattacttgtgccaatttttctattatctggagttttctagtggatttagttaattcttgttgaagaatataccatagtgtgtctatcacagagcctcccccttacctttttttgtttttgttttttaactgccaagacttctgagaatcagtatcctttctccagtttggcttggtagttctctataccagctacacaggtgaccccctcaaactttctaattttctttgttctccctagttggatctactgacgtcgtctttattgtcctcttttgttttgcttgaatacattctcaaagatctttccaagaaaaaggcatgtgccaattaaactatatgattttgtgcgtgtgtgtgtgtgtgtgtgtgtgtgtatggcttttcttttttaaaatttatagagacggggtcgtgttatgttgcccaggctggtctcaaactcctgggctcaagcagtcctgcctcgacctcccaaagtggtaggattacaggcctaagccaccgtgccggcctaaactgtatgatttcttgtatggatgaaaataatggagcaaactgatagggttattgtgaactatatatttggtcttgttctgttttctggcaaacaactactaaaatccttggagtcttcaaagtggtacctttttgtatgctaatgattgactgatagctggatgcctctaaatagcttcaggattggggctggtcactagacagaccaaggcaggatttctcgagagttggcattttcagccccacctcacaacctctggggaggggagaggagctgaaggttgacttgatcaccagtggtcaatgatttaatcactcatgcttatgtaatgaagctgccataaaaaccaaaaaaaaacacctgtgtttggagagcttcttaggtgaatacatgaaggttcctaaacagtggtgctacctgagagagcatggaagctccttgttcctttccacatactttgccctgtgcctctctatccaactctatctgtatccggttgcctattgattatccctatatgactaataggtacctggtgtggggtttttgtttgtttttggttttcttttggctttagaagaaatgttagactacctgcattcctcatcatgggtaaggaaacccttgtgtacatggtccttcacttaacctattttcacctttatttcacgcttttctttttgcagtgttctctgtggtaagcccagagcctcttttattctggactatcacttactggctttctcttcactggtcaagcaagttcctatttaaaacccccaaataggtagcttcttattctctgataatcttcttctcacttttcagtgttacatatttatttcattgcacattttatatttttatttcagaaggccctgaagtgggacaggaaatgaactgtaatcttaattttttaaataatgaaaattcatgtaagttgggttttgtccttttccttgacaggatgtcttcatcacattttgccagtcgacacaggaaggatataagtactgaaatgattagaactaaaattgctcataggaaatcactgtctcagaaagaaaatagacataaggaatacgaacgaaatagacactttggtttgaaagatgtaaacattccaaccttggaaggtagaattcttgttgaattagatgagacatctcaagggcttgttccagaaaagaccaatgttaagccaagtaagtaaaggtctgttgtaattttaagtactttgaagagtgaataatagttggtttaatgcctgtgtgagtaaaaaactctggccagaagagttttgaaataccattctataaataactttcctttttggtctttttccttttttttttttttttttttttaaattacaagagacagggtctcactgtgtcacccaggcgggagtgcagtggtgtgctcactgtaacctcaaattcctgggctcaaggaattatcttgcctcagcctcccaaagtgtggggattacaggtgtgagccaccgcgcctggccccttaataacctgttatctacaactaactactgtctttaaggcaaaagcctttacctgtggagtattataacactttattatctatattgcttcatagaaatcctaaagttcttacggagcttgggtaggataagtgttgacaagataaattgataagaaatgtaaaaatagaataattaaagaatccatgaaatgagagtactttgtcaatggaaacattagtaagaaaagagcaaagaattcatccttgcagtttgcccagaaggattgggaccattaggatggaaagaaccaactaaagaagaaaggaataatctcagaaaaagatgaaaatagagcatcttagaaggcaaaggatgctacagaaaagagaaagcaaactgagaaatgacttgtgtttagtcaggagtcaccctactcctatttgttgtgttcatatagcaggcgttaggagctagatggcattgaaataatgctaggataaatagggaatggcagaaagaaccaaacattttttatctgagaaagggtggttcctttctcatcttgtcctctcaaatgctccatttcttaaccaaaaatctttcaaattaaagtctaactatctcagtatgctattaaaatatcctttatttcccgtttgcaaaggcttagaggtaggagtgtgcctgatatgttttagtgaatgcaagtaggtaactgggtagaaaagaatgagcaagggagatagattacatagaatcctaaggaccatcattataaggacattggcttttactctgaaatgagaggccattaatgggtgtttatgtaatctgattcatgttttaaaaggatcgctttggagtcaggcctgtagccctagctactccagaggctgaggcaggaaatcttgagctcaggagtttgaagcttcagtgtgctacaatggtgcctgtgaaaagtcactgcactctggcctcggccacacatggagatcctgtctcctaaaaaaaaaaaaaagaaaaggatcaggtcgggcacagtggctcatgcctgtaatcccagcactttgggaggccaaggcgggtggatggcgaggtcaagagttcgaaaccagcctgaccaacatggtgaaaccccatctctactaaaaataaaaaaattagctgggtgtggtgacacacacctgtaatcccacctactcaggaggccgaggcaggagaatcgcttgaacccaggaggtggacgttgcagttagctgagatcacgctattgtactccagcctgggcaacagagcgagactccatctcaaaaaaaaaaaaaaaaaaggatcactttggctgctgtgttgagaatagattatagggtggtatgtatgacatcagggagagcagtaagtagactactgcaataacttagttgatactaaagtattaaaagacaaggggccagatgcggtggctcatacctataatcccagtaccccaggctaaggtgagtggatcacgaggtcaagagatcaagaccattctggccaacatggtgaaaccccatctctactaaaaatacaaaaatcagctgggtgtggcgcgtgcctgtagtcccagctacttgggcggctgaggcaggagaatcacctgaacccaggaggtggaggttgcagtgagccaatcacaccactgcactccagcctgggcaacaaagtgagactccgtctcaaaaaaaagacaagggaaaactagtaaagaaccaaggaacaatgcaaagtaatgtaagaggataaccagaagaacgtgctatcctagaaaccgagtagaaaagtgcatatcgaggagagactgattaactatgttagtcagtactgcttgttagatcaagtataatagaggtgagaatttggacttcaccactgtggaggtcactggtgatcttgaatagttttggtggagtgaggttcagggagtgaaagattggaatggatgagtataatcaaacccttagatataatttgtagtctgtagaaaacatggagcctggaggaatgagtaaataaacaaatacagcttgcaaagacattcaataggaaaactgactaccttttgtcagtaagacaatggcatgaaaagaagagtggggaggaggatctgttttagatgaagagatttaaaaagacattcaaataaaacgtgttgctcttacttggttcttgatttaagtaaacagatggtttaaaagacctctttgaaacaaatagagacgtttaaatctggaccctgtaatagataacaaggaattactgctgattttgttaagtgtgatgatgatatcgtggctatgaaaggaaatgtctttattttattttatttttattttttgagacggagttttgctcttcttgcccaggctggagtgcaatggcacgatctcggctcaccgcaacctctgcctcccgggttcaagtgattctcctgcctcagccttcctgagtagctgggattacaggcatgcaccaccacgcctggctaattttgtatttttagtagagacagggtttctccatgttggtcaggctggtctcaaactcccaacctcagatgaaccgcccacctcagtctcccaaagtgctaggagtacaggcgtgagctatcgcacccttccagaaatgtctttattttttagaagtatatactaaagtatttagagatgaaatcttctaagcataatttgttttaaacaactgcagcaaaatgttcataattattgaatcttggtaataggtatatggggttcattataattgtgtgtatattagaagtttttcataattttgaaaagagagggaatgtaaagagtgttggaaataggctgggcttggtggctcacacctgtaattccagcactttgggatgccaaggtgggtggatcacctgaggtcaggagttcaagaccagcctgtccaacatggtgaaaccccatctctactcaaaatacaaaaattagccaggcgcagtggcgcatgcctgtaatcctagctactagggaggctgaggcagaattgcttgaactcaggaggtggaggttgcagtgagccaagattgcgccactgcactccaacctgggcgacagagtgagactctgtctcaaaaaaggccaggcgtggtggctcacacctgtactcccagcactttgggaggccgaggtgggtgaatcatgaggtcaggagttcgagaccaccctggccaaaatggtgaaactccgtctctactaaaaatgcaaaaaattagctgggcatggtggtgggcgcctgtaatcccagctactcgggaggctgaggcagtagaatcgcttgaacccgggaggccgaggatgcattgagccgagatcacgccgctgcattccagccaaggcgacagtgcgagactctgcctcaaataaataaataaataaaagtgttgatagtagagatacaggtaactctcttgaagaattttgccttaaatgggactagaaaaataagtgctagatgaggatgtaggttgggagaaattaccgcatgcttgtaacttcataatggcaacaattcagtagaggaaaaaatagatgagtaagaggataagttgctggaagaatgtccttgagtaggtgagaagaaatagagtacatctattataataaatagcacctataattgtattagttatcccaaaacttagcagcttaaaacaataaatattgattatttcatacaatttttgtgggtcaggaacttgggtatggctgagctgggtgattctgaagatagcagccaagatgtcatccagagatatatctgaagccttaactgagactggaggatctgcctccaagatgactgactcacatgaacagcaagttgatgctggcttttggaaggaggctgtagttctttgtcatgtggacatctccataggactgcttgagtcttcttaaggccccacatggcacctggcttctcccagagcaagcgacgcttcaagagagagcaaggcaaacactaccctagttttagaagtcatattccattattcctgtaatactctcttggtcacacaagtcagccctattcagtgtgaggggatgacacagggcaagactaccaggaagtgaggatcagtagagggcagcttggatgctggctatcatacaagttaattaatttaaaagtgaagtaataaatgcctattacatagcaagcagttaatatttgaacacatgaaggcaaaatgaatacaaattttaaaagactaggggttgaaataacttgtggttagagtgctaaagaattaacaagaaatattaaaagcatttccctttgtgcggagaggtcttgctttgttactcaagctgaacttgaactcctgggctcaaatgatccttccacctcagccttcccagtagatgggactacaggtgtgttactgtgcctggcttattgaaagcctttttttttttcttgagacggagtcttgctctgttgcttaggctggagtgcaggggcgcaatcttggctcactgcaacctccatctcctgggttcaagcaattctcctacctcaacctcccgaatagctgggattacaggtgaccgccaccacacccagctaatttttgaatttttagtagagatgggatttcaccacgttggccaggctggtctcaaactcctgacctcagatgatccgccctcctcagcctcccaaagtgctgggattacaggcgtgagccaccgtgcctggcctgaaagcattttttagcagcagttgaaatgacacaaaaataattgtttatacatttgcataacttttcatctgaaatgttttatatactgtgtggttttggttttttttctgcctaggggcaatgaaaactattctaggtgatcaacgaaaacagatgctccaaaaatacaaagaagaaaagcaacttcaaaaattgaaagagcagagagagaaagctaaacgaggaatatttaaagtgggtcgttatagacctgatatgccttgttttcttttatcaaaccagaatgctgtgaaagctgagccaaaaaaggtaaatttagtgtcttaatataaaggaatagtttcttttatttggtattttcttcaagacattaagtgactaacccctttcccttagtctcattattaactggttggtagaaggtgggaatgacataatagtagctcagaagaatgaaaatcaggtctcttaagatagctgtaggtaagttgagataggataaaactaggaaaattggtagaatcaggctgaacaatgttatgcaaaggatttggtgtttatcctgtaggttttgcagaatcaggagaagtttataaataagggtagtgccgttgtcaaattaataattcaggaaaataccatagccctaaagattttagtctggaaagggaagcatttatagatagggagaccaattgtgagactattgtaatagaatagatggaaaggggcagtgggttttaaaaggaaaaaataggtgtaagacatctaaataaaggcatttgacaggactggtggccaagtagatggtgaggggtaaaggaaattgaaaaagcagagagaagctctgctgctaaaagagataaggaagataaggaacaagcttaagtgggtgcatgttaataacctttttaaaaatcttaaacttgtgtgggccacctagatattagtaaaaatttggaaagaaggatggaaattggtgctaagatgtcgatttaggatataatattgggaatatggatgagtgtttaagctgtaggactaaatgagaccattccaataaggatatataaaattatgaaaaagtgggctctagagagcacttttaggtaggcagaagccaggtaccaggctgaggactggtcagagaggcaggagaactaagagaggatagaagctcatattaatgatgattccaatacctggaaaatacggtttgaaatttctttctcactgagaaatgtgagtaatttttgaagttactaacttaatttaaatcaagctagaaccagaaaaaggaatttaagtatctttttgctataagagattaaggataaaatttaactttaaaatgggaactttattttgtaataagatatggaagtaaacctttaccagttcatattttaagttcatcttcttttgactgttctaaggctattccatcttctgtacggattacaaggtcaaaggccaaagaccaaatggagcagactaaggtatagttgatagtagataattgttactaaaatgataaattgcacttttttagtaagtaaattcattttaaatctagtatcagattcaaacataatgattaatttactagagttaacaggtaccaaagtcactgtttttagtatggtgatgtagagcaatttcacttaaaatatttgctccaacattccgtatgagatccatggcaaactgtctttgtgtcacactcttgttttgtttagtgggctcctattatgcattccaagttacctgcatgaaatgcatatggggaggaaagcacacagggtaggtgttataaacttacgggtcttcaaaatactgtaatagagatatcaggagggttactaaaacaaagtgaagtgggcaagaagggaaataatatgcctctttatcaggtgaggaagctaagttccacgtatgcatatatattttgcattgctatgatgttcctggtgttgtaggcttttggatataataaactaaattctctttgtggaacttacatgtaaggcatttaaaaaaatacataatatgccagaagatgataagtattatggaagagattttaaaaaggggagatggggtgtactagaaataggtatggggtagaattttgattgggcagttaaggaaggcctccctgagatgaaagccttttgagtgaagtcattatggaagtggagaagagaaccatgggaaagcgctttttatccaggagaagtattttctaggcaaaattaaaaggtcttgaagtgaaagtatgtctaggagtgtttaaggaccttcagaaggcaagttatagtgagctgtttttaatagcttgggttattagcattttccaaattctgtgattgtgaaaaaggatgtaagcttttttggaagcttaatggaaagcttttctttatctcattttatttggggtagttttttgttgttgttgttgggtcatttacgatgatcagatttcatatgaggaatcaatttacagattaaaaatatgatggtctgattcattatgcaattaaatcacatagcacctaatctcttaaatagattgataacgagagtgatgttcgagcaatccgacctggtccaagacaaacttctgaaaagaaagtgtcagacaaagagaaaaaaggtaggaatattagcaattactataaatcctctgaggctaccacagccataattttttttaagtgtcttgaaggtcaactggaatttgttcgtttgtttgtgacagagtcttgctctgttgcccaggttggagtgcagtggcacaatcatagctcactggagcctccacctcctgggctcaagtgatcctcccacctcagcctcctgagtagctgcaactacagacttgccaccatgcccagctgatttttatattttttgtagagacggggtctcactatgttgcctaggctggtttcgaactcctgggctgaagtaatcctcctgcctcccaagtagctgggactacaggcattgcactaccatgcctggcttcacagcaataatttcataactacaagggacatttgatgtagttatttttttttcccacagttgtgcagcctgtaatgcccacgtcgttgagaatgactcgatcagctactcaagcagcaaagcaggttcccagaacagtctcatctaccacagcaagaaagccagtcacaagagctgctaatggtgagaactattccttgatcagtgactgaactagaatgtttggtccttgaggtttttgtgttccgtttcaaaaatcaacaagtacttctttgagtaggagagaaggaaacaggaaattctaatacctgaaaatagattctgtgccctgacatctggttagcacacaatgggtgcccaatcattgaagaccttaattagtataagcagtgtttcaaagtgaaaaattaatggtccgagtaaatcacagttcatttatttggtgcaatacaacgtagccattaagaataatattattaaagaacacttaatgacatggttcatgatatattaagtgggcaaagaaaagcaggtcaaactctgaacagtaggatcgcagttctaaaaagcattatgggaatatgtggacataggactggaaaaccataccctgaagtgacagctgagtaatggaatcctgggtgatttgtcattattgttctttgtagttttctgttatttttctaattgtctgtaataaatatgtacaggctgagcaaccctaatcaaaacatccaaaattctgagcattgacatgaagttcaaaggtcatcctcaaaggaaatgctcttggagcatttcagattttagatatttgtatcaagtatgctgaacctgtaagtataatgtaaatattccaaaatctggaatctaaaatatctctggtcccaagcattttggataagggatactcaatctgtatttggtattcagatgaaaagggtaaaacactctggttttgaaaagagatggtttgtatttggcaggaaattccataaccctttttataatatggcttttaataaaaaaatccttcaagacatatattcctactgttgcttcttttcctttcccaagttacctagtattttcatgtagcatttctatctagtaaaataaatattttattgttgttttagaaaacgaaccagaaggaaaggtgccaagtaaaggaagacctgccaaaaatgtagaaacaaaacccgacaaggtagagaataaacatctttttaattctagatgctttgaaaatctcattgctactttcataaagttgaaattaaacataaagaactgcttcaaaaggttaacctacatgtgtgttaaaacttcctgaaccataagaaagcatcaagaggatttactcttgttatttttcaggtatcttattttcagagctttataggtagagaaagcataattttgttagaagatggagaaaaataataaaaacacagctgagagaaacctgtatgtgggaattagccaagacatagggtgaagtggggtgaaatgcattgactttggattcatttaggcctgggtttgaatactctctctgcttccaattagttgcataaccctgggcaagttatgtagtttatgagcttcttttcttattcctaacatggaatacctgcatagagtagttgtaagaattaaataaactaaaatttctgcctgcatctagcatggtttctaataaggtcttcaaaaaagatgccccatttgaggacccaaccccttggcctataatctatgatatagtttattttcttttattttattttttgagacagagtctcactctgtcgcccaggctcgagtgcaatggcgcgatcttggctcactgcaccttccgctccccgggttcaagtgattctcctgcctcagcctcccgagtagttgggattacagacgtgcaccaccacgcccatctgatttttgtatttttagtagagacgaggtttcaccatgttggccaggctggtcttgaactcccgacctcaggtgatccacctacttcggcctcccaaagtgctgggattacaggcgtgagccaccacgcctggccagtataatttcttaatttaaaaaaagtaccaaagattaagtaacctggctagattcttagtaaaaaatcaaacacagatcaagaaaggaaacacacagtgaatcttcacagataaagcagctggaccttataggtccccccttaagattaacccttaaggattatcactagtttttgctttgactgccatgctggcttcaacagtgttaccacttaaactcttgtccaggttgaaatacctgggtttgagttcatatcttattaaaaatcagaaacctggaaacctctagaaattatttaaataccaagtaacaaattgacttgaaatagtaaatatgctttgtattttatatggttaatcttttgtgtcacattgaaagtattgctcttgtgttaaggttatttataatctaaggttatttaacttaagaatttggtccttaatgatagtcattccataatgttagatttctgattttaaaccattgtaattatcaacataattttttttttgagacagagtctcgctctgtcgcccaggctgaagtgcagtgacacgatctcggctcactgcaagctccacctcccggtttctcaccattctcctgcctcagcctcccaagtagctgggactataggcgcctgccaccacgccccaataattttttgtatttttagcaaagacggggttttgctgtgttagccaggatggtctcgatctcccgaccttgtgatccgcccgcctcagcctcccaaagtgctgggattacaggcatgagccaccgtgcctggccgtaattatcaacataatttaagtaaaaagatacgtatttgttgaataagtttttccatattaattttccattatcttttaatttgttgtaatacccaaaaggtattagttagtctttaaataagaattggttcggggtgggtgcggtggctcccgcctgtaatcccagcactttgggaggcctaggcgggcggatgacgaggtcaggagattgagaccatcctggctaacacagcgaaaccccgtctccactaaaaatacaaaaaattagccgggcgtggtggcgggcgtctgtagtcccagctacttgggaggctgaggcaggagaatggcgtgaacccgggaggcggagcttgcagggagccgagatcgcgcgactgcactccagcctgggcgacggagggctactccgtatcaaaaaaaaaaaaaagattctattcccgggtaatagcaatggatttagcgtaactggtcttctgattccatgtatacacttaattgtatctgtttttgtctctcaaattatgtacatagaacatatatttctgttgtcatattttcagacctataaaaattggttgaatatatcctcagaagagagaaatcttactctactttgttaactcacatcctagggtatttcttgtaaagtcgatagtgaagaaaatactttgaattcacaaactaatgcaacaagtggaatgaatccagatggagtcttatcaaaaatggaaaacttacctgagataaatactgcaaaaataaaagggaagaattcctttgcacctaaggattttatgtttcagccactggatggtctgaagacctatcaagtaacacctatgactcccagaagtgccaatgcttttttgacacccagttacacctggactcctttaaaaacagaagtgtaagaatatgatcttaataataagtctcttgctaagatgggtaataaatgcctttcttttttttttttttttttttttttttttcagacggagttcgctctgtcgcccaggctggagtgcagtggcgtgatctcccctcactgtaagctccgccacccgggttcacgccattcttctgcctcagcctctcaagtagctgggactacaggcgcccgtcaccacgcccggctaattttttgtatctttagtagagacggggtttcaccatgttagccaggatggtctcgatctcctgacctcgtgatccgcccgcctcggcctcccaaagtgctgggattacaggcgtgagccaccgcgcccggccaaatgtctttcttatatttggtctatgctcttaaaaagttattattagtgaactgtgttaattaggaatcatgcaatttttttctttaaaaaaaattcttcagaaggtacaataatgtaattgacagtttttatatttcctatgcattgttattttcactatacaatttgggttttttgtttttaataaatgacttaattataacacatacatttttcaaaagaagaaaattgctatactgctttagctcagatacgactttttcctcattttcttctggcttagtatttagaaaaactggccctgaagacaaaaatgattaatttgcaaaacaagggaaaaatcagttggaacctttaaaagaaaaggcaagatcattttgcaaagactggctggcagcaaatatactaaaaactgctcagcagcatctaagactgttaagtgtttatgttccattaagaaatcttcaaaatctttgaatctgattacaattaattagtaaaaatggacattcacactataggtgtttacattttctcccctccagaatacacattttaaaaaaatagaaacatttctattttagcccagatctacaagtgacacaattttgaaaccctttatattagatatatggagttcatgtttcatgaagtatatttttgctattgtttttagtgatgagtctcaagcaacaaaagaaattttggcacaaaaatgtaaaacttactctaccaagacaatacagcaagattcaaataaattgccatgtcctttgggtcctctaactgtttggcatgaaggtatagtatttaattaatttattcattttttagaataatgttaatacaaaaaatattttgctttcaggtatagtaattacatttttacttttctggattattacttgtcagatttgtttggagctctttttcaccatatcatttggggatgtgaactcagggtcagaaaagacgggaaagcatgggtaaagatatctgaagagaatattggaatgaagaatacagacagaagaggggaaataaatgtaaatttaaagaaaaaatattgagagctactttagaggaaatgtgaagtgattgaggcagaaataaaattttaaaattaaacattgaaaaggatttttaaaatgtctttttaggggctgtcattttaggaattgttgctttgaaatttatatgtaagattttctttaatttatagaacatgttttaaataaaaatgaagctactactaaaaatttaaatggccttccaataaaagaagtcccatcacttgaaagaaatgaaggtcgaattgctcagccccaccatggtgtgccatatttcaggtatgtctgtgtgtttctagtgtaagaattttgtattaatatctagacatttaaaaccaaaactaaaaatttttaaccttaatatagtgggggaaaactggtgttaggtgattttcacgtttaaattttaattatttttttgataactagtacattcatgtggttcctaattcaaagggtaggaaaaggtacaagtgagaagacttcttctcagcactgtgacccaaccacatagtttgaacctttcatgaaggcaagtgttactcatttcttgtgaatacttccatggatagttcatgcatatgtagacaaatataacatgtacatttttttcttttttaaaaaatatggacaataggctgggcgcggtggctcacgcctgtaatcccagcactttgggaggccgaggtgggtggatcacaaggtcaagaaatcgagaccatcctgtctaacatggtgaaaccccatctctactaaaactgtaaaaattatccgggcgtggtggtgcacgcctgtagtcccagctactcatgaggctaaggcaggagaattgcttgaacctgggaggcggaggttgcagttagccaagattgcaccactgcactccagcctggcaacagagtgagactccatctcaaaatatatatatatctatatacatatatatatcggggaatctgccctgatattcacgtaggttcttttctgttttccttaagcattggccagcttgagaagtaaagggacagagtacaaaaagaaattttaaagctgggcatccgggggagacatcacatgtcggtaggttccgtgatgccccacaagctgcaaaaaccagcaagtttttattagggattttcaaaaggggagggagtgtgcgaataggtgtgggtcacagacatcaagtactttacaaggtaatagaatatcacaaggcaagtggaggcagggtgagatcacgggaccagggcgaaattaaaattgctaaatgaagtttcgggcaccattgtcattgataacatcttatcaggagacagggttttgagatcaaccagtctgaccaaaatttattaggcgggaatttcctcttcctaataagcctgggagcgctatgggagactggggtctatttcacccctgcagtttcgacagtaagagacggccacgcccagggggccagttaagagacccacccccaggtgcgcattctctttctcagggatgttccttgctgagaaaaagaattcagtgatatttctcccatttgcttttgaaagaagagaaatatggctctgttccgcccggctcaccggcggccagagtttaaggttatctctcttattccctgaacaatcgctgttatcctgttttttcaaggtgcccacatttcatattgctcaaacacacatgctgtacaatttgtgcagttaatacagttattacagggtcctgaggtgacatacatcctcctcagctgacaggattaagagattaaagtaagtaaagacaggcataggaaatcacaagggtattgactggggaagtgataagtgtccatgaaatctttacaatttatatttagagattgcagtaaagacaggcataagatattacaaaagtattaatttggggaactaataaatgtccatgaaatcttcataatccacgttcttctgccatggcttcagccagtccctccgtttggggtccctgacttcctgcaacatgtatatatatatatagagagagagagagagacaacatatatctatagagagagacaatatcatacaatacacactattctgtttgcaaatcaaatagatgagaagtaagtatctcattatagttttactattcatttgttctattataaatatactttttgagagtgacttcatttctttcttttcttttgttttgaaatggttgcactctgttgcccaggctggagtacagtgatgtgatctcagctcaccgcagcctctctgtcctgagctcaagccatcctcctgccagtgggtggctaattttggtgtgtgtgtgtttttttttttgtttttttttttttttgtagagacgggggtcttatgatattgcccaagctggtctcgaactcacaggctcaagcgatccttttgcctcagcctcccatactgttaggattacaggcatgagccactatgtccagcttaatttcttttttagagcactgggttttagaattataagggattttagaggtagctaatccattgtgtcattccactgagttattgaaatattaagcaatctacctaactagataatgtcagaactaaaccatttctgctatctcttctttttttttttttttttttttttgagacggagtctcgctctgttgcccaggccggagtgcaatggcgcgatcttggctctttgcaacctctgcctcccaggttcaagcaattctcaggcctcagcctcctgagtagccaggattacaggcgtgtgccaccacacccagctaatgtttatatttttagtagagacggggtttcaccatgttggtcaagctggtctcgaactcctgaccttgtgatccgcttgcctcagcctcccaaagtgctggtattacaggcgagagccaccgtgcccgaccctctgcctccttattaatcgtcatgttgtgtcattgaatatgaacaactcaaattttttgtttttgtttctgttttttgagacagggtctcactctgtcacccaggctggagtgcagtgtctcgctcttggctcactgcagccttgacttcccgacctcccacctcagcctcctgaggagctgggactatgtctgtttctagcgtaagaattttgtatttaaaaaaaataaaaataaagaattttgtactaatatctagacatttaaaaccaaaactaaaatatttataaccttaatacagtggagggaaactgatgttaggtgattttcatttatcttttaaatacttttttttttttttgtatttttttttttaagtagagattggttttcgccatgtttcccaggctggtctggaactcctaggctcaagtgatctgcctgcctcagcctcacaaagtgctggctggaattacaggcatgagccactgagtctggccctaaatttttttttttttttttaaagaaacaaaacctgccgggttcggtggctcccacctgtaatcccagcactttgggaggctgaggcttgcagatcacctgaggtcaggagttcaggactagtagcctggccaacttggtgaaaccccatctctactaaaaatacaaaaattatctgggcgtggtggtaggtgcctgaaactctgtacctactaaaaaataactccccattcctcagccattccctcctagcccctggtaaataccattctactttctgtctctgattttgactctgctaagtatcttatttaagtagaattatgtagtatttgtcttgttttactggcttatttcacttagcataatgtcctcaaggttcattcattgtagcatgtgtcagactttcctttttaaggccgaataatatttcattgtatgtatataccacattttgcttatccctttgtctgtcagtggacacttgggttgcttccatgttttaactgttgtgaacagctatgaacatgggtgtacaaatacctctttgagaccctgctctaaattatcttgggtgtatacccagaagtagaattgctgggttgtgtggtaagtctatttttaattttttgaggagctgccatactgttttctacagtggctttgccgttttacattcccatcaacagcatacaagggttccagtttctctacatgctaggatactttttccatagacacaaattaaacttcttttaggcctgggtttctcaatcttagcattattgacattttagattgtatacttgttgtgggtatatatcctatacatcgtaggatgttttgtagcatccctggccagtagcactcctccagtcatgacaatcaaaaatatttccaaacaccaccaaatgttccctagaatggggcaaaattgacccagttgagaaccactacctttaagcaagcaaagcctaataattaggatctgtgaggccccatcactataatcctgggattaacagtttttagctttaatttactcttgacagttgagttggctttagtttcatagacaatgctgagaatctgatgcacatttaggaatgtctgactttgatcaacctctgaaaaagaacagaacaaactagaaatgttagcttaaaaagtaggttcttggtattatccagccacataagttttaggtataaaaggatgtacatacaaagggtatcaacttgtatttatggattttaatatatcacagtttataaataattcagtatcaactttgggaaaatattgtggctcccttttataacttcctaatgttatgtatcatgatgttatgctaatacttagctactagtgtaaaaaccacttgtagaactgaaatgtatgtcataattttagaaatatcctccagtcagaaactgagaaattaacttcacattgcttcgagtgggacaggaaacttgaattggacattccagatgatggtgaggcaacatttgtattttttgtttgctttgtttcttttactatggttacgtttatctgaaacataaaaatatagcattgcctaactttattgtttcattatcattcaaagtagcaagaattttttcttttttaacttgatgtctacaataaagtagcaagtgtttttcatatctcaacatatgttccctaacatctgtgctaaaatggtatataacttaaaagatgtaagtaattagaatattgactgtcgttcctttgacttagacatttttctaaccaaccaagcaagtaacagtgaatattattagctttttaaatatgactttatgggtgatatcaattgatatctgatattgtttacacaaaaatatactctgaatgaaaattacctaaatcaatatggaaaagattttctgaagagtttcttaatctgatttatttgggaagctgtttagaaaaaattatgtgctgtcagtatgaagtccttcttagataattatttgcagtgagttgtttgacgttgagttttttttttttaatttatttattattattattattttaagatgagtgttgctcttgttgcccaggctggagtgcaatggcgccatatcggctccctgcaacctctgcctcctgggttcaagcgattctcctgcctcagcctcccaagtggctgggattataggtgcctgccaccaggcccagctgatttttgtatttttagtagggatggggtttcaccatgttggccaggctggtctcgaactcctgacctcaggtgagccgcccaccttggcctcccaaagtgctgggattgtaggcatgagccaccgcgcccgcaggcatgagccaccacaccggctgacgttgagttcttataaagtacaacaagaagtagaatgctatttagtatatagcaatatgtatgagaaaatattgttaattttgagcaggaattgaagcaaatagttagtactcagtatttgtatgacaaagttttgtggtagatattttttgttttgcttaacaacctgtaggccctaggatgtttggagtgaagtcttatcagtgggctgacttgcaatgaatgtcccgttttgtcctttaattttaaaaaatctcttatttccttcagctaaagatcttattcgcacagcagttggtcaaacaagactccttatgaaggaaaggtttaaacagtttgaaggactggttgatgattgtgaatataaacgaggtataaaggagactacctgtacagatctggatggattttgggatatggttagttttcaggtatgtggttcaatatttcaaatatattaacttagggcttttttttttttttttttaagtagcaggagtaaaatggggtaatagtagctgcttatgtacctgtaatattaaataagatgttataaagcactttgataaactgtaaaacatgatctaaattttatgactgatgtcctcttctcccatatattctcaggataattttttttttttttttttttttgagacggagtctcactctgtcacccaggctggagtgcagtggtgtgatctcggctcactgctgtctctgccccccaggttcacaccattctcttgcctcagcctcccgagtagctgggactacaggcgcctgccacctcatctggctaattttttgtatttttagtagagacggagtttcaccgtgttagccaggatggtctcgatcttctgacctcgtgatccacccacctcggcctcccaaagtgctaggattacaggcatgagccaccgcgcccggccaggataatttctatataggttgaaaactgaaattattttcaactctttaatagtctataatgattcgacctgtgagaaatgagtcaactggcctttggtagttgagttcagctaacagttactgagttcctgttgtgtgcccgtattgtattaatctcttattgtgttaggagtattgtattaggagttgataaaatagtgcattccctgtcccagaggagtttgtaatttgattagtgactgagatacaaaatataattctaacatataaattgctgtgatagaagaagttactaggaagatcagtaaaggtatgggggaagatgactctagcgttttgaacttattttagaaataagcatataaaatagcatttcaagaaccaacagccaacaatagacattgaaaaaagcttcaaacctaaaagaaaaaggccaaagcaaacatctaggaagagagctatttggatggacttttaaatgcaagtattcatattctcaaagagaccagacgtttcatctgtcaagtaaaaatacctgttagaaaaagaacattcagagaataaatagctctttgaagttaagcaatatgagaacagaaatgtaagatacaataggtagaatatgaagttaaggaaatctcagccaggcacagtggctcaagcctgtaatcctagcactttgggaggctgagatgggaggatcacttgagcccaggagttcaagaccagcctgcgcaacatagtgagagcccatctctacagaaaataaacttagccaggcatggttgcacatgcctgtagtacaagctgtaagacagaagagattagataagaaaattacatggaccagtccaggaaatatagccaaattataggaattccagaaaaagagaacagaaaaaaaaattggggagcaagtgaacaatgaaggagcctgttgagtgtttagcactgagtagacccacagcaacttacataattagatactgttatgtaactctgggataaagagggtaggctaaagcatccagggaaagaaaacaaattttatacaaagcatcaatggttagagtagcattgatctctcaacagcaatattatgaactagaacaatactctgaaaattctgagggaaattaacttccaacctggatttctataccgaaccaatcaagcatgagggtggaaaggcaattttcagacacacaagatctcaaagttcacctccttccatgtaccctttctcaggaaaatgagaatgtccttcacaaagatgagagagttacccaagaaaagaggagagtgggctccattcccagaaagaggcgagaccctgtctcaaccaaaccaaaaccctgagcaaacaaaaagcaaaacaattattaagtctaaagaaaacgttgtgaggaaggaaatggaatctcagcagctgtatggcccagacatgaatagtgtttagtcataattaagcattactttatgatgagtttttatatatttaccagttttcataatagttggttcactagcacccttcaattctgattgttagattctgtggtgatttttgtatcattattagttgcagatttaaaagtatgatatgtttacattgtttatagtcttttttttttttttttgagatggagtcttgctttgtcacccaggctggagagcggtggcgtgatcttggctcactgtaacctctgcctcctgggttcaagcgattctcctgcctctgcctcccgagtagctgggattacagatgcccaccaccacgccaggctaatttttgtatttttagtagagatggggttcgccatgttggtcaggcttgtcttaaactcctgacctcaagtgacctgcctgcctcggcccccaaagtgctgggattacaggtgtgagccactgtgcctggcctatagtcattatcttgactgatgctcatttcccagctttggcttagtgggagccacttcaagttggccattggggcacttttttttttttttttaaacacaaaagagctatatgaggtataatttacatatgataaaattcattcatttgaaatgtacagttcaatcatttttagtaaatttacagagttatgcaaccatcaccacaatccaaatttagaatatatatatgtatttttttttttgagatggagtttcactcttgttgcccagactggagtgcaatggcacaatctcagtttactgcaacctgtgcctcctgagttcaagcgattctcctgcctcagtctcccaagtagctgggattacagtcatgtgccaccgtgcctgtctaattttgtatttttagtagagacggggtttcaccatgttggtcaggctggtcttaaactcctgacctcaagtgatccacccgcctcggcctcccaaagtgctgggattacaggtgtgagccagtacacccagccagaacattttcatcagtataaaaagatgcctcctgcctgtttgcagtcaatccccatttctactcctagacctaggcaaccactaatctacttactgtctctgtagatttgcctttttttgggatatttcatataaatagaatcataccttatggtggtcttttgcatctggcttctttcacttagcatctttctgagttttatccatattgtagcttgccttgtgtacttcacacctttttactgctgagtggttttccattgtatggatatatcactattcaccaattgatggtcatttaaattgcttccactttttggtgattatgaataacctgtgaatatttccacacaaatcttagtgtggatgtatctttttaaatttctcttgggcagatgcctagatattggtaggtcatattgtaaatttatgtttaactttttaagaaactgcccaaactattttccaaagtgattataccattttacagtcccaccaacaatgtatgagtgttctgtttttcgacatcctcactaatacttattgtcttttttattatagtagcccccccttatcagcagtcttgctttctgtggttttagttacctgaggtatagtacaataagatatttggcagggaggagagaccacattcatataacttattacggaatattgttataattgttctattttattgttgattgatgtctatgcttaatttataaatgaaactttatcataggtatgtatgaataggaaaaaacatatatatagggttcagtactatctgcatttcaggcatcccctgggggtcttggaacagattctttgaagataagggggaattgttgcatagccatcctagtgggtatgaggtatctcattgtagggtttttttggggtttttttttttgttttttaagtcagggtctcgctctgtcaacccaggctggagtgcattggcacaatctcacctcactgcaacctccacttcctgggctcaaacaaccctcctgcttcagcctcccaagttgctgagactacaggcatgtgccaccacgactggctaatttttatatttttttgtagaggtggggtgtcatcatgttacccaggtggccaggtcttactcctgagctcaagcgatccacccttctcagcctcccaaaatgctaggattacaggtgtcaccatgcctgacctcattgtagttttgatttgaatttctctaatgagtaatgatattaagtatctttttgtgagcttattcgccattcatgtatcttttactgagatgtctgtgtaaatcttttgcacccatttttaaatttcattgtctttattattgagttttaagtattctttatgtattctggataaaagtcccttatgagaaatattatttgcaaatattctttgagtttgtagcttgacttttaatcctcttaatggcatgttttgaagtgcaaatatttttattttaaagttaaatttatcaaatttctcttttttttttttttttgagacagagtctcactctgtcgcccaggctagagtgcagtggcatgatctcggctcactgcagcctctgccttccgggttcaagcaattctcatgcctcagcctcccgaatagctgggattacaggtgcatgccaccatgcctggctaatttttgtatttttagtagagatgaggtttcactacgttggccgggctggtcttgaactcctgacctcaagtgatccacctgcctctgcctcccaaagtcctgggattacaggggtgtgccactgcacccggccattttttttttcttttatgttgtgattttgacaccacatctaagaactcttacctaaccacaagtcacaaagattttctcctgtgttttctcctaacagtcttacggttttagtacttacagttaagtctatgatccatttggttagtttttgtgtatggtatgagattgtgagtctaaattcatctttttgcttatggataaccaattttcccagcactgtttgttgaaaagactgtcttttccccgctgaattgtattggcacctttgttgaaaatcagttggtcatgagtgtaattctgagtcattttgacatttacttttttttttcctttgagatggagtcttgccttgttgcccaggctagtctcgaccttctcggttcaagcaatccccctgcctcagcctaccaagtagcttggattataggcatatgccacagtgcccagagacatttacatatttttgagggagagcaaagctaagaggatatgtgtgtataagtgcatagcatggagactaaaagcatggttaccaaactgttgtcagtggcgtaactcttcgtaggagactggaagtatcagaaagatggggattatatttccatcctattaaatacacttgtatcttttaaaatgagattatgtcaagaaaatgagaagacaaggcacagattcggagaaatatttgcaaaagatgtatctgataaaagactgttatccaaaagatacaaagagctcttaaaacccagcaagaaggaaacgaacaacccaattaaaaatgggcaaaagacctgaacagttacctcaccatagaagatatacagatggcaaatacgcatatgaaaagatgctcaacatcatatgtcattagtgaactacaaatcaaaacaacagtgagatactaccacatacctactagggaacagtgaaaattcaaaacactgccaacagcaagtgctggggagggtatggagcaatacgaactttccattcattgcctatgggaatgcaaaatgttatatccactttagaagacagtttggcagtcactcgcaaaactaaacatactcctaccatacgatctagcaattgcgctccaaatgagttgaaaacttatgtccatataaaaacctgcacacggatgtttttagcaatatagcagctttattcataattgccaaaacatggaagcaaccaagatgtccttcagtggaggaatggataaataaaaaaaaaattagattgtgttcacattgtgtaatttaagaaacaacatttaggatatcttttctaccattttagcattttagtcaaaaataatctaggagagttattcatgtatgatattctttatgtagattttggaggtttgtaagacgaaagataatgaaaaactttaccataaaaattatttgaacactaaattgagaatgactcagtccagttttaataactcatcatttctgaatcactatttttaatttttttttagtcttcagctcattcgtttataactttaatatggctagcattaatctggtaaacttgtgctttattaacagatagaagatgtaatccacaaattcaacaatctgatcaaacttgaggaatctgggtggcaagtcaataataatatgaatcataatatgaacaaaaatgtctttagggtaagtttgtgggttttatatccaatttttttttttttagttaaggaactgttatacatacatccaaatttctaatatagattcttctacttcttgtttttaagttttaaaaacatttaggtttagatttctcattattttacaaagttaagtctttatactacttagagtgtacttgattgcctttgaagaaagagcaaggaaatcgatcaacataaaatttaggatagttatgtctagagagaagaaaggaggggctgtgattgaattggggtacccagagggcttctaagttaccacatactggatatatgagtgttggttttattcttcttcttctttttttttttttgagatggaatcccgctctatcaccaaggctgcagtacagtggcgtgatctcagctcactgccagctccgcctcccgggttcacgccattctcctgcctcagcctcccaagtagctgggaatacaggcgccagccaccacacccggctaattttttgtatttttagtagagacggggtttcactgtgttagccaggatggtctccatctgctgacctcatgatccacccacctcggcctcccaaagtgctgggattacaggcatgagccaccgtgcccggcctaaaggttttattctttaaactgtacttacacattttgttataatagtaatagtagtaggtaacttatataatgcttagtatgtgtcaaatattattccaattactttatatatattaatccttacaacagtcgtatgaaatggatgctgttattcttgtgctttgttaacatgacagattttgttcttgtttctagtaattatctttctagtaatgtttttgaattcaaagtttttggtttgggtggacacttttcaaactaagcattgtcagtttttctttatgatatgagaaaaatgcctgtagttataaactcaggttgtctagattggtattttattatactatgtaatccaaataaaaactgtcttaaatcctatcttaagagtttaacttgttaaagtattgttttttaaaccttatttttaaaaaattcttttttttttttttttttttttttttgagacagagtttggctctttttgcccaggctggagtgcagtggcgtgaccttggttcaccacaacctctgactcctgagttcaagtgattctcctgcctcagcctccaaagtgctgggattacaggcatgagccactgcgctcggccttaaaaaatattttactaggccaggcacagtggttcacgtctataatcccagcactttgggcggctgaggcgggcagatcacctgaggtcgggagttcgagaccagcctgaccatcgtggagaaaccccgtctctactaaaaatacaaaaattagctgggcgaggtggcgcatgcctgtaatcccagctactcaggaggctgaggcaggagaatcacttgatcctgggaggcagaggttgtggtgagctgagatcacgccattgcattccagcctgggcaacgagcaaaactcagtctcaaaaaaaaaaaaaaaaaaaattttttttttactaataaagtctcatgacaaggaccctgaggacagtgactaaattgattgaatggatttcaaaactactaaatagtgaaggatgctacttcattattaaagctactgtgggtatttcttattaaggatttagtcctggaaatattaatatcatcagtgatgcagatcatggctatgtcctatagagatttgtaattctgcctgttatcaccaggtgtctctctcctactttattttataggctacctttaagattatcaaacaaagctaatcttttatactatacttggataccactccctactacctcttatttattaatccctcattccatcagttagtcttgttttcctttcctcccttttttccatcagtctttaaacatgtttaagtgtcttatcattgtttacattaaaacaaacctgtggtgtctgcttctccctttaattacttgtacacccccattttttctttctatccagtcactgacaagcatcctaaaatgttttctatactctattatttttgttcctttatttctccaactcattgcaattcagttttacccccctataactttagaatagttatctaaattattaatccactagttgcttaagttattaggcacttaattttaaattctaactcttctaggccaggcgtggtggcttaagcctgtaatcccagcactttgggaggctgaggcaggcagatcacctgaggtcagttcaagaccagcctggccagcatggtgtaccctgtctctactaaaaataaaaaattagccaggcatggtggcgggcgcctgtaatcccagctactcaggaggctggggtaggagaatcacttgaacccgggaggcagaggttacattgaaccgagatcatgccactgcactccagcctgggcgacacatcaagactctctcaaaaataacaaaaagtagtaaataaatctaacctttctgcagtattaaatatggtctactttttttttttttttatatagagtcttgctgtgttgcccaggctggagtacagtggcgccatctcggctcactgcaacctctgcctcccaggttcaagctgttctcatgtctcagcctcccaagtagctgggattacaggcgtgtgccaccacgcccagctaactttttttcttgtatttttatttttgtattttatttattttttgagatagagtctaggtgtgtggcccaggctggagtgcagtggcacaatcttggctcactgtaacctcagcctcccaggttcaagcaatctcccacctcagcctcctgagtagctgggactacaggcatgtgccaccttgcccagctaattttttgtatttttagtggagctggtgtttctccatgttggccaggctggtctggaactcctggcctcaagtgatcctcctgcctcagcctcccaaagtgcggggattacagttgtgagccactgtacctggcctacttccttgtttttgaaattatatttccttcttctttgcctattcttcagtcatatttgcatatttgttttccatttatcccttaaatgtttttgttatttagaattcctacctctactctcttctttccttccgtaattttcctgtgcaatcttacccaacctgtgatgattctcaagtctgtattgcagaccacacttactaagctctaattctatatatcatgactcaatataccttaaaaatcaatatatcccaaactgacagcatctccacacacaccaatgttgccctgtctcataatgctgttaccatcccaccaggtgttcaagatagaagtctcaatatctcttttgagatatccttttgagcgataccctttgcttgctttatttcaccatctccaccccacacacatccaatagatgagtaagtcctctcaattctacctttcaaatatctcttgaatctgtccacttttttcatctcttactccttagtctgagtgatctttctaaaacaccagcttgatgttaatcttctgcttaaaaattaccaataactctctgttcccttgtcctctgtgtaaatgtgactttcttaagaccattacatgcaggtgatttttattataatctagctattgtttaaatccacttttctttgtttcatttctggctttggaaacatctctctagcacttgcctcaccccatcttttagtttgatgaaatatggtttcagcataggtgctacttcctacaacctttcctgatgcctgaagattggtttaggtgtcatccttatttattttcttttaatgttttactttttttttatttactttttttgctttttcttttttatggggggggggtgtcatggttataatctaaaggatgtcccctaaatttatttctaacaggacatttatccttcttactattcttcccagatcttctactaagctgcaaactccttgagggcagcaactctgtcctttacctttttaccttttagcacatactaggaacttgataaatatatgatgaatgtgaaatattttatgtatactttatttttaaaaattaaatttttaagtgatgaatttgtgtttgttgtgtgtttttcttgtaagatggtaatgggcagctttactatgttagtttctctttgcagaaaaaagttgtctcaggtatagcaagtaaaccaaaacaggatgatgctggaagaattgcagcgagaaatcgcctagctgccataaaaaatgcaatgagagagagaattaggcaggaagaatgtgctgaaacagcagtttctgtgataccaaaggaagttgataaaatagtgttcgatgctggatttttcagagttgaaagtcctgttaaattattctcaggttagttgtttttgattttttattttttttgtttttcctgagactacttaagagaaatatttgggatagatgggggcttgtgtaaggtgaaaaatagttttttacatgaagagacataagtttttctgtgatttttagaaaatagactatgctcgctcacaaacactgtaaatcacattttgatgggtatgatcagattagtttaagtgcgataagtcttctaagattgcttttctactttctaagtgatttcacatctgtaatgtaattaccatgtaaccctacagtctatgagaaaggtcacaggatcccaagaggtaagagaaatgacggaagcatgaagaagtaaactgattttcttcaggtcagttagaagtttggttagaatttataatgcaaaggaaacttgagcatccagctatcacacttgtctagctgtgctttaaaatgaagcttatgtgctgtgtgtgttggttcatgcctataatcccagtactttgagagaccaaggcaggaggatcacttgaagctaagagtttgagaccagcctgggcaatttagtgagatcccctctctacaaaaaaataaaatattaaccgagcctggcagtacatgcctgtagtcccacctacttgggaggctggggcaggaggatcacttgagcccaggagttcaaggttacagcgagctatgattgtgcccctgcactctagcctgagtgacagagcaagactccatctctaaaaaataaaaggaagtttatgcaaagtggatttggttttatttgcatttgtattaaaacttttgctcagatctttttgaaaggtagtaaacgtactaattttccaatttaaaaatattccagtaaaagcagtttttaatattcaggaaatcatttttttgtgattttctcacagtgtttgtcatagcttttttttccacagactatttttcttgaattgaatttatctcaattgaaattatttatttataagccatagatgtccaccaggaagttttttcaaagtaaacctaaattgttctctaatacctgctatctgatatttatagtgatcctcaagtatattataatattcttgttagtttaggtatcaaatctggtgtacttttgtttcctttaagcagctacactccctggatacccaggaatctcccactactgctaataacatgactccattctactacttgtcaaggatcttcgtggtttttacagctataagctcatcattctgttctttcatatactcaactcagtccttatagatagggagattaaggtttatggcaaaaattggtcatttaaaattgagttttagttacagagcacatagttgatatgaggctaattacaaaacagtagtccctgaagaagcccttctcattccatttgccaatccctagaagcaactactttcaattcttactggagtcttttggacttactggagtcttactggagttttgttgtttaccaccatctctcttgacaaggtttgatctttttcaaaaacacatttttcttctggtagactttttaatctttctttcctgtacttactgttttcttctacttcctggagatttcctcaactttcatgctggctatcatgtttttaattcccaagagccctttcttactctccaaatgttcattttataacattctgcacttgtttcatcagtgtattgttttatctttccaaggatattaatgatagcttttatgttttcttcatccactatagacagtatttgtttcagggtactttcatctagttgtttttggtttctgtctcttgtatttagaggctttcctcgggaatctggtgatctctcactgcctgcacatggttaagaatagggcactaaaaagctgactggaaactctctgcacatgggtaggacctttactttcggggcccttctgttagcggggccattatgctgggaacctacacatcactgcatttaagacttttctcatagtctactcagattccccagagaagatgctttccatctgcttcctggaaggtatcattctggctgccagtctttcaggagccatgtaggggaagaaagctaagtgtctcaacactttgtgtaaatattcacttatttcccttattttccatgtagtaccctgtctctcaactgtatctggtatcctctaaaccagagacccttctgtttttggtgatgggggtgggtgatgacagttgctttgctgtgcagaatgaggaaaggaatctgagctcttcttgtttaaactgactttgagccattccttctgtgtttagctccattttcatctccacttgcagagatacttggagccaccagttcttttgaggggttatgtggtagaaattgggttgattctcatttttctttcttttttttttttgaggcagagtctcactctattgcccaggctggagtgcagtggcacgatctcagcacactgcaagctccgcctcctgggttcacgccattctcctacctcagcctcccaagtagctgggactacaggcgcctgccaccacacccggctgattttttggtatttttttagtagagacggggttttaccatgttagccaggatggtctcgatcttctggccccgtgatccacctgcctcagcctcccaaagtgctgggatcacaggcatgagccaccgcgcccggccaattcatttttcttgattggtggcttagaattagttttcttgagtctgctaagtcccactcaacaatctacattatagcttccaaaatattgttattgttgctatctcttctttagtttcctttgtccttgtagagttctgctttttaagattatctgtgtccaggcacggtggctcacacctgtaatcccagtactttgggaggctgaggcaggtggatcacctgaggtcaggagttcgagaccagcctggccaacatggtgaaacctcatctctactaaaaatacaaaaaattagccaggcgtggtggcgggtgcctgtaatcccagctactcgggaggctgaggcaggagaatcacttgaacccaggaggcggaggttgcagtgagccaagatcatgccattacactccagcctgggcaacaagaatgaaactccatctctaaaaaaacaaaaacaaaaaaaaaggttatctctgttcaggcctggcgcagtggctcacacctctaatcccagcactttgggaatctgaggcaggtggatcacctgaggtcaggagttcgagaccagcctggccaacatggtgaaacctcatctctactaaaaatacaaaaattagccaggcgtggtggcatgcatctgtagtcccagctactggggaggctgaggcaagagaatcacttgaagctgggaggcggaggttgcagtgagccgagagatcacaccactgcactccagcctgggtgacagtgtaagactctgtctcaacaacaacaaaaaaattatctctgttcatgtaaaagtagtgggatgtcaaaaggaagcagcatctaatatgcatttaaatactatctttaacagaaagtcccaggcatttgtctttaacagacattatttgacaggagaaagaggctaattgataggattttcaccgtattcctagttataatgaaaagcaaaagaactatttggtattgaggtgatttctctcatcttctaggactttctgtctcttctgaaggcccttctcaaagacttggaacacctaagtctgtcaacaaagctgtatctcagagtagaaatgagatgggcattccacaacaaactacatcaccagaaaatgccggtcctcagaatacgaaaagtgaacatgtgaagaagactttgtttttgagtattcctgaaagcaggtatttctttaacatgttaataagagtttaacagttgctgatactaaataccatttcagattgttaagatggtaaaaggtgccagacatatatttttaataaatttcataatgaccctgcaacatataggcagtactccctttttataaatgaggaaactaaagcttaaggtttcaggatactaaatggtcacgtttagttgggtaaattctgcagcagtaagaagaaaagaagcaatatggtatcctttggtgctaaacatactacaactttggtgctcaacagttctgagctgagaagagctctgtgacttactagctatgcaactttggggcaagtaattaattctctttagcttcactttcatcatctacaaagcagcagtgctaatgcctccccaaggtggttgagagatggacactttttaccaggctttgtagaaagtaccttgagattgttttcttgacagatggcagagcatattgaaggggggggagttaatgtgtactgaacaactgttatgggctagatatgcttctagatttttttgtttgttttttggaggtggagtctcactctgttgcctaggctggagtgcagtggtacgatttcggcttactgcaacctctgcctcctgggttcaagcgattcttctgcctcagcctcccgagtagctaggactacagacacgcgccaccacgcccagctaatttttgtatttttagtagagacggggtttcactatgttggccaggatggtcttgatctcttgacctcatgatctgccagccttggcctcccaaagtgctgggattacaggcgtgagccaccatgcccggcctactttgtatatcttgtagtttactattgtttgctaagaagattcataattgcatttgagtcataagtactctttaaaaatgttttggattccccaaaacatcctcaaagggcatcatacaaataagcaactttgtgtaataaaggcaaagtaaagctggacactagaaaaatagagcatatcttttttaaaaagtaacttgaaagaagtggagataaattttttttttttttttgagacggagtgtcgctctgttgctgaggctggagtgcagtggcactacctcggctcactgcaacctccgcctcccaggttcaagtgattctcctgcctcagcctcccaagtagctgggactacaggcgcatgtcaccacgcccagctaattttttgtatttttagtagagacggggtttcaccatgttagccaggatggtctcaatctcctgacctcgtgatccacccgccgctgcctcccaagtgctgggattacaggcgtgagccaaggcgcctggccaaaacagatatttctaataagatacaagctagtaacttcaggattagaataccttgtattctaactcaattattgtctagctggagttagctacatttacttgttaacaagcagcagacttaagaacattgtaactcctgttccgctttttgaactttcggataaaattatagaaatagtatgattgaagtcaagtttcttagcaggtacctggattaacaagtaacgagtaaatgtagctaactccagctagacaataattgaattgttgcttctgtctccagaagtcaccttctttttgacttttctttaatatatagctctggatttggctgagattcagagtattgctggtagagccacctgaccctgactgaccaccatggtaacagacttgtgagctttctggggaagaatgcatttagtttgtaaggccatcctgcagtagctatagtccaaaactaatctatctggatcacgcctgatcttgcaccaggctccatgtttgatccattccctaaactaattgccatcattaaaggaaagactcaaaatacaagtgaaacaataacaatatgtttatgagtgtaatgctgctttttttcttctttaggagcagcatagaagatgctcagtgtcctggattaccagatttaattgaagaaaatcatgtaagtacaattccagtgtggttagatagcccagtatgtcatatgtttatatcattatagaaagtaactttgtaaagcatccccagaatttccgttggaaatctaaatcagtcatgtagaattgtagttcttgtttcaatgacatttgggttgtttaaaaccatagtgtcattttgtattcttcaactcatatcagaatgaatatggaaccagtgaactagagcagaaatcagcaaactttggcccctatttttacaaatcatattttattgtaatagccacacatttgtttatgtattctatctggctgcttttgcaatacagtggtagagttgagtacttatgacagagaccctgtgactcacaaacctaaaatatttactatttgatcttttacagaaaatgtttgccagtccctgagctagagtataggtacttgctgagaaacttgccttcaatcatactatttctataatattatctgaactaattgttgaagaagcaggatagtaggatttataatgttcttaagactgtgtccgggatgtcatccttctgtttttcttgtatttaatagcaacaagacttttaaaatttgttccaagtaattaaattgataattaaatataatgccatttttacttccaggttgtaaataagacagacttgaaggtggattgtttatccagtgagagaatgagtttgcctcttcttgctggtggagtagcagatgatattaatactaacaaaaaagaaggaatttcagatgttgtggaaggaatggaactgaattcttcaattacatcacaggatgttttgatgagtagccctgaaaaaaatacagcttcacaaaatagcatcttagaagaaggggaaactaaaatttctcagtcaggtgagatatttaaaatatatttaaacgagcctttattaaagaaatgaacttggattaaggtataaattatcctataaggtccattttacattagatctaactattgaggatccttcattgttagtgaagaccctgaattagaacaattccctcaagattttttttttttttgagatggagtctcactctgttgcccaggctggagtgtagtcgtgtgatctcagctcactgcaacctccacctcccaggttgaggcgattctcctacacatgtaccaccgcgcctagctaatttttttatttttagtagagacagagtttcaccacattggccagcctgggctttttttttagttgtccttttcaacacatatccccaagtctttcttcaaaatatcctatttttcttccctactgcctagttctacctatattgttgtgatggttctgcaataggaaatggctcctatatttttgttataatgtgtgccagttttacctgccattttcatcagttagtctgtagctggtctaactggggcctatggtaaaacaaaaggttttaacctcggccagacatttaatgtcctccagctgttcttcatcagcattttctgggtacctttaatgttacaagcatgagatttgtttacagaagtctgcttttataccaaagttaaggataagaatttaactactttcaaaaaacattatagcataggggtctatatttttgtcttagcatttgatatgtggaacttttcatatttttcatggctttgtccatttctaacagccctcgaatgtgagaatattctttaaaaagtttttttttgttgtttttcagaactatttgataataaaagtctcactactgaatgccaccttcttgattcagtaagttttccaacttgacaagtccctttatattctagatttgttttataaaatgaatattgcttttctatttgtgtacaaggcttaaaatgtatatcttgtcattgttttgcttactcactcttcatttttcacagaatgaagaaaaatttggtgtttatatactttaaaatatagtatgttttaatattaaccctgaagatatgtttttctatatggtttttctatcaaatttgctctgacaaactgggtacttgaatatctgaatatatttctaagtgattcaagaaaaatataaggcaaagtttctgcccttctggggaaataatatctatcccaccttcagtcatcattggttatttatgtcctgctattttagtggctacttccctgcttttacttctggtgacctcttgcctctaaatctagttcaaacagcccttttgtgaagccttctgtaaaagctcttatctctctcatgttaatttatatataggtacagatgcacataggcatacagtgtttacatttcatctcttattcagggtataatatgaacgcattccaaaaatataacttaaggaataaaattccttattaactgtaaattccacattaggtagagctgtctgattcatacctttgatactggcactatggcacgaattaaatagtgctctctttcctgctgtttatatatatagcattggtttcagccccatcccagactttttttttttttttttgagacagagtttcactcttgcacccaggctggggtacaatggtgtgatcttggcccactgtaacctctgcctcctgggttcaagcgattctcctgcctcagcctcctgagtagctgggattacaggtgcttgccaccacacctggctaatttttgtattttttagtagagatgcggggtttcaccatgttggccaggctggtctcgaacttctgacctcaggtgatgccccccccccgccccgattctcaaagtgctgggattacaggcgtgagccaccgtgcctggccgatatttttatttcaatgatctggagttagggatttgtcatttttttcttcatcaagtgattcttatggtttacacctgtggttacagccttaccttggaattttccaggactaattactagaatagatcagaaaacggtcttggttttattcttctttaatctcagaatatgagaaattcattcataaagcaagtataggatcaaacaaccacagttttagttaacttcatgaaacctggcaaatacttagcttccataagccacaaattccttaaagacccttgtatatcttgtctttcattatttttcaaagctgccttttttgtggtcaggctctgggctgccctgtgtctcaggagcagaatgaaatgtgttactgtgacccacgtaccattctttcttggttttagccttctttaatcataaactgagacctagaggatcagggctttcagcataaagccaacttatgtaaacctgatttaaccctgttcccagatcgaaccctgaatgattgattctgagaatgtatgttgttataagtaaatccagagattaccaaatcgtaatattttaatagtaatgtgattaagagtacatcacaattatcttatatgttctcattgttaagtcttaataccttatcatttagtctgatatttttttcacttctgtaaatattagtatttagatgtctattttagacccaaattattggttgccccagtagcataatttgaacttgaagcagggcttgagggagtaaaaagatcccagcaggatcacacagtattaaaaggtctattaagtgctattatatggtttaggatttatggaatctatgtaagtggcttaagatacagcctcagttttattcattctgcatacactgcttgagtccatttacatattattcacatttttgtacatatattctgaatatacctttccaataaaaaaaactgtaatatacatttgaaataagatctactggaaagtagcataatcattgttgtttataattttattgttatatagggaaaatgtttacgtgtttcttgtttgtttgtttttgaggtgggatcttgctatgttgctcgggctggtcttgaagtcctgggttcaagtgatcctaccacctcagcctcccgagtagctgggactacaggtgtgcaccaccgcacccggtttatttttgttattaattaatccactatagaatgttgaagaattaattggtgaaactcttgatggatactttactgacttctctggatttgttctccagccaggtctaaactgcagtaatccatttactcagctggagaggagacatcaagaacatgccagacacatttcttttggtggtaacctgattactttttcacctctacaaccaggagaattttgaatttaaaaataaatccaaacattttccttcatattatcaatgcttatatattccttagactattgaaattttggagaaaatgtatttgtgttcacttctatagcatataatgttttaatattctgtgttcatcaaagtgtattttagatatactctttctcaagggaagtggggatattttgtacattttcaacacagaataaaaaatgtactgtgccttg

SEQ ID NO: 76 - DNA, 5506 bp, Homo sapiens
agtctccggcgagttgttgcctgggctggacgtggttttgtctgctgcgcccgctcttcgcgctctcgtttcattttctgcagcgcgccagcaggatggcccacaagcagatctactactcggacaagtacttcgacgaacactacgagtaccggtgggcgcctttcttagaccccgagccggctccctcagccggggcccccgcgggcggggcgacccaggcatagtagggtcgggggtgggggccggggcctggggggcggagcccggggccggagggcgagggccggggtttggggtcgcggccacctggcgccccgcgcagtcggacatggttgggtgcctggccgcgccgggccggttgggcctttgttcggtgtgcgcggagggtgagggaagagtgcccaccgggccgcatttagtacctgggtaggaaccggcgcaacttgggggtcatggggtcctcggcgacgcggagtgaccatcccgtcacttttttctcggccgtggccgaagtaattaggccgttcagtagctggtctcagttccagttctttgaaccagtccaggaaaacccacctggtgccgtcctttttcctttagcaaccgtgacacactttccctgtcgctgacggggtgatgcagcttttactagtttgtggtttagaatggtcaaatggtcattttcatctgttaacacagaggaacacttttctttttcttgtttttgaagtgagtggtataagaataagctttggaggcgaccccccgaaaaatgagcttgatggggattcgaaaatgtttactgggtatggtgatttgggccattataggttagccgcagtcatacaattgagggtattattaaaggagtttcattttaaggccgattaagaacttgagtggactttgggcatcattttctgctagtatacactggccaaattttgggctttgagaaacttttgcgtttgagtcctgaagcaccgtactagaacatggtggctgtaatcgatcagtaaaattagacaaattttaaatgtccctgtccccttccccccaattaaagtagattgggggaaagcgagtagggacatttaaaatttgttgtccttactgtatgcgggacacttcatttagggcgtggcttcagaaaacagtcaacccctttttcttaactaggtagcgactagaacgctgcgttctgggatactaccaagatttaggggagataaagcccatgccatcgttggccaaattgtgaccttgttttctgtctgctgcctttgtaggttagatttctccgaatgctatttaaggaagaaagaacaaaacagtgggtggtttctctttttctccccctccctagtagcatggaagtctgttttcacatgaggactactgaatatttctatgggtagtagtaattgcacccttttgtattcctagctagaaaaatagcatgtttttctggctgtaggtaaatttcaagtagattgtgttaaccttatagtaataataaactatactcgtgtaatatgctggcagtgttcaattatgcgatgttaatcaagagccctattgaggatatccaataatgaacacaatgtaaaccgtaataatcttactaaaacctagaaaattattctgaaacacatctggtgccaagtgtttaggataaggatttaagggtcggtacaagtttcttttagggtataatattgaaaataaatgaagctatttctcagacttctttctgatggcagtaggtcgattttttagttttaatatactcaaatgatttgtgtgtggtaatgtatagaagaaagtttacatatctgaagtgatgtattttaatccaataaaaattagagctggtattaattggccaagccagtaacctttatgaaacaggatagtaatttccacacataattttaaaggggaaactagtaataatatagcactaaggcatgagtctagggtggtttgtattaatatgtaatggtgcagcatgcaatgtaaatttcaaaggctagtatttatttttcccagtgtgcagttatctctatctttctttgatttttcttaattacaaacttaatttcctagtccttttacgtgagggtcttaatgtttctaagggcataacagtgggtgcccccacccccacatcatggaagtctgttttcacaagagaaaaactgttaatttttctgggcagccttacaaattagtaatacttgcactattttgcatttcaactgaaataaacgttagattttggaaataattttccttacatgtagttagtttgaaatctctgtgtggcaaaatacaggtagaatcctcatatggggttgatgctacttaaacatttttcctttataaagaaaccctgatggaggagagcctgtttccgtgtttatggagaagggtggtaacttctatctaaataacttgttggtagatttatgtactctgtaagtttgatagaaaaggtacaaaagcactacatttctctttgagaataatcaacaagatagaacgtagaaataagataacagattatttgaagttagatgttaaagcagcatttcaagaatgtgggtgataactggtaagaattacaaagaatcactatatagttcactggaattgatgaaaactctacaaattatggtagtaagctatgacttggtggccttaaggcaatctaacaacacagtagaatttttctgaggctcactttgccctgcaaataaattggtacttaaccacagactaaaatttaagttgatgacagctgggtgcttatagcgggttagggattcagtttactgtgtctcagaaagtgaccagattgcacctcattcatccccagccagctgactcacagacagatatcttatactggttaaaaatttgggttggtggttatggatggttcagtataaaactgttgctactactgcaggtggtaaacatggagctgagaattgtgactttcataaagtcctttttatggtaattgagtaaaaattcttactcaatttggggaaagagatttgttaggcaaatctttgatagaatgctttgggatactgttaatgatacagatttgtttttgagaatctcgtaaggctacaattatacatattgatggtttaactttgaaggttattccatgcttgcctaagaaactgaacaatgtaagttttggatataggtcagtaaattaactggaaaacggtgaggttgcacacaatgtgtatgtacagttagtggttttctgtttttaattttgaacaaagtacttgaagtataaagcaacttctggagcatacaaggactagtagctactacaaagctagtgttgagtaagaggaaacccaaattaactgtaacttagattttttcgttacataaaagtctaataatctggggcagggataacagctttacagtcaaggactaggctgggtccttacctcttgttgctttaccgttctcaatttacagttgcttctatggtcctagattcctgctctggctccctgatcatattaatgtgcattcaacaagaaggagaaaaagagttcagcatgttctttccctttgagaacacttttcataataagttacacattttcttatatcttgttggcttatgatttggaggctggtaaccatatgttcaacttatattttggggttctcttcctgaagaagattaaggcaactggtaagcattctgtgataagagaaaaagattaatcctatggaaaatgctttctgcttttggattgtgcactcttagctccctaatttgaacataggccatcatatcagaattaaaggtagtagattgcagttctcaatattaaagcaacagagttccttaaggtacatgtataaagcgacagttgtagaaaaggcactggactaacacttggctgtatcttgtaacaggcatgttatgttacccagagaactttccaaacaagtacctaaaactcatctgatgtctgaagaggagtggaggagacttggtgtccaacagagtctaggctgggttcattacatgattcatgagccaggtaagctatgctatgttatagtaaagcagtaattgttgaaatattggtggttatggttgtcaaaattttaaaaatatcattgacatcaaatgatatctgaaagtaactgttctgataagtttttttttttaatgactaatttcttgactctggagagagttccaattttatggtaaataaaataccacagcagtgaaagtaacacattattctacttggaaaataatgtaagaagtaaaaaaaaaaaaaaaaaaatgtattttaaaatctgtatcattgttaacagtatcccaaagcattttatcataagtatatcctaagacaagtgttcttatctatgtgtggaaattgatttaatttaaagtgattcttcagccctctgaaaggatatataccacatgaagtttaaatgaggtaatagcatatgaactcaactgtgcttatgggtaccttatgctattatgtggtattaaccaaaagtttttcaggtgttaaatagtaaactctactaaaactttgtgggttttctagactaaaacagtgtgggttaaattttatatttggattatcagtaaatctaacagcatttataatgctttgaacaaaatttgaagacatactatagaagctgaagtaggtggaattaaaactatcttctactctgctgttaaagaaaagcattgcatcgaaaactctaaaaggactcatcactttcttgggattgagatacgtaatcctattagaattcagtccagataatacaaaagcaactgaagaacttaagtgtagatttctgtgccccacctattgaaacagaatctatggggatgagcattagtatgagatcctgtaggtgatttgaaggaggtgtttttccctataaagaggtaatctttttacttttaatctatttactgtagacagtaactgtgaaaaaaaaatcattttggatacctcaaaccaattaatagtggacttagtttattttattctggcttagttgagaatacttttgaatttctgttgagtatatgaaaatcatattaaaatgattcaaaacattttctttccacagaaccacatattcttctctttagacgacctcttccaaaagatcaacaaaaatgaagtttatctggggatcgtcaaatctttttcaaatttaatgtatatgtgtatataaggtagtattcagtgaatacttgagaaatgtacaaatctttcatccatacctgtgcatgagctgtattcttcacagcaacagagctcagttaaatgcaactgcaagtaggttactgtaagatgtttaagataaaagttcttccagtcagtttttctcttaagtgcctgtttgagtttactgaaacagtttacttttgttcaataaagtttgtatgttgcattta

SEQ ID NO: 77 - DNA, 97303 bp, Homo sapiens
taaacttggccgcggttgccgcaggaaggctagccagagggtaattacacaggtgaggcccggcggggcgggcggagggctcgggaggcgcaggggactggaagagttggctgcgcccaggcaccaggtggaagaatttccataccagccctgcggaggtgcctctgtttccagaggcgtttttgtacgaaggggttagtttgtgttgctcaaatctttttcttcttcttgcctgtacctccaggttataaatagatcctgttttggttcagagactgtgtcagaaggacacattggcctggagagcacagaggcagggaagggggtgctcgatccggaggagatgggggaggcggtgcagagagttttgcttttttcagaccagccgagggtgctgtcaccgcagttggtgccaggaagaggcctaacttaacagtagtttacttgcaaggtccgggtattagaatagggccagattaattttatttttgtctctttcagcattttgaaagcgaagcagaagccgtagaatcagcggcgagcctgttgaaagaacccacaggtgcatttcacagcactctgggcgaaaattggatgtgaaaatgaagccagaccgaggtaaatgatttgtttaagtagggcttgttcccccacccccttcttttctatgcctcaatttagaagtgttaacctaattctgcagtaggatcaactatttctgtatcatatgtgattatctgtttttgtgacagattccagctggtgaggtagagaaaggcatatggaagagaaggttaagcgtttttacaaaagtgcttctgaagcactagcttcaagagagattctagtgtatctcaaaatgaaagtaaagaatggtatttgtatctgttgccacaatacaggtatcattttagagttgtacttgctcgtttttaggtagtcaatctaacttcaactttcaagaagttcataagctttttaaacttgaatgtgaacttgataaaatgaagagaaaacttaagcttgagttgacaactgttattttattactactttgattagttgatttttgtgctttaagcaaactccaaaagtttgcagagtactccagtattcaatataccagcatatggacagtttgggccactgaaatccctggtgataagtaaatgtcacttcttttctaaacctgtattttcaggatttataagaataatatatacactgcttttcaaggacttcaaggtaattctttatcagtcttctgattaatggcaagaaccaattttagaagatgttaatatagtagtggttagtagtgagagcttttcagtcagatatgagtttgattccaaggaacattgtgaagtggggattattttatttggtagggggctggactagatgacagatttccttccaaatccaagtctttaggattggaaatgttaatttatcctacgaattagatgcttattttaaaatttatatatattaaactggttgtttttccatatattttttcaaagtgattagacaaattttctgggtaaaataggtctattgaaatgcaccagaaggaattggagaaaaccatacttaatttagtgatttaaattagttttaggtgttggctattacatacaatcaggcagcagctatgtatgtatcaagtattagtaagtgtattgctcctgagcaggttccttgtgtagaatgccaagtttagatttttagattacatcaatcactttggaaaaatggcaccaaggttagtaattgattctcagaataaacaagcaaataaaatcaaagtcactatttattttgaattgttgtgaaaagttgctttacagtcataagcagttttaaaaatagtatttgcagccaaaactagtgttaaacacaataaaatgtttagttacgtactgatatagatttttaggggaaacaaatttattcatcaagatttccaaagaagttttcaccttaaaaattgtagctttctttagcattctcaggtaaagatgatgggattgtgagtttagtattgtgattatattccataataataacataaacctttagacccatggctttttttttcttttactaaaaccagtgtaagtaatcttttacttagcaaactagtacagaaatattgaaataagcttttcacaaacgtacttacccttactgtgcgcaatgtaatgttgtattttctattctatttcacgttttgaaaaattgctgtcaccacccattgaattgatttcttcaccaattaatgggtcatgatgacctgcaatttgaaaggcagagttatggacaactcttaacgagaaaacagttacacttcatttttttttttaaactacattggtgtccaaagaactatcctatataaatgaattttctggataattgaaactttttaaacgtcaaaatatttttagttgtaatcatgatatgtggagacatttaaaaaatgttcacgcttctggtttgagatttttttgtctctagtttaaaccatctcagcctatctttttttattctgatttttatgttccctggctgtcaacagtttttgttgttaatatatttatccttgtcaccttttaattttcctgcttttagtctctgagctagataattagataaccgtacttaacactaagttttctctctttttttttctttttcttttttttttttgagacggagtctcgctctgtcgcccaggctggagtgcagtggcgcaatctccgctcactgcaagctccgcctcccgggttcacgccattctcctgcctcagccttcggtagctgggattacaggcgcccgcctccacgcccggctaattttttgtatttttagtagagacagggtttcaccgtgtaagccaggatagtctcgatctcctgagctcgtgatccgcccgcctcggcctcccagtgtgctgggattacaggcgtgagccaccgcgcccggcctaacactaagttttctataagatgaacataaataggagaacttctcagatgctcattcagagtgtgagtaaagtgtggattttaatgtagagactcagattatagttttgtgaaagacagctgtgcttcaaagagttaaagtttctaaataaatacaatagcctcttatcgtacatgattgggtgtggtagttggttggctaactgtaaaagtttaaggtgggggtcaggaaaaatgccttaattctttttctattggctgtttttatggaaggtgtggggagcattggtcaattctgctccctacagcctccataaaaacaaactgatagccaatagaaaaaaattatctgaaggtcaggagtttctactgtactttgaaataagatgttatggtatagcatgatagatttcacaatagtcgatagtattttactgtacgatagtattttactgtactgtaaaaaaaattaattttaagcaataatataacattacttgggtaacactgccaaagatgagtcttagatgttgtcattagcagacctgtgtttttatacttgttccattacttgcttgctctctaatcttcatcacataatctctgagagtctcagtttccttgtctgtaaaatgggaataattccaacttctcacagttagaatgaaatatgaccgtgcttggcacatagcagatattaaataaataatatcgtttattatgttaaataaacattacaaatgcttatatattggttatataagcttatatataagcattacaaatgcttatatactggttatataagcttatatataagcattacaaatgcttatatattggtcaattacaagatatactcaacaaaggtaaataaataatgaaatgtttaataacctaatgctattttgttctgttttgcattgatagtgttcaaactgctaaggctcgagcagattaataattttttaatatatagttatctgagaaaatataaaagctacagaaggatacttgcagtatatgtataatgtatttatattgtcatttgctattacaattatggcttctatatgtagaggatgacatgggtggactaagctttctggaataattagatttttaagtgatgttaacagctgactagagctgggcagctggaaaatttaatgttattccacctttgactcaaggatgtacaagtttggacctggttctagacctgtgtgtatattgaatacctggtgtttcaagagaagtctaaggtgtggtccacggcctgttgcggtggctcatgcctgtgatcccagcactttgggagcccgaggagggttgattgcttagagcttagaagttcgagaccaccctgggcaacataacaagaccctatctctatttaaaaataaataaaatgtggtcttagtgtagaggtaattaaaaacatattaggttatgttctaaatgtatttctaattttgtatttttaatatctgagcttaatcaaaactgctatgaaagattaagacctataaaataaatcataaattagtaatttaaatctactgttttaattcatatttaaaaacattgtaggctgttgatctttaagttaaaactagtagtgcaaaatctgttccacaaacaaaacaccacactattttgtggtttttgtttttgaggttaaaatagagaagtgcttagttttttcctccatttggctatattacaaatttagacattagccttagaatttcagtggcttatgaacttaactatagcataatgcaaccctgttaacctcaaacaattcactcctgggcaggtgaaataggaaagaagtgttaaggactagaaaaatgtagcaaagcaattaggtgcattgcttgctaagaatagttcattgttagttgatgtaaatcaaacaaaagaaatggcagatgttggagaagaaatactgactagattaaataaagcggccttttgctaaattcccaggtagaggtggtcatgatagtatgagtagcaacagctaatacttgttcatactatgtgccaggcactgtcttaagtacttcacatatataactcatttaatcctcacagatactcaaggaaatagatgctattgtcatctctgttttatggataaacgaaactgagtcatagagaagtttggtaacttacccaaggttacacagctaataaaagggcaagctcaaatgtgaagtgaacttgagcatatgctcttaagctccctgactggtagcagtaagtaatgttaaaataccataagattttgggaccaaagtggtttaaaaatacttgaggaaaactccaaacaggtatttggtaagtattgtgatcttggaaagctgcttgtcctctctgcctcagctttatctttacaatagggaaagtaatagtacctcagctcatggttattttgaggattaaataagttaatgtgtgtaatatgcttaaaacagtggctggcacttagcattcaaatgtaaactgctattatttttggacattttctaaagaagaaaccagtcagttagtgaaagctgaggaagacaaaagggggctaattcagctgcatgttttgtatattcagtgtgatcacaagttaaaagctggctactgttgttctttcatccatttatgttgatgagtcttggcatcagtagctgtcaaataatcaatggcttgatacaacttctgagattcagatactaaaggggttgacgtagagataccccatctatgtttttgcctgtcatccagtaagaaggaaatgattcagtggactaaaccctgtcatttctttgaagaatgagaaaaaaaagataattggaaggcagaactgaaaggcaaatgtgtatataaggagagtgacttaaaaattgattttctcttcaagaactgaagaaacccatggggtctgagccttctgcattgtgaacaaatatagaaaaaaattagttgttaaagaatatttatattcttttgcctttctcgcctttggatctaattatgaaaatgttttcaccctttttgaggctggggattttaaaaactggaaatattaaactcagactaacaatactggtttttttttttttggataatgaaaaggcaaaattgtagtacttggaaacagtacttcttagtaggtaaaccaaagtcaatttgttaatagttaattctatctttgctcaaataggtgaaaaatcagaagagttcctcatgttagactttttctttttctttttcatgggatggggtcttactgtgtcactcagactggagtacagtgatgcaatcataattcactgtagcctccaactcctgggatcaagagatcatcctgcttaagcttccagagtagctgggactacaggtgcacgccactatgcctggctaattgtcttttttttttttttttttttttgagaaatggggtctcactatgttgcccagactgttctcattctcctgggctcaagcagccctcctggctcagcctctcaaagtgctgggattacaggtgtgaggaattgcacctggcccagactcttattaaagtaaaacaggatggaataggtaaaaaatgccagcagataatcaaaatattagcctaagagcccatgtgtaataccacaattcctagcaataatttgagttgagctttctcatattttcctttccatgtaaaagatactcatctcttccccttgtttaccatatccagccccactagctgccttttaggtttttgattaccacttaggatctggtatgcgaaattccttctgcctaaaaagcctttctccccagtcatcacattggtgtctccttgttgttcttttgttatagaacttaaccgtcattttttcagagaggttttctctcactaccctatccaaagtgctcagtgaatgttaattgctgtcatttattaaatgagatgtcccttgttattctttgtctgagcagcctgtatttccttcatagcattgaccacattttgtaatttcttttgtttattgtctgtctctacagctagattttaagttttgtgagtccggaaaccttgtctcttattcacacctgtattcccatcatttagtaggcagtcttgtacatggtaggtgcataggtgtttaatacatatttgttaaatgaaagaatgacttgtatgtctcagtatttgtggagcagataggaataggagcagctgggtagcaatatttgattgttttactgataccagctgaacttctgccaatttagggattggtttgaattaatgactgttaggctgttatcacaattttatacttaattttttgaaaatacagttaaggatactatccataacttaaataaaggttatatttcttaattaatcatatcttattgaattaaaacactataaaatatcttaaaagtaggcaaaagccatttagtgacaatggtttccagtttatatacgtctaacaaatgattcatacacagacatttgctagaagctctctgatgtccaccccctgtgctgaatttgctcctattgctgtttctgagagagagggagaatgtctgtatgttcaaattggtaaacctcaggtttatgaatataagaaagtacaagtcggatagactaatggaaaaaaaactcaaaggatttagagtttagatttgggacccattcttggattaagtcccaaacctgtttacttatctgtaagatgtagctggctaagggtgttgcttctgagcttcaactaagataatatgtcaaagaacatagtaagccatgagatgctatataaatgtggactaatttactctgtgggcaggattatttgtatagatgtgcaaagggccaggtcttcccaaatacagccagctgcatcttagttggtgctattcacacagtatgaggattttattacttttagtttcctcttgctatcctgacagaaattataccaactagagattcacttggattaataaatgtatacttagttatacatttttcgaggactgttgaaatgatggtcatattttagtttaaatggtttccttttagcagcgtactataatgcaagaaaagttaagacactaagcttttaggatcaaatttggattgaaattctaacttcggaacttaccagccaaattaccttgaaaaaattacatagcctttctgaacaacggttttgttttttgctctaataccgtcaaccttaagccttgtgggaaaggtaaactgagaacatatggtttggcacttaacatacgcctagcactgggtagggattgctaaatggtttcctctgctaacaagaatacacagcttggaacagctgcactgaggaaatgagtgtttcagaactccgttttgaaaactggttggaacaagcatgaaagatcaatggacacttatgtcactgtcaaccttgtcttctgaaatatacaataacatagaaaaaagtcaaaaccagcattgaactacccaatctttaatgcaaatgcaatggagagggaaagtaggcaaattggaacacagcccactatttctgggtgatagtagaccctaatgaacagtttagagcagcatcagggcagagagtgaggcagaggtgggaactagaaagaggctgatggaaaatagagtggtgagatgttgcccaaaactgcttttttctttgtttcagagtattacctaggattgattcagtgcttggagcatggcccttctgcttccatgacccagaatttagatttgttccatgatgctgcaagatggccattataggttaagaaacctttggtagactcttctgggaatctaatcataactcatattgcttgtcagtaatatttaagcctaaataatggtcagacttaaacatatcccctttgggaacatgaccaatctgtatttgggaataaacaatatttaaagttttcatattttggtttcccacttaaccaaatgtatattcctgaatggaattaatttagcgtcagtatctgaaattaggctatttgtaaaactttatcctaacatctagaaagtgcatttacatttttcatcaaattagcaattttcttttgtgaagagagatcatggtttgtgagagagatcattggccatttctacttaaatttataacagtaagagaatgtataattttagcccttgatattggcaaacttctttttgtttattttggtcttaaaataactttaaaggtctatatcatatttggtgtgtttgacagaaggatgctgatatacaaaaaattattcattttatgaaagaactaaccataggatttctctaagttaccctactttgcttgctctacaattattataattaaaaatttcaggccaggcgcggtggctcacgcctgtaatcccagcactttggaaggctgaggtgggcggatcacaagatcaggagatcgagaccatcctggctaacaatggtgaaaccccatctctactaaaaaaatacaaaaaaattagctgggtgtggtggcaggcgcctgtaatctcagctactctaggactgaggcaggacagtgaggcaggagaatggcgtgaaccggggaggcggagcttgcagtgagccgagattgcaccactgcactcaagcctgggtgacagagtgagtctccgtctcaaaaaaaaaaaaaaaatttcaaacccacagaaaagttgaaatactacaattaacatccatttaccttttcatagattaattgtgaccattttacaacttttgttttatctccatataagtaggtgggatgggtgggtgggctagatagacatggagttttgttgtctgtttttttctatttttaatgcaaagcctttttgtttatttcaaactggtacttttttcagttgacacattgcaattgtatatatttatgaagtccagtatgatgttccaatacatatatatgttgtgtaaataattaaatcagggtatttagcatatctttcacctcatgcacttatgatttccttgtgggtgggaacattcaaaagcctcttctagctattttataatatataatactttagggttatccttagtcatcctactatgcagtagaacaccagaatttattcctcctatctaactgtaattttgtatctgttgatcaacctcttcctattctctccttccccttacccagtttctggaaaccactgttctactcgctacttctatgataacagcttttttttaagattccacataagtgagatcatgcagtatgtgtctttctgtgtctggctgattttactgaacacgatgtcctccaggttcatttatgttgttgcaaatgacagtattttattccttttgtggctctatagtattccattatgtgtgtgcgcacgtgtgtgtaccacattttctttatggacacagattgattccatatcttggctattgtgaataatactgcaataaatatgggagtacagatatctcttcaacatgctgatttcatttcctttgggtatatatgcccagtagcggaactgctggatgatatggtagttctgtctctgatattttgaggaatgtctatactgttttccgtaatggctgtaataacttacagtctcaaccatgtgtaactgttcccttttctccacatccttgccaacacttgttttcttttgtctttcttttgtctccagccattctaaccggagtaaggttttatctcattgtggttttgatttgcatttctctggttattagtaatgttgaacatgttttcatatacctgttggccacttgtgtaagttgcagatgtcttgacacttcagccccagatacaacatgtatccagcagtatgctacagctggcaggtactggcttgcaaaagccgattgtgtatatttcatttcaactcttcacctagttggttacttgaaatcagccatggtaatggtatttataccatggaaattggcagtgctacaaaccaaggccttttttcctctctgagccagccgttaaacatttacggccataccactgcatgtgtcttctaaaaataaaagtattcttctgtatacctgcaatacagttactgcattcaatctaatacttacatagtactaatatctaatatacagtttatactcatattttcctagttgttccaataacatctttagtcacattgccttttaaagttgtacattgcttccttttacagaaatggagttagaccctgatgttagacaacatttacaaaagttttggagtatgccataagaatatgataaaaaattagatcatgtaaatagaacagctaattaatattttagtagatttttcctctagcttttaagtatttaggcaaaatggattaaagagaaaagtgaatattgttgaaatcccagattttattccattgataacacattaaacaattatatttttaaacctaaagtctcaggctgactgacctcatttcctggtgatttccaaggttccctgcagtctagccatattagtcctgttattcttcagtcactacaagcacatttgacactttggggcctttatatttgatatcttcgctcagaatataagtctcctggctcttttttttttttaacttggctttctgccatcaaagaagccttctcggaccatccttcaaagagtacagctaattcattctccctttactctgcgttactctcttcatagtccttacattgtttaatctggtattctgtgtttatttcttttcccctctccccaacaggaatataagcttcatgagggcagggaagggatttagtggcatttgttcactgctgcatttccccatacacagacaggtacctggcatttagtggctcttcaataaatgtttagtgttgaatgaacacttggcatgcattttaatatctttgtggtgtagcataaaacttattacttgacaacgttatgcattctcttttctgagatttgttagtttagtaaccctaagatctaattctccagtgtcaagttttttgcttctaaatggaaatgtttatgcccacttcacaaggttattgggggatcaaatgagatgttatacatgaactccctatatacaagatagagtgctatgtaaatataagtagttgttcattctctaagcatttatgtttacttatcaggtattgtgcgaggttctggaaacatacagatgaataagtcagcagggtactgtgtgtgagtctggggggcaactagaaaaattcttgactcctttggaaatgtctcttgctaatgtagtgtttgtagtttgaggaatcatggcctcagatatattggttccctaaactaagacattaacatccttcaaagtcttatgaaatagtagggaatttttcttctatcctcttaaaaattacactagtaatatgagtctgtcaaagaagtacaaaatttagataagctaaaagaaaaggagaaaatacccaatagtaatgctcctattctgtgattagacagttcatgttttgggtgccagggcggggtgtgtgtttttccttctagtctgtaaatgtacgtacatattaatagtatattttttaattaaaccatatatactgtttaggaaactttttttacctaatgtaatttgtatattttcatgtcattaaatattcttcccttatggtatatttaatggtcgtatagctaacttttgcatgcctgtgtcatttggccaatttatacttcttaatgttttaatttttaactgtggtaaaatgtggataacataaaatttatcttcctaaccattttcatgtgtacaagctttttgttggatacttaagcttcaagttttggctagtataaacagcactgtaatgaacattcctttaacttaaatcctggtgtatttccttatcttttccagacgaagttctaaaagtagaattacttgatcaaagtatatacaaacattttttgattattgtaaaaatcacattttttgattatggtaaaaaaaaaagtgccaatttttggtcaccaacagtatatgagaagaaaaattgtatttcccctacttgacactcttgttagctttaatgtatgagcaaaactcacacaaatgattccaaatttgatttcgctttcttatagatattcttgaaagaaaatgactaattactatctgatttgtatcttgttttccttcacgtacaaatagtagacatcttttcattctccaacattatatgcccaagctaaattctaactaaaatcttcagtctcccctcacccccgtaatttcaacttttattttagattcagggggtacacatgcagattcattacatcagcgtattttgtgatgcttgggttttgggatacagatgatcccatcacccaggtggtgagcatagtacccataggtattttttcagtctgtacctgcctccctccattcccctcgtagtccccagtgtctattgttcccacttctatgtccatgtatactcagtgtttactcccatttacaagtgagaacgtgcaatatttggttttctgaacaatagtttttttcttttggacaatttctagctggtattccttcccctgcacccccccacccccaacacccagagatagggtttcctctgttgcccaagctggagtgcagtggcatgatcataggtcactacacccttgaactcctgggctcaagtaatccctccacctcagcctcccaagcaactaaaactataggcgcacaccaccctgcccaggtaacttttaaattttttgtagagactggtcttgctatgttgccgaggtctggaactcctgtccttgagcagtcctcctgcctcagcttccccaagtgctgagattacaggcgtaagccaccatgcgcacactctagatggtattcttgatttgactttcaggaattgttgtgtggcaattagggcagtggaaagaacatgggtttggagctggacaactcattgttcagacatcaacattattactagctgggtgagtttagtaaagttaaactctccatgtcttaattgcccggaaatctgtaaaaatgggaatagcaattcttttctcaaggtttctgcgaggattgaaagaaatagtacatgttagcatacagctcaatgcctgggcacaaagtgggcaccagctttctacgaaaacaagttgtcacgctgaggatacagggccagtattccctaaatctcctttttccaactaggattctagaactgtaactataataaagtttactaacagtagtacttagatctagaaaatctatggggtataatgtctaaagtctttagtgctgtgtaaagagcaaatgagaatttgctgtcatgacagttgtgctcaactgcagatgctgtcagtccatggtttcctactttagtaaggactgagcacaaggcagagtggccttctgtgaagttaaactctggcatcgatttcctttgttgattcaacagtgtttcagcttactctaattttggataaaaagaaacttatgcctgctctggatggatagaattcaaatttgctctgcaatgaatttgaatttttgtggcattcattttatgtagatacgtatatctatttcaactacaatatttcccaacttttttgatatctcactaaggaaagttttgattaccgaggtgggaagattgcttgagcccaggagttcaagatgagcctgggtgacatagggagaccccatctctacaaaaaaacttaaaaaaaaaattagctgggcttgttgaggcatgcctatagtcccagctcttgggatgctgagatgggaggatcacttgagctgaggatttaaggctgtagtgagctatgataaagccattgcactctagcctgggcaacagagtgtaaccttgtctcagaaaaaacagttttgattaaatagttaaattaatgtaatatgtgtcatcttaacaatatgtacaactcttagtttatcttgcaacaattaggtaatctgaaaaaagtgatggttttgtgcacatgatcattgggctaaatttttttcttttcattcagtagtatttattgatgaactattctgtggtatgacctctgagatatgtattgtattctctgccttatagaaaatataatccaagaaagaagataagtataatgcaggacatttgagaactgaatgaatggtaaaagtaatgtttactatcaaaggtcatagggaatgattaattccactggagaagttaatttaggtctgggactgtcttagcagagacagcagctgagttgatccttcaaaaactgttatgatttggatagataaaaatttagagattggggcagggaagggaatggaaggaaggacattctgatcagagggaatgagttaaggtgtgaagataggattccattgtttaacggtcggcagatagactaatgtgaatgggaagggttgctttggaatagggagagattagagttttaaatgttaagctaaaaggagtttgagcctcattcatttgctagtatcagacagtcttaaaatcagtttttagctctcaaaattacattatcgcccgctgttataaaaattacccaacatgcatctactgttagctaattctttttcttctccatttatttttccctttgccaccattctttgtttataatatatgaaggatttgtgttttattttacaaaaattcttgggaatattaacatggtacacaatactaataatactatgtcttttttttttttttttttgagacggagtcttgctctgtcgctcaggctggagtgcagtggctcgatctcagctcactgcaagctccgcctcccgggttcacgccattctcctgcctcagcctcccgagcagctgggactacaggcacccgccaccgtgccctgctaattttttgtatttttagtagagacggggtttcactgtgttagccaggatggtctcgatctcctgaccttgtgatccgccctccttggcctcccaaagtgctgggattacaggcttgagccaccgtgcccggccctatgtctgttgttttataatactctttttgtcagagtagtaagctgcactatttattttgaaatagctgtgtgttaaaacaaatggaagaaaaatacagagtaaaactggagattccatttttcattccagataattgctggcagaagtttgaattctatgggattagaggctttcatacccttcagtttcatgtaaggtctgagaatgcagggagtccccatgatactaataagctttcctagctgtgttaagagtagagatgtatcttcttctctctccaaccagataaacactttcacactaaagctttaaaaaaaaatggtggtcataagagtgaggtttgttcagtatattgtggtagagcactaagaagcaatctcagtttcctagtcttggtttgccactatctgtgtgaataatcaccaacctctttgactaccagttgcctcatctgttaagagattagattcgataattttggaggttccttctgggtctaagatttgatcattcattactccttttttttgctgtttttttttttttttttttttggcctggcttgtaagatttctgctggcataactcctttcttaaatattgtttatctaagcatgtgtgtccttcttaagttggcatactaactattcagaaattgaagtaaagaacatacctatgcctttgaataattattgtgttgattgaatgctggttctgcaggcacacttctgtggtccaggaggtcgtagcctaaccatggcctgtaccttttgttgtagcttatggtgcagaattgaggtatttaccagggtactctaagttgctaacaacaacaaaacaacaacattcaggttacacagtggtacatattaaatccactttaaaaagctgagggcgtgaaaataattttgttattctgaaattacaaaatcactctgtcactagaaaccacagttggaaagatctttagagtgtgtgagtttctttcatttttacagttgagaaaatgtaagacccagagaaaagcaacctgtccaactaaaaaagtaaaactcaaattccctgctagttgctggaatattttctgtattttgtattacttcatgcctctagcagagcacaattgcctctaggttctggcaccagaaatgaaataatgatcatctggcttttatcaggaaactggaaagaaacaggctaggtgattatattttgacattgttctcaaagtaatacatagatactcttagaagtaagtcgaatggtaataagtagactcaaagtaaataagacatttcatccttgaaactaggaagctgagaaagagatggatataaagaaataagaaattagagataattgtcaaattaaatcaggaaatggtataaactaattatttagaaatatagaggacaatttttttctttagtttcaatgtgtaaaaaatgaggctagtgataatacctacttaaagggctactgtaatgaggaaatgagataatccatataaggtgcttagaaaatagtatttaggccaggcacagtggctcacgcctgtaatcccggtactttgggagaccaaggcgggtggatcacctgaggttgggagtttgagaccagccttaccaacaagaagaaaccccatctctactaaaaatataaaaaaattagctgggattggtggcccatgcttgtaatcccagctcctcaggaggctgaggcaggagaattgcttgaacccgggaggcggatgttgcagtgagccaacatcgagccattgcactccagcctaggcaaaaaaagcgaaactctgtctcaaaaaagaaaagaaaatagtatttgattctgaataaatactcaataaatttgcctgttgttattgttaataaattagcatttcttcagtgcgtaagataaacacattccaagtgcgctgaaggaaatatacgaaggctaagagagtgactaagtgagagcaaggagaagtcctctttggttaggtaaggcccctgagaaaatgagcagaggatgagaaggcaccagctgtgtaaggggaaagaacatcccaggccaaaggtatatgtgcaaaggttctgaatttagaaagagtctggcatgctttaggaactgaaagaaggccaggtactatatgatagtttgtgcttccctcatttcttcatattatactgtctccttcactagaataattgttcttcaagggtggtgatgacatctgacttcttcccagctgttttcctcatacctgtcacaggttggcacagaattagtatttattagatgcttgataaaaaattaagcgcctgttgcttgctcaacaactactatgtaagttctaagatatcataattttatttttgggcttatatcagtgagtttcatgaaatacaaaattcacgcttaaaaaatttaacatatttaactgttttatatctctaactgtaccattaagttcaaactactttgatgggctgggttaaatgctacataggatgatcctggtttatgcctgttgtcctgtgtccaatcctatttcacaatggtctcctttcactctaagtgtgttaccactgtttggatcatgaattttacttttttatttttttaatatatatttttttctttttagagacaggtcttgctatgttggccaagatggtcttgaactcctggcctcaagcaaacctcccacctcagtgggcaatgaattttatgataaccctaatagtcattttactgttctgctagtgcactcaagtcttgtctttcattaactggtatttcattctgtacttagatagcttaaatatagattaaaatagctcatttgccccagctgtgttttgtaggatattgcatctaatattttgtaatttacatgggtccttgtatgaaatcaagggattgacaacatgggatgcttgttttgatttagtacaaaacacttggattttgttttagaaatgctctatttctaaaatgtttctaccaaacacccatattttgacaaaatgttctttttcaaagtgataggaattcttatgaatatttccttctgcaataaacagttgtgattatatagtcatattggttaaatatgacaacattttagaatttaactgttagaaatagtaaaaccttagacatctggaccattctccctctcttgttcactgaaacaagtataaccaagcactttcaatgtgcctggcacatatgtgctagaagtactgtgatgagcaagaactaacatggcctctgccctcagaaacttgtggtttgaaaaaaacaagaaacaaaaaacaaagtcctttcttcctggggcaacaggtgaatcagaagctgaggttaccctatgatgttttagaagagctgggggttgggggtaggggagctggcccagaggagtaagagagtatcagatggcccgtacaaacttacagaaattgtacactctactatccctttctttttttgttttttgagacaggttcttgccctgttgcccaggctggagtacagtggcttaatcgtggctcactgcaacctccagttcctaggctcaagcaatccttctgcctcagtccctgagaagctggtactacaggtgtgcatcaccatgcccagctgatttttaactttttttttttttttttttttttttttgtagaaacgaggtctcactctgttgctcagcctggtcttaaactcatgtcctcaagcaatcttcctgtatcagcctcctaaagtctggaattacaagcatgagccaccatgcctggcctccactatccctttctgtttgtggtggtctcctatattttgagtttgaatgggaagggagcatgcatgtttgatggtttgttttgtttttgtgaatgaagaatgaaaatttattcccattaagtgcgagcttcaattgaggcactcagtttatgaggtcttactgatgtttcctctcttaggtgctgtagttaaaatcttgctggtctaaaatggtgaaaactattgaggtattcaaatgataagtactttataaactgaaattgcattgaaaacggagagctcttgacagaaaggttgactctagcatttatataaggaaaaagacaactattatctccctctacacagaaagctatattcagtagttataggatttgtacattgtgaatccttagggatctctaaacatctgtgtctttagaagtagtgtcacctctagtaaaagagggccagtagaattgagtggtggcagcctgtgatgtatatgaattttggctgtacgtctctagcgactattttctccaactctatttagtaaaattctacctaatttcagctattgtgcttccaaagtccatgtttgttgaatatgatatggtaaaaaccaatatctatttggagacagtggaggggatggtagtaattgagagacagtgtcagatggagcagtgactttacaatttttttgactgcaatccacaattagacatttcacattgctcccccatgacaacatccctatcgacccctgcccaaaaacaagttatttaccaatcttgctataagcaatgatgactgattttttcttttttctactttatttaaaaagaaaattatagtctcaactctttatattaattttacacacattaattctacagattgttttagcacttagaactaaaagtgttcaagatttgattttgttaccttctctgtgtaagctaaagttgctgacttttctgagtttccattttattgattaaaactgggatagtaatagtattttacaccattttataactttattagaatgacataatctgagtgaagtggttgtgccaggcacttactaaacacacagtcaatgagtatgttctctccgaagtttgttagcttagggaattgggaggatgccactgataataatggtgactcttattcagaggaaaactaattcagttttagacatgctagagtttgaggtagccaaaagagtttagtcatatcacttggaagcaaaccaatgtgaaatagtttcaaataagcaaattttaaaaaatgttaaatgcaaagcaaacagtattaaagctttggggacttaatgattgagtctccttacacctacacaagattggctaaatacacatacaactgtgtcactctaccagatttctgttaacattctccagaatttaaactgcagaatcagtcatttgtatgactgtttgtctctattagcagaggtaatgacatgtatcagtgataggtaattgtggaaaaaaaaacagcacttggaattaaacctagagttggtgattcttacagggtaacccaacggctaccttaatttctatgattcagtttcttcatctacaaaatattatttcacaaagttgcagttgtcaaagggacaagtaaatatgggatccattgtcttcatggaaaaacttttcataaaatgttattttattataataaaaaatgtgtgattggttttcaatttcagattgaatcaaacatagcattctttgtaatagcaggagattaacaacatcccagaatatatctttaaaagaagtatggataaagaaaaacccgtatgcacctctgcacacattttatgtaatagtggtgatactaatttacaaagacaaagtatataggatattaaaagtgaattcttaatacctgatcttgattcttattaaatctgacttatgtgtatacaagatattattagatgaagtgtttgtccagtagcttagcttataaataacccccattctagctcattttaaacaatgtagtatgaatgatgccaaaaacaggctagaacattttcttctttccaagatcttagatttggtaaacaagctactgctcctggaactaatctaggtcatcataacccaaaatcttttgaaatatgagagtcccaattaagtctcttaggtactttttagcattttaattttaagaatgtgtttaactcttaaaacagtatattttggttgctgtttggccatttggtttatttgtaccttgttataatgaatgcaagtcagtgggtaatcattgcagcaaatatgattgctaggaatctcatgtaagtggaagtcaatataatgtatggcttaatttatccctgaactgacctaacatcacattttgttttttaataaaaactggtttaatgatatgataaatttctgtattttccacaactgttaataatgttatattttaactattgcttagtcttcattacaaattattcagctgttaaatgtgttgttcaatgtgacattatttaaaaacttaaaaaaaaatcagcttcacagaaatctttctttgatcaagagttgtctcattcccattgttattaatacagtatacaactaatgtatgctaatgtattgctgttatttgtgtgtgtgtgtgtgtatgtatgcagacatatggtcacatcatgtagacctgatgtctgcaaagggaaagaggaaacttcaaattaagagcggagtactgacctaggtggtttgtagcacttagagaaatgattattcccacttttcaaataaagaaatagattcagacaggttaaataatttggtaacacatcctataagtggaaagagcttgaatttgtggctttcctcctttatgtcttgctgctttaaggggtctttccaatcatgaggttgaattttgtacaagcgtgtttacactaccatatctgaacattatcccctatccctcaaagactattaggaatagaaatatcctatatgtgtagcacattgctactttgaaaataattttatcctgtcctattttatccttacaacataccaacattgcagacaaagaatgaggaatttcaaagaagtgcttaagatcaaaaagctgatcagagctaggatttgggccagaacccacatcgatggtccctagttcagtgtccttttcgacctcctttcactttctctggattaggtgatctgtgatcatgaagtagtgaagttttacagattgaaccttttatcgttgtctttgtgatcacactacagctacaaaacagctatctgtttgcagtcaaatcctatttttccatgttacaagcagtgtattaatggtaattttgaggtataatgaggctgtcgttgtggttattgaatgactaatacatgggaaatgcttatatgagatttctgtatttaaactttatttttgtgtaatgccatatttgccttacggcaaatagtaagtaacatatgtaagaaattgttagggaaaggatactagtggttaagggcacatatattagatttaggaagacattatgtttgaatcctggctttacccacttggttctagttacttgggcaagtaacaagccagttttaatctgtggggataacaactacctgaggatcagagaagagtacgtaaagagattagcatcatgcctggcccatgggccagtaggtagtggctatttaatatatatatatgatacatatatttagtaattatttaatatgcgtatatgtgtagtagccatttgaacattacctttgaggggttctttttttctatctgcaatactttttttgtttagaaagtctcaaagatagcatgttatctcttaaagtatcttactatcggtagatctcaattatttctgctaacagaaaacatagatgatctgaaatagttatttgaaattttcccattttatatttggaaaacatagttttgtttttaaaacttttgtaaaagatctactatcctatttgtttccctacaggagcatggtatgtttcctgaactgtccatttagagaacatacttaacgaccatgctaagtgtgttccggaggagcaggggaaggaggtttgttgtgattggggattgagaactgagaatctgggactaacacttgtgtataatttcatgttattcagattcttagtttgtagtcttgagatttacaaagtagataatgcgccatcattttatagcatactcattatttagttttgtgtaccaagatgagcaaactggggaaaagcaaacttttttcaaaaatgtatgaagtgctgttctgaaatttattggaaaactagcagcatagaggggagcatttcactaaataaaattctgtctcagttggatttaagtttttaaggtggcacatctatttggagtgtcttttatcatttataattacatgttgtgactaaatacatttaatgttttttctgtaaattctctttttatatgacatcaatagatttatattatagatatatcactaccctttaattttaaagtttaaggattataactgaaaggaactattccaaaacaaccctgggattatatattataggagataggaaaaggttaattttgaaatataaatttattaatccaaaaaatttttaaatttgatttcctttaacttctagttgtgacttgtaaattttagatctaacttccttatttaaacaatgaagatggtcaaataagatgttctacttgcactagtcacctcccatgattgtgaaatcaaatcaaatattgtataaaaatataaatggggcatggtgctaggtaaacaattaagtagacatagtacctacgttttaagcacttacagtgtgttggaggagactgtcattaaaccagtcattttgtaaacagtctttctacattctgtgcagtaagtgttaacgaaaaagtacagtgggcctgtgactagtcttggattaggaagttgtacagatgaggaaactgaagctcataatggtataataatcttatatgtggtctcgctgttagtaaatggcagattcatgttttgaacacagcttggcctacctccaaattccttactgtctctaccatgccattctttctctgagtcacctacctcaggcttattgtgtttccaagcacgtcttgttatttctcagggggcttagcagctctccctctggctaagtatggaaccggtgatcagattctttaatgagatttctttaaagcaataagcctcttccgggttgtatttcttctgtactatagaactccaggaatcctagaagcttcttcaggggtagaaatcttgtggattctgggtctgatatgaaattgcatgctatttgtggcttctcacttaaaaatagcctcatagtgctcatggggcactttagtaactccaacacttccatcagactccactccctaaccccaagacactcaagataaacaaagatctgagtaataaacggcatgcttctgctgcggcctcagcctactcccacaaacctttcctgtatggaaatcctagagccaccactgataatgcattttataggaagaatgcaaataaagagttccattgctttaaacgtttgaaccaccatcctagttgatgcgacgttcaggggaaatatttctaaaatgagaaatttttataattcatcacatctgttcatcccctactaccttcattgattctcccaaacagctttgtaagctggggagggatttttgctgttaaagtttgtggagacagtatgaactggtaaactgaagcccagtacttgaaacctgaaaaaaagtctatacttctatatctctgggtaattttatgatagcaaaaagtaaatgaatttaagctaaacgtcattgttctatgtatccagagacattttaccacaaatacctagttaaatcttgtattgtcagagattactaagtaactgataatttttcctttctgaatctttttctagtcagtctggtaacctgtttctttagtcctcttaaaaggtactgcatgcatttgaggagagaccatttcaggacctatcccattttaaatatgtaacaggttgtgcttttctaggaatttgtgaagtttgttgtaaaatactttatataaagttccaggtatatgaaggttgacaatgctttattctgattgttgtaaatttttgtatttatacattttcagagggtttcacttggtagaacctgatttaatttagatgtgaagtaactgattccttccacaacccttctttgtcttcagtttatgtgcatcactaactgaaataaatttttgtcttacgaatttctctgttttaaaagcaactgaagaaacacatttcaggggcaaacgctagaatactttgccattatcagtctactgttctttcctttcaagttgcctaaacacagctgagtttgtaagacgagcaaagaaaacatgacagtgctgccaagtagacaggaagctgtagtggacctagcgagcaggggaggttgagcacaccctctgtccaatcagctgtgagtgctgttgctatgtgcgctcttactctgctgcctttgtgaaaaaccttacacggagggaagcgggatcagcacccaacgctgaacatttgttttaaccgctgcagacatctggatccctcagttactgatagtatagctattgatagccagaaggcaacttcctttatacaaggattccagtatggttttcagtggaaacaaagggcttcacagagaaggtgtgtagtgaagtgttttttaacggctttatttttaagcttccaattttctgtagctgtttaccagttggctgtggtgcttgctttgcatggatttttaataaataggtctaggaaaattatctcactttgaaaaccattgaacttagagaattttctttagcttcatatagcctgttttctttgaacagcagtactgaaaagattattaaaatgctgaactgaacaatgagtaggaagaaaagaaaccaagtacaatgtgctcactttaatggggaaaaaatgtgatagaaatgagaatacagggaagagaatgtgcattagccagaagcattaactgtatgtgggggcaggaggtattttttaaattaaagctgttaagacaaatgtattttaaataagctgcatatttttaattgaattcatgtttctgaatttgacaaagattgtcagaatttaactaagtgagatttttgacatagtttaaggaattggtgtgccaaaatctttttataaagcatttctgaaaatcctacctcaaattgtgcaatctcttaattatttaatccattgactagttctgtgcagttcagataaagcatcataattcaaccgcaaagtcagtgtagtgttctattaaacatccatatagaaaactgaaggataagggattttgaagacaacatacaaggttaaactagtattttaaaattgaagtaggcctcctaaatgtaataattgcatatctgacttagttaatacttcaaatatagtcaaatcttattaaactgtactaatataatatatgtgataattgaacagagtgtaggttaccatttgtttatataggatctggaaaaattggtctgttcaacagattataggaaagttttaaagtgttttaataaacaaaaggtctttttgtatctttctcaaatactgtgaaattaaagtttacatatgtgatttagctaatggttcttttaattaaagcagagcagactaattagcatattgcccattttacgaaggatccgtattgagctaataaccggcttttcctttgctttttcgttttacatggctaagtggcctttagttcactcagtgatgtatgtctgatgagtaaagtcagtataagctcagagttaatattagggctttgttatctctacaaactatatagtttggaataggatgggttttgttgttgttcttttcaaaaaatacctgtcattagaaagtcttaacagtgttagcatttctggtaaggagagatatttcttttctttaaagagaactcaaaatattatcccatgcttttgtgccctttgctgatctttgtaacaatactatgtatataacatttgtattaaaaagatgtctaataattggtgaaaatttacaaaatagtccttaaagattaaaaaaatgttttacgtagacctacatgtggctgaagtttaaaagactggcatttcttagattttcaagtttgtaaggtgcagccaaaaacttgaatttgatagaagttataaaaattatagcaaaataaagttatattatttggacttggtggcctccacaatataaagcactcacttcaagaagagcagctgtgtgtagaaggggtaggggtatgaaagggagtttggagtgagaggcagacacaggcagagaggactcaagtttgttaaatatgactaaccacatgaaagtcaatctagcaattttcattttttagctgtaactcttatgaattactaattttattttctaattatagaaccataaaaaccaaagttttgtttaaattgatttgctacccattttatgttggtttatttcataaaaattaatagagcctccaagagaaaggctatttctcattcatatgctgcaaaagatgggggaacatgaaattgtaagaaagttgagtgtactgctgtgtcacacagaggctttgccattgtgttcaggaggaatattattggcagaattccagacattattgctgggcttagcacctaaaaatgttttatatactggagcatctgaaagttcctattcagtagcagaacttcagggtagttgaggtttataatctagtcagttataataacattgctagcatatttcagttttttggatttgtctattatttgacaatataatttttattgtctttgtctatgtcatatctttaaattggctattgttttgtgcttatggaaaaatactttaattctcaaaaacagtgatttcttttttgtttttgcctctttataaggaatagcaaatagaagtgctagtatttactagatgcagtgattgctacagttggttttaagtaaaacagattgtttttgattattttgaaatcaggcaataatatataatgctgtttacagttctttaaaaaatatgtaacttaaaaactcagattgggaaggggtaacaatctgagtttttctttttctctaagtgttctgtgaaaatctttttttaagtcgttcctacttcaggtattatcacaaatgtttgatttctatatgtatgccttaagtgatatatgacacatttttttccttgactcttccttgcggaaatttcattacttgttcatagtttgaatctaagaaatatttgcttttcatagtcagcagggccaaaactttggtcttgacaactttttgtcaggcattttcacatatcgacagtgtttttgcataaactgtattgcttttgcaagtatatagtaaatttttttcttaatcttcagatgttatagtatcaaaaattcaaagacctaagttttaaaaatgtaattgtttgcagtattacttgaatctattatataatcctttgtgatgaggctcagttataaaagtgacagcatgaggactattgagaaactggaaatatctttctgttctttcttcactggattcctcagttttactcactgaaagacttctggacatcataggacttgaagagaaggtttataataagcccaggaacagtaaaattataaatttgaggaagtagtcaagatagagtataaaaagtaatcagcccctaaggctcatacatggatgggcctcagattttgctataagcttcctgtcatctgtcatatgagagggatgctgtgtgaatcagttatgtatattcctgttctttaacattgctaaatttttaccattaaaatttatgttggtttctgttttcttaatattttgaaggtgttttgttttttgaggttcaaattttgggtggtgggtacaaacatacagttagaagaaatcgttctgtcattcaataatatgataggaaattatagttaataattattgtatatttcaaaatacctagaagagaagaattgtaatgttcccagcacaaagaaaatataaatgtttgtggtgatggatattccagttaccctgatttgatcattacacatcatatacatgtgttaaaatatcacatgtacccccaaaaatacatacaactgtggtatatcaataaataaaaaggaaaaacaattttgggtggattgcctgtataatttattatttagctgtgtaatattgggcatagtttcaccttctgggccttagtatccccctcggtatcatgagattttaggatgattgtgggatttaaatgaaagaatgtgcgaaactacttagattcattactacttattaattagctattataataaaatgtgagattgtattataactttcctttaaagttattctacgttaaaaacgtgaatatgttgagttttctcagtattttgagaattttaagcatagttttttagacctttccctaagatacacttctaggtttctcagtttcctaaggtacttcattaactggaaagccatggagatatggggattggggcagaaaaagaagacagggttcatgggtaagtgcatggctaaatatctgaagaaagataatagtcaatagtggtaaggaaagaatgagtaaaatgagaagagacatagaaggcaaaagaaacatttgttctgtttgtagtgttttgataacatattcatacagtttgattcttgtagtgttattgtttctgttgtgtgtgtatgtacactcgtgtgtactgacacccccagatttcccccacccctttgacccctgcaaatgctgagctgattgactagagttgctaaatcccttggtgatttatttactgggaagtaactttattctgacttttcttttgaattcctcagctagaactgagctaaaggtgacattgtaattgccttccatattaatgacaagggacaagccagctgcctggaaggcagaaattaaatatcatcacagatacgagtgtaattgtcttgaaatattaaaatttaagactaaaaatctaatggttttgtgaaaactcaaacttcaaagccaaaatgctcttttgtcattttcataagtacacaaaacttcagcttctttcaactgaccacagtattttcattgctttgagctgacatatgttattttgggagagaggtttaatctggtttccattctatttttcatattttgatcaagggtaaaatttttgtgatttttttttttttacataaactaatttagccctccaatttgctggaaggtgcaggttagcttaatgaaagagaacacacaaatgtaaaacaaaacaaaagtattttccaagtatactccattttatcactgtcattgagtccagtaatattaaccaattagcttctgcattgggcccagagactacttacagttgacaaaaggggaggagaacccttttaaaaataggtatcctaattttaaatgactacattgcattggtgtatatgtttttgggtaatgcatacttaccttaaatcgcttctctcaaaaatatccatgtagaaacagaatgattgctgtacgtcagcatcttctactgacccttttgagaatgtgctgaatgctatcaacccccttgctagggggaaaaacacatctatatttatgtacacataattttgtggaaaataccaaagaggatcataaattaccttaggttaagaactttttttaacataatttgtttatagtcagagtatgaaagcattaatatttaaaaattgaggcttaaaacagactggatgcaactttcagaatatgtatgcaagcaaagtgtcacatggtttttttcccccacttcaagggatatggtaaaatgttcccatatgtgctccatacattagtacccttgtagatgggtttgccctggacagtacccagtatccctttgtggactcctacgttctagatgggcttcaaatagaaaacctagcacaaaaggaccagcctggaatgcggtgttcaggtcttcagaacctacaggccacatctctgagttgtagactgagattagagaagacctaatgacacctcctttggccttagactgccacccggaatctcttccagaaatcattctgcacaagaaatgacaggtccactgctatgaatgtcacccagttctatctttgttcaagagaatcaagcagaactgatctgtgtgtgcccaagtttctcacctcttaattaaaaagacctgtcttccgtccactttttatttctccaggagttttagatttcacacatagacgcattcagtgggaaataggatgttgagagtactagaagtaggggtcattcatatggttgggagaaggatgttgaaaggacagaatgtattttgggaaaccagcctatgttgtaaccattttcccatgaggtaaaaatgtaagactaaactaggttaagtttaaggataattttggaaagtcatgtgccatttgtgtaggattaatgaagctgggggaaaaaaacagcactgggatagtggattgttgcctttttaacacagaatattcttatgagagtacaggtaaatctagaatttggttttgagaggcaggagtttgtttccttttgttacaatgttttctcagatctttgtctcagagttctttctgtatgaggtgtggagtgataacaccatataatcaggaatattcccacaaagaatagtgaaaaggacaatattttctacttgagagtcttcaggccctgagactatgatgaattgtgtctgatggtttacacagagcacagagaaatgaaattgaataggattagtgcaggtaagacagaaatgaattgaggaaaccagtaagttttctcgataacactgactagttctaagtcatacattttagatatcatacccactgggagctttctctgatgtccaagattgagttccctcctaaatattcccatagcaccttgatctactcctattttatttatcttttaaaaaattatttatttatttatttatttgagatggagtcttgctttgtcgcccaggctggagcgcagtggcatagcgtgatcttggctcacttcagcctccgcctcccaggttcaagcaatcctaccgcctcagcctcccaagtagctgggattacaagcatgtgcctccatgcccagctaatttttgtatttttggtagagatggggtttcaccatgttcgccaggctggcctcgaactcttgacatcaagtgatgtgcctgcctcggcctcccagagttctgggattacaggcatgagccactgcgcctgacctcatttatcacattaccatgaattaggcttatctgtgttctctccatacgactgccccctactagaagttagcaacagtagcttattctcccattgcctctggagaagagctgaatctcagacagtttttaacacataaatatcaaatacttcttttttctactcttctagcctttcaaattacttagaatttagttttctttgtatagtttgagttgccctcagctgctcacataagcattcaataggttgctgtgatcaatctataatcctttaaatgactgttgaggcctagaaattctagtaatcaatacagaaattagaactcaaagtgttctccccttttattttttatttttgacaatttttgcccttgatgtagagatttagtgattgcctaatcattttaaacaaatgtttccttatctcattgaagagaattacattgataatatagaaaaacaattggcaattaaaatatgaaatccaagagaagaataaagtaatagttatctgggaagggtaacaattagctttcatcactttaaccagaaataagctgaaactaagaaaacaaaatacagtgaaacattaaacatccatttgagtgcctacctgttcatgtcgagcactgtgctaagcaatagtagttggtcttaattctcataaagctcaaataatgacttaattttatttgtgctaaattctaagaaggaaaagtataagatgtcataggctcttctaacaatgataaaaagacatgaaagagggtaataggatcagatgagatggatgtaatgaagaattatgtatgtaagctgaaacagagatcatctgattgtttcttaccctaattttttaatctgaagaatctgatgaagaggtaaagttaaatttttcctccataagaatagaaattaagttagaaaatgtaggccaggcgcagtgactcatgactgaaatcctagcactttgggaggccgaggttggaggattgcttgaggccaggagttcaaaaccagcctggcaacatagaaagaccatctttccaaaaattaaaaaaaaaaaagcctttcacaaaagcaacaaacatctaatttttgaataaacttaacagatatattcaggaactttataaagattttaaaactctaccaaataatatttttaaagactttcatatatggtgagatttaaacctttaaaatacagggtttttttgtttttttttgtttgtttgttttgagactgaatctccctctgtcgcccaggctggagtgcagtggcgtgatctcggctcactgcaacctccgcctcccgggttcaagtgattctcccgcctcagcctcctgagaagctgggattacaggcacacgccaccacacccagctaatttttgtattttcagtagagacgggttttgccatgttggtcaagctggtctcaaattcctgaccttgtgatccgcctgcctcggcctctcaaagtgttgggattacaggcgtgagccactgcgcccggctaaaatacagtttttaaaaagttagttccaaaaaaaaaaaaaaagagttcaaggccaggtactgtggctcacacctgtaagtccagcactttgtgaggcaggaggatcacttgagcccaggagttcaagaccagtctgggcaacatagtgagatgctgtcgctacaaaaaaaaaaaaaagccaggtgaggtggtgcatgcctgtggtcccagctactcaggaggctgaggcgggaggatcccttgagtacaggagttcagggctgcagtgaggtatgattgtgccactgtactccagcctgggctacagagcaagatgctgggtcagtttttttaaaaagttcaagtgttttttgagtcactagctataatttttgggaaccaccgttaaatctgaagattggaaaagcagaaagcatgttaagagaattggaatattctcctaatgcatgaagtatgaatcactttctgaccacaaaattttttcatggtacgtctttataaggcctgctatgaggggagttctggaaacaggaggaattctagtgatttagtggaatacagagggtggggcatcttgtggtggccctgggagagaatgagtttggcaggtgtgatgggagcataaaagggagtgatggaaggtgaggttaaaaaaggtagataggggctgtgtgtggaggctcacaccagtaatcccagcagtttgggaggccaaggcgggaagatgatttgagcccagtagtttgtggttatggtgagctatgatcaaactaaactgtagcctgggtgacagagtgagactttgtctcaaaaaaataaataggatctttttttcacccatctctcattactcccctttatgcatccagcgttctggcctgtctgggaatggtgaggagtcagatatgggagattgctgaaatagcagtcagactttaacattgatggcttattggaaataagtgagagagaggaggcgtaagtgattctaagatttcaagtcacaaaaagcaaaacagctacagttggaacaagttttgtactctggccaacaccctcatgattatttttagtttgtggcaggctagatgtaagagttagtctgtgcttgtggccaaactgatactaacaataaatgggattctagtattttgtaatttcaaaatttggcttaagtagaattagataattggaattggaaggggccatctagtttcacataccttcattttacatgtgagtttgctgaggctcacagagtttgacttttcccaaggtctcagggctagtttattacaaaaatgaaattacaatccaggtcttctggcttctagtgcagcaattttcatactttttgcaagttgcttagcattattttcatttgatttttgttttattgagagatctgtgaatttcaggatatattatagctataaatgctgatctttaagatctgctatttagctatcaaaatctaggggaaagatccaacttaaatacagaatttaaacagattggcaaatttatcttctaaagagaggatttcataataacacaaaataaataattgcttgatcataatagttgtgcttagttgactacagttctcattgtgtgagaatcagctgaactaaaaccagtttagtttagaatatttagaaatattctatacttggctgcctgaagttaatgataatgaccacagagtcatccaataaaacattaattaaaatgttactttagcattaaatcccactacttgattgttatctttatcaaaggatactgcctttggcagagttactatttcaaagaggaaacagagcaatatgaaactactttgtggggaaaaaatcagaaaatgtgttgtttctgttcttaccaaccttatagcaaggtgatatatttacaactgccatttacaattataattttccatctcaaataattgatcttcctatatttgcacagagagtaatgaatgaatccgctcatacagttacaagggtggcattgcctgcctccttcaactggctgaatgactgaaggaactggtggatattctttcttgatgtgattacatcatctcattttctttttggcaagctatcattctcatacacttctggtccatcacccccttttttagaattgacagttttctgctttcgtggaacatggtctaccctccccatcattgctccttcagatgataagcttctcttgggctgatcaagatgggagcagtggaaaggaagagaaagaccccatagcactgtaggggggctcttggttactattcacacagagagtgaagtcaactttcagctcagtgccttttggcagcctttctcgtaaaatatccagtgttaattcataccattttttacaatacaggtttactttaaccagtgtttattaaacatacattttgatggaagtatttttactttgattaacgtacaaaccgattgactagaaatatgtaagcataagttacgaatgcagttcttataaacgcctgtacctgtagctgttttattttttcttcagataagaggtttgtggtaaatggtttcattctccaagactgcatgtcttttcaaaagacgcttaaaagaactgcaataaacgtgggagtacaggtatctcttcgacatactgatttcatttcctttgaatatatattcaataatgggatgctggatcatatggtagtcctttttttaattttttgatgaaccttcatagtgttttccataatagatatactatttgatcattatataatgtataaatacattgaaacatcacactgttaccccataagtatgtataattatgtcagttataaataaaaatttaaaagaagctgaaaatcattcaaatagtttgctcactttgttttcagatctagtagtatatattgcatttaaatcaatctgataaaactgataattttaggataatcatatttagtttattttaaatgtacgtagtctacattttaaatctctgatataagattgctgcctttttttttttttttttttttttttttgagacttgagtcttgctctgttgctcaggctggagttcagtggcaagatctcaactcactgcaacctctgcctcccaagttcaaccgattgtcatgcttcagcctcccaagtagctggggttacattacaggtgcccaccaccacacccagctcatttttgtatttttagtagagtcgggttttcaccatgttggccaggctgttcttgaactcctaacctcagcctaccaaagtgctgggattacaggtgtgagccacctcacctggcccacactatagtttaattggaagcttttttgttagtaaaagataaaagagtaatatgtcttaaaattgacactttagatttgattagttaacagtagtaattgtacatgaatgactattacatgtacaatgggcctattcttggaagtacagtgtgatggttaatatgtgggctttgcgcaagtatcttaacttttactgtattcttagtattttatgaagattaaataggaaaaaatattcatcggccaggcacggtggctcacacctgtaatcctagcactttgggaagctgaggccggcggatcacgagatcaggagttcaagaccagcctggccaacatggtgaaaccccgtctctactaaaaataccaaaaaaaaaaaaattagctgggtatggtggcgggtgcctgtaatcctagctacttgggaggctgaggcaggagaaccacttgaacccagaagttggaggttgcagtgagccgatattgtgccattgcactccagcctgggccacaagaccaagactttgtctaaaaaaaataaatattcaccacagaatctggcatatagtgagagcctaagaagtattagctattattatagcattataacagtgttaaaactgcatgattgatccacaagcacaaaccagaaagcagttaccagcagtcttcaatgtaaatgaaataattcaactgttttttcagctattttctatagataagaccttttataaacagaaacctgactggcactaaattgctatttcccagactgttgtatttatagaatgctaaaagccgtcattatacaatatattttactactcactagatactcttattctggcatatctgtaaaatatagaaacctgatataaatattcagtagtctagtccaggggaattttgttcaagaaactcagcaccagaggttatatgagaaacaaggttattgtcagtagactttgagaatgtcagttactatgagaactgtgcttgccttaaccacttaacagttttttttgcttgtaatacaagttcaggaacagatgatattatagaattagcacttatcccttctagtaactaatctagtctgattttcaggcccaaagacttgtaagtatattcatacttatcagatagtaaaatacttaatataaaaggtaaacttttaatttaagcctattcgggtggacttttttttttttttttgctcttgggacagcaaagactcatctgagctttgatactttcttttttttgcttgaagtcaatttcaagtcactttctccagtaattttttttcttcataatcagtgcttcccaagggaggcttcttaaatatgattttagaataagtgaatagattattttcattttttactttttaaaactgcacaaaataagtatatgtttttctggcctttgtaggaagtaatttttaaaaattagtaataaggtttgtttttagagcagttttatgttctcagcaaaaccctgcagaactttcccatatatccgctgtttccacacgcatacaaccttcctgttagtgataccacccaccccagtggtacttttttttttttttttttttggcagagtctcactatgtcgcccaggctggagtgcagtggtgcgatcttaactcactgcaacctccgcctcccgggttcaagtgattctccttcctctgcctcccaagtagctgggattacaggtgctcaccaccatgcctcatgcccagctaatttttgtatttttagtcgagacagggtttcactctgttggccaggctggtctcaaattcttgacctcaggtatctgcccgcctcagcctcccaaagtgctgggagccactgtgcccggcccacagtggtactcttttttaacaccatcacccatagtccgtagtttacgttagggttcactcttggtgaataggatatgtattttttctggcatgttatagaaggtaagcgtttttaaatatatagatgtttcttaaataagaaataatttgaaaagtggcaaactcttcagcaattcttgtctacaagtttgttgctttaaaatttcttcagcactcgattcattctaaattaagtgaaaaatatttccttgagagatttctttcacatgctattcatcaaaccaagataacattgtaaaccttctcaacctgttaaagaacatctatgaaaatctatacctaatatacttagtggtgaaatgttgaatattttcttactgagatcagaaagaagacactcaagctgcttttataccacattgtatagctaggcattacaaaaagacaagaaaaagaagtagaaacataaagactggaaagaagtaacattatattacagtgatatgattgtttatttagaaaatcctaatattcaggtattcaggatataggagtgaatgggagagcttccatcttataggaagtcactggttattagctttaatagcaatactataataataaatgtctgcctgagagagtaagggaggcttcacctctgtttctactaagtgacttttaaactgctttaaaaaatgtaagagtttgggctcttattagtatatagtggggtccattatggagatttaatccaatataattatatttacattttatagaattctaacaagagaggtaaagatggatgggaacggtaagagatgagatgcagagagaccagtgaaagagatgatggccttagtagtattggcagtgaggactaaacttggttagagctattaggaggtacaatttataagactcaattactacgtttttggcttgggtgattgagcatggataatggtaaataggaaacttaagaggacgagcaaatttggggttgggagagcagagctaggagtacgaaatgatgttggacttcatgaatgctacatgtatgtatcatttttcttttccttttattcctcattcttttgtcttaattttctccctttttctcctgccccccaacttgacttcaccgtgccatagaacagaagatttcttttttctcttttggggtaagactgataattcagtctttgatgtacttcacttctaatcatcataacaattaaagcccataggactttgatgtttaacagcaaacaaaaatgataaatacatgtagcattcacgaagtcctacatttcctactcctacccctgctctcccaatcccaaatttattcttcctcttaagtttcccttagtaaggtggttggatagttactgtaattgctaggaattcaaggtaccatttctccaactgagtgccaaccagaagtacatacacacaataattggtagtggaatacagtaccacactattaatctgagcatgcatccccaaattccccaagtgtaaaacttctggaaaccccagtttattcctgttactccctctttattaactgagaacacctagctctacatgcaggccccaccatgcctgcaggaatctagagctaagggcaagaccacttcccctgagtttcaggaaagaatagcaaagatggactcaaattcctggtttttgtttatccttgaatattaatcagctcagcctgccataacaaaatacgatagactgggtgacttaaaccacagaaatttattttatcatagttctggagtttgggaagcccaagatcaagatgccagctgattttatttctagtgaggcactcttcctggcttgcttgcatggcctctatgtgagccttcatcttttaagataatataaagaatataacatttctttatattcccagttgtacgggattaggaccctgttggtgtaaccccatttgatcttaattacctcctaaaagccctgtctccaactacagtcccctttgagggttaggacttcaacatatgagttttggaagggacacaatttagcccatagcacttggtaacctcatttcagagtaaagggtggtgcaatgactgttaaaatcaccagtcatttactttccaaatattttgaggttttccagatatctcttactgatttctaatttaattccattgtatttggaaaacatactttatgatttaaatccttatttttattttatttatttatttatttttattatttatacatttattattttaatatatatttattaaatttattattttaatttaatatttaattttattattttaatttaatattttaatttaatttaataaatttattaataatatatatttattatttatatatttatttattatttgacagagtgagatagattctcactctgtcacccaggctggggtgcagtggtgcaatcttggctcaatgcaacctcccctgcccccggggttcaagcaattctcctgcctcagcctcccaagtagctgggattacaggcgcctgccaccgcacccagctaatttttgtatttttagtagagatggggtttcaccgtgttggccaggctgatcttgaactcctgacctcgtgatccacccaccttggcctgtgaaagtgctgggattacaggcgtgagccactgtgcctggccgattttgatttattttttttgagataggatctcactgtgttgcccaggctgaagtgcagaggcacaatcctagctcactgcagcctcaaactctcaggctcaagctatcctcccacctcagcctcccaagtagctgggactgcaggctcacatcactgagcctggctaattttgtgtgtgtgtgtgtagaggcagggatcttattttgttgtccaggttgttcttgaactcctgagctcaagtggtcctcccacttcagcctcccaaagtgctggcattacaggtgtgagccactgcaccttgtgtaaattcttttgaatttattgagacttgtttcatggctcagaatatgatctatcatggtaaatgttttgtgtgcatctggtaaggatctacattctgcttttgatggtggagtgttttataaatgtcaagtcaagttttctatatttttagtgatcctttgttaattgttctattgattactattgaaaaagggtatgttgaaacctccagataaaattgtgggtgtttctatttctccttaaaattccattggtctttgcttcgtacattttgaagctatgttgttaggtgcataaatgtttagggctgttatacgcccttggtgattggcttttttatcattataaagtagacctcatcactagcaatatcacttttttctgaaatctatttaatgtggtattaatataaccattccagctttcttttgattagtgttagcatggtatatctttttttaacctttaacttttaacctattatttctttatattcaaaattgacatctggccaggcaccatggctcacacctgtaatcccagcactttgggaggccaagatgagcggatcacctgatgtcaggaatttgagagcagcctgaccaacatggtgaaaccccgtctctaccaaaaatacaaaaattagctgggcatggtggcatgtgcctgtaatcccaggtgctcgggaggctgaggcaggagaattgcttgaacccataaggcagaagttgcagtgagccgagatcgcgccactgcactccagcctgggcgacagagcaagactctgtctcaaaaaaaaaaaaaaagaaaagaaaaatggacatcttttaagtcatatatagttgtgtcttgctttttaaaaaaaaaaaatctaatctcacaacgtctgccttttaataagatgcttataccattcacatttaaggttattgttgatatagatgggcttaaatccgctatttacaattttatttgtcccatctttcttggtgcctttttcactctttttcttttttcctcgctttgtcacccaggctggagtgcagtggtgcaattttggcaagcgagtcttctgtctcagcctcccaagtagctaggattacaggcttacaccaccatacctgactaatttttgtatttttagtagagacaatttcaacatgttggccaggctggtcttgaactcctgacctcaggtgatccgcccagcctggcctcccaaagtgctgggattacaggcatgagccaccatgcctggcccctttttcatgctttttctgacctctttagattttttttaaattctattttatctcatttgttaacttcttagttatacctcttgggttttgttttgttttttactactagttactttagggtgcacattatttttaacttgttataggctacctccaagcaatattatgccactttgtgtatagtataagaaccttccatttcaccttctttgggcctttatgctattgttatgcattttatatccagactgttataaatcccacaatgcattgtgattatttttcctttaattatatttaagagtgattttaaaactgagaaaaaattatatttacctatatgattttgtgatttccagtgtttttgtatagatatagattctcagatgttattttccttctgtcagaagaacttcctttaacatttttggtagggaaggtctgctaatagtgattttttttcagtgttttgatgtctaaaaaagcattctgctttggttttttaaatctaattgatgggatttttttttctttcactgctctccatttctctggcgcttgctttctgtgtgctactgtctcctcttcaatgctttaactgtttagaacctccccttctctttcttttgccactaatttagggagactgctggcctctatgtggctttcccagtgcttcagcctggaaacttgctccagacagtaaggtggggcagttgttgggctcacctgtttatttccccacctgggataacagtcctgtcctgtctgctggccagtgtctgaaaacagttcttttatatattttgagtggtttaaagtataagaataaattagatctgttactctgtcctggctgaaaacagcccagtgattttcaaagtcaattagccaccccaccagccttgtggaaaaattcataaaaggagtgaatatagaaatcaggttttccctccagcctatcacctagtaggaagataaggcttatggtaaagtcctgtcctctctatgtatacaggcccaacctgagtaaagagaaaagcttcccttctcccctaatacatatcattcccatttcataaatgaagaaatgaagtaacatgcctgtacttgctctgattggacttactagatcttactcccttctttgtaaaattgaattctacagtgaatgttttacttactgcagttacaaaacagttattaaaggacaattttattttcaaatctttgcatgaattttagttatcacttttccttggccatcagttatgttatatataatcccatttcatttcttaaagggggaagattttatgcttcatggcattccttgaataaaatacattatgaatgaaatacttcatgaaatcaataatttcataatttatattctggtcctttgtataaaatctttgctaagaatgtcttctgaccatatggagaagtatgtttatagtcatttttaaaatatacttgtcaactacactgggcttgctatttaaaggtcaaatactaaccgaaaactaattaataattcctatcatagcaaagtgtgccaaaaatcaaagggcagagtcctttttcctcatacatttcttaggggtaagaattattatttcacctttcccagagttactcagtatttggatttatgcctacttgatcaaaaagcctattcttttctcctaattatgctacactgtttcaccatcacagttccatagaaaagtatcagatttcagtatttcaggtttaaaattagttataattttggaatcttatttaacccttaataaaattaacttttatggtattatttatttaaaccaacagaagaaattattataagcaacatggttctcaagcaatagatcatctcttactagagaaataaggattaagagaactacttgcttaagttgtagtcaatattttatgttcactaaattgaggcactgtaacttttgaacagtatcatgaactaaaattcagatgaaattagtcttttccactttaagatgtttttagttaatgggtatacagctaccttcctataatgaaggaaaacttatttaagaaatactgtctggtcaggtgcaatgtaatcccagcactgtcagcctacacctgtaatcccagcactttgggaggctgaagctggaggatcgcttgaggccaggagtttgagaccaacttgggtaacatagcaaggctcctgtctctacagaaaagtttaaaaaaatagctgggcatgatggcgcattcctgtagtcctagctacttgggagcctgaggtagaaggatcacttgagtccaggagtttgaggttacaatgggactgcctattcaatttcaaaacacactttgaaccatgcaatttcttgggttagcattgtgttttagaacactttagttatttgtccagccaacgaggaaatctaacttttcgtcagtagctttcagtttgagtgttaaattcgagatatgttgcttgctttaaaacttgtttcttacattaaaaaatgtaaaatgcattctagaaattatatatatatggcaaactaatttgccataacacataggcgtaggtgtttgtcctattacttggatttatcagctctgtatcctttggaaagttgaacaatattgtaagttgaatattgtcttttttccctttataccataattcttcaccttaatattttcatcaactcataaaatcttaaagttggaagactttttttaagaagtggtgtactttgatagttaaagtaacctagaacaaaagaggttaatatgggagaatgtggacctcatgaaatccagcacagtgcttatttttcactaactagtaccaccttacaaacagtgagacctaggcaagagtgagatgtgcagaattcccagacttcagttttccacatacatgctgaaattttaaaaacaggtttattttgtcatacatgagacaatgtgaattttttaaaattatgaagcatatcatagctacaaagagcatatacattaaagatggtttagagaacagcaaaatgacctcccatgcagttgctactcagcttgagaagcagaaccttgtgtgctgactcctgtgttcctctcctcaggtacatccccaaaatatccactgttctgaattctgtgttgtctcttttaaaatattttatcacatatataaccataaactatgttgtttagcttgttttttaaacttttatgcaaatagaatcatcctatagtgttctacaacctgtatgtagctgtaggttattattcttgtacttacgtttactcctgtatcccattatatgagtgtatcacagcattcattctatggacgataaacacttgttttttccaaaattttgttgttatagacagtgcttctttgaacattcttatattagtctcctagcatacatgtacaagattttctctaggttatttacctaggagagtaattgagttgtagagtatgtacttcttaactaggtaatgccaggttatttttgaaagtgtttgcaccagtgtgtacctttactagcagtgtatgaccacttctgttgctctatacctttagcaatatttagtcaattttcctgcacaatcctttgaatgtgaaatcatatgtaattgtagttttaatttgtattttgcaatgattaaggagttctacatcttatattcattaacctttcaggattcttaggtgaaatattctagatattcatcttttgtcagcatttgcattgcaaatattttctttgtttttggcatgtcttctcagtctctgtggtgcctttggtgtagcacttcatcttccttagtccataggaaccttcgtaatgcctgtggtttaataaagacaagtaactctgaactttcaacaaccaacttgggaaacaaagttgtagaacattagtttttagaaatttggggctacttttaagctatatttataggagtgctagtagaacacatgtgaggaatacagggaggcctactttgggatgtttgaaagatgggagtctgggaaaagaacttgttcagaacacacaggaaacaaaagtacagtaatgactttccttaggtaccccaccaccaccaacgtcctgccctaacctgttgaacttcctctagctctaattttactctattgtatacaaatattttttgttttttgtcttattttcctgctgtatattgtttctacttcatttgttttgtttctccctgctgcttccccaattctgtcttcattttgatttcaattcttaattacttatccttctagtcttttctttttttttattttttaattttttttagatggagtcttgctctgttgcccaggctggagtgcagtggcacaatctcagctcactgcaacctctgcctcccgggttcaagcgattctgctgcctcagcctctcgagtagcagagattacaggtgcccgccatcaggcccagataatttttgtatttttagtagagacaggatttcaccatgttggccaggctagtctcgaactcctgagctcatgatgtgccctcctcagcctgccaaagtgctgggattacaggcatgagccacgatgcctggcctttttttttttttttaactacccttacctccactgaggatttttagggcatgaaaggattccgtatgatactctcatggtggatacatgtcattaacatttttccaaacccagaaaatgtatgacatcctgagtgaaccccaagataaactatggactttgagtgattatgatgtgtcagtgtaggttcatcaagtgtaacaaatataccactcttttgaggttgttcataatcgaggaggccacacaggtattggggagggggtataatctctacttgccactcagttttgctgtaaacttaaaactgctcttaaaacgtctttatatgacctctaacgtgatattgaattttttaaaaaacctttagttaaaagcaatccaaaaaaactcttaactccacaaaaaatgactatgtttggattattaagcagccaggaagggaatatggacacttatagattgaaggctttctgtaattaagaatttgaattggcgagggcaagatgtttgttatgacagctaattttagtcttctgggaagagaatggcccttcaggattgtataaaggagaagatttaccttccttagcttcagatttttgtggtctagaaaatatatttgttaacaattgagtgaaaaattaagtagttgcataaaatagatggaaatttctttaatgaagtcatcaattgtactattattaaaatagagtttttgttttgtgttatactttcatggcacttcagttaaaattattttaatggaagatacataaaaactaatcacatgacatattcatttctttgtcatgtaagcttttaatctattcataatatcatttgaggagtttaaataacattaaaaatatgcctttttaaaagttttgctgtatctaggatagtgtttttaaaaaactatatcacattgtagtttttacattactgtagtaaatagttatggtaacaaattcagattgacaggtaattactgttttacattttgcagtatttacaaaagtgagaaaggtattagtacccattttattacttagctgtaattgacttagagaacgtcacagaaaatcagtgtggcctgagttctgagtacacagccctggcatggctcatatcagaggagcatcttctgtgtttccagaattctcttaggttctttttaagtcttttatctagaaatacttggattctaacattacttagatttgttgttccaagaagctcaaagggctttataaaatactattagtcttaaaatatctaaaatcattgactgaatattttatattgattctgttcataatcgtcttaagagtgtgtgtgggcctgatacaatgtctgcagacatgaagaacagcattagatatatctaagagacattttagagcactggagagaattaaattccaaattcccacatgtctcatcagtcactaagcctgcctttctttccttcatttccattggtgattctagttgtcctaatcattcacaatcgagaattagcgattagagaattagccaaagcttttcctttggcttctgtgagatttagtgtgatgaaatctgcctctcaaaattacattagattgagagggacctacttttagcattttgttgaagacacaatcagatggcagaattggctattaagtggcattataaattctcttaagatactggtggctgaggcccaggaacatacacgaatgtaatcatttcagtcctgtgtgtgttaacaactcttaattaaaatcattgtgaataagttaaattgtttttaaaaatcatagtaaaataaaagcaaaagcaaaaaaaaaaatgcataagcattgcctgatgttctgaccaccttcagtctgacattttttctcccttaatgtagggctgataatctgagttttcctgtcttgtaatatgtgaattcttcagttggtcatacttcaacatagatcaaagttgatctacaagtgctagtgcctttcaataagctaaatcactacacttttatgcctgctttcattttgcttatatatttattgagtacttgctatgtgtcaagcagcgtcctaggcactggtaataaaatgatgaatatttagacctggcccctgtactaatagagtttatagttgagttagaggcaaacagggcattataataaggtattaattggaatttaactgaaatcaacgattagaagttggcagattttcagtttcttcattgaaaaatgtgcagtttgtgacagggtactcttaaattgtctacccttctccttcccttccctcttaggtattttctgactcattcacagcccttcttttgcaactttgaaagtatcaggtttagaatttgggtggctctggcagagaggagtctatcaaatatggctgacattgagaaaacacaactaatgttatgtctcattgacaaaaataggggtcagaggggttgcatgggcagagaaacaaagagcattccggcaggaaagcagaaaagtgaactggaaaacctagttagaattcataggaaaactgggattgggaattagataccaacatgttttacagtaaggacatgaatcaaacctcaagaggctgaataactgttacagaataggcaacaagaatgaccttgacagtaaactgacaaatatctaaggcttcatgttctctctgaactctgtccataattcttccctgagccacaattggaattgaactaataacaggggtagagtttggcacactggatgagatttggaaataaatccccaaatttctgacattttccctacacaagagacgtaggtttaaggcccccctttaccattatgttgctgtgtatgcctgagcaagtcactttacctctctgaagtccaatttcctcacctgtaaattaatgaaaatatatcctgaattccacaaaaaaaccaactcttggccattctctcgctctctttttttttttttcagctttcccttatcttttctcccacagaagctgcttatttctctttgatgataaagggatcaagtttagttttaattaactctaggtgttttttaatgcacaaaggagaacattgaaacactttatttataaccagatgtaactgtacagttttgccatgcattataaggataatgtttccaagttggatatcctcttgttgtttctggaaccacatgatctagacttttcccgtagtacttaaattgagagctttaaaaaggagagacatgtggaacaaaaggagtaactgtccgaattcatgtagtaccaatgggtttcaagatgatcctccacttactgataaagtgtgtggccttgggcaaatgattttacaaatttaggattctgtggggaaagagaatcctaatggggaaagatgtatatcatagcatttagttttattttaaatttaacacttatatggcatacactatgagccatgcagcattctaaaagttacatagataataactcagtccctgtaactgccctctgaaagttgatactattatccccatttaattaggtgaaatactgaggaaagagatgttgtgtaacttgtacaaatccaaacaactagcaagtagcagagctggttgacagacttcagagttgagccctttactactgctctatgctgcttcatgaggactaacttgataaaacaattcacaactcaggttgatggggatcatctttgtttaattgaatgtttgggttttacatgacaatttaatagccagttttcaaagagctagatgactataaaaacgtaacttttttttaagatggcaccttatgatattacagtgttttagtcataattttgaactttggtgtttattgtgtagatgcagagcagagatacttggttgaatttaaacaaaccacactcaagttcagaaaattgcttttaaaagtcagtctgtgatagattttttacttatagttgataagttgatcacttgtcttttttcataatagagtgttgaggaataaaatagtttaagttttgttgtggattaacaagaccaagaataaagagtattttcatattagaaaatactgttctgtagatgagaatatttatgtataactaataataaaataatagtgtacacataaaattgctttcacttatagccgtggtcactctttttcacacttgtcactaatgtcaactttgcctcttattctctgcttgaagacttttcatggtatataaaatgacttgtactaggtattgagaaacttgaattctagtttgctattgcctggtttctagtatattatttaagcaaggaagttgatgtctttgtaccttattttccttatctggaagtaaagtaggttaggttaggatgatttctaagattctttacaattctcacttaaaacaggtacacatggccaggcacagtggctcatacctgtaattcgagcactttgggaggccaagacgggtggatcacttgaagttaggagtttgagaccagcctgaccaacatggtaaaaccccatctctactaaaaatacaaaaaattagctgggcgtggtggcaagtgcctgtaatcccagctactctggaggctgaggcaggaaaatcacttgaacccaggaggcagaggtttcagtgagccgggatcgcaccaccacactccagcctgggtgacagaacaagactccgtctcaaaaaaaaaaaaaaataagcaggtacacatattcctttgagactggaacacataaatgagaagccaaaaatatttcagtgattgtggaatttaacccattagtagatgtacatccatagcatgttaagaatattctaaagaaatgaataggttgatataactatagagctgtcaaatcgtgctgaatttttcctgaggtggttcatttgcattgatctgtcctttcctttttcatggtcacatttgtgattaatgccctaagttttggagaagtttggctgaagttaacagtacagtctgtccatggaacagagtgaaatttacccatgaggaggtgaaattcatgacctttggttggtacactaacaccctacagtaaccatttatagcctagatggcttctgtaaattctggggaagagaacaaagtaagtcaaagatcagtgtggaaaggagttaggaatgggctttctcatggaaaagattggcagtccagaaagctttgggttggtggaaaggagaggaggaagtcatgcttgataggttaaaaacaaaaacaaaaacaaaaacgtttaagctcaagaggattgtaatggaatggctttttgggaagattaatctgtattaggattcaagatggataaggagatgcctagagtcctagacaatagctaggaaacttgtagtaattcaggtataaaataataagaacctaactaggtaactgttttggggataaaaagcaagagtttaattccaaggaaaatttaaaacaaattaaaatttagtaatttcaggattatacaggagaatctcctaccatttgtgccatagacttagaagagaagcagttaaaacttcttttagtctcattttgagatttggaaataattctctgtgagtgatgatattgcatatttaatacttttctagaaagggctgttgtattacatgaatgcccattgtgttaagacaagactaagtaagtagacttttgcatttatcgtttatactcttcagaataattgacagtatatgtcacatttgtcttatcttccatcatcaccatctactgagctcactattttcaaggtcaccaatgacttccttattgtcaaattcaatggtcacttctttgtttatattttattaaaccttaccagtgtttgagaccattgaccatgcactcctggaaacttcctattctctcaaggcttccattataccagcctgtaatccagctccttttgctgttcgtcgtcttctaattgttggagtcccccagggctctgtcatgagttccctgctctcctctatctacatattcctctaggtaactcttgattctaaatactatccaaatgcgtgcgatccccaaaactatacctacaaccctggacaactataataacctcctaattagtatagctactttcattctttccccctattcttttatccacatagcagccagggtgatcatttttaaatgtacattttaaaatgtaaatgcatttctctagttaaaaccctctaatggctccccattccatttagaataaaatctaaactttctgtcctattttcgaaatcctatatgatctggtccctgaccacctttctaaaccttttttttttgacacggagtctcactctgttgcccaggtgggagtacagtcgtgcaatcatagttcactgcaaccttgaactcctgggctcaagcagtcctgctgcctcagcctcccaagtagctgtaaccacaggcacatgttacacacctggctttatttatttatttatttatttatttatttatttatttatttatttatttataatagggacagtgtctcactgtgttgcccaggctggtctcaaactcctgggcttaagcaatccacccatcttggtttcccaaagtgttgggattacgggtgtgagccaccatgcctgactaaacgtccatctcttgctgctttccctctctccccactgcaatttcagcctcattcaccttctagttcctgggatttgacccattcgttcctacctttgacactgctcagaatgctctttcccctaatttttgaatggctagctccttgtcattcagatctcagctgaaatgttacctgcttcaaaaagccctccttaaccacctgatataaagcattgccataatcattctcatatcacatcatcctttttataattatggcatagtacttagcatctgatagtttattaatttgtttttgtttttctgtgtcatcacaacaatataagctccaagccccagtgtctacgaaagtgcctggaacctggtagttgtatggtatttgttaaataaatgaagtctacatagtggttatgttaactgagagtcccattctttgagcataacctcttgcactaattcttaatatccattctcagatgcctcaactcattaccatgtgtttctcatatggaatctcactgagattccagttcttacctaattttttaaacatttgtttttaaaaagaaaaagtgtttcagatactaagttccaatttctcaataccagaaccagtatactgttacctgtgtgtgtcttcacaaatgccagtataaagtaaccaaactatgacctactttaagaaatagtaggccaggcgcagtggctcatgcctgtaatccagcactttgggaggccgaggttggtaaatcacttgaggtcaggagttcgagaccaccctggccaatatagtgaaaccccatctctactaaaaatacaaaaattagctggacatggtggagcgcacctgtgatccctactcaggacgctgaagcaagagaattgcttgaaccccataggcagaggttgcagtgagtcgagatcatgtcattgcactgcagcctgagcgatagaacaagactgtgtctcaaaaaaaaaaaaagaaaaagtaagtatgttagtgtattctcatgctgctagtaaagacatacccaagactgggtaatttataaagaaaaagaggtttgatggactcacagttccacatggctagagaggcctcacaatcatggcagaaggtgaaaggcacatcttaagtggcagcaagcaagagagagtgtatgcaggggaactccgctttataaaaccatcagatctcatgagacttaatgagacttactcactctcacaagaacagaatggaaaaacccacccccatggttcaattacctcccactgggaccctcccatgacacgtggggattattacaattcaaagtgggatttgggtggggacacagccaaaccatattagtagaggttacaaaaagtaataactctgattaattaaaaatatatgacactgggactgcttttattacatattatttttcagttaataggagttacttatgctagtcagagaatagtggtttatttacaatttagtatgtgggattatgtgtttgctttatgggactgataatattttgttgtatgtatgtctgtgcttatatatgcttgtgattccacagatacataatcataacattgttattaaacattagggttttacttatattgtagatatgtttccttgtcaaaagtaggtatgtcattattttagatctaactggaccacagtatatttaaccagtctcatattgttgaatatttaggttgatgccaatttttttaagttggtataaatgttttcataaacatccttgaacatttggccaggtgtacttgtcctgttatttcctggggataaattcatagaaggagaatttttattcacaatactcgattgcgcatcatgaagtaaaaaggacactttttatttttattttatttttttgagacaaagtctcactctgttgcccaggttggagtgcggtgtcacaatcccagctcaccgcagcctcaacctccaggctcaagtgatcctccttcctctgccttccaagtagctgggactgcaggcacatgccaccacaccggctaatttttgtagagatgaggttttgccacgttgcccaggctggtttgaattccagagctcaagcaatcagcctgcctcagcctcccaatatgctgggattacaggcataagccactgcacctggctggacattatttttagataaactttcttagtagcaattccccaagttgttcccacgcctcttccatgttaatccatggcataagaggcctagactccttctccttctctggcaggctttagaaataaacagcatatataacagcctagcaatgggaaagacactcttcttccactcccattgaagtagatttgagccatcctgctttgtttgcttttttcctaaatcaagaaatgtgtgtgtataatgagtagtgcttcagctgggctcctggttagagtctctcaaggagttagtggttctggtctctctcctgtggtttttctggagaacaaagaataaattctcagagttggaaaaaacctgagaacaagcctaattgaacctctcgcttacataaatctcttcagccacaccctggcaagtgtttatcaaactttgcttgaacacctctagcaatgaagaatttacttcttagtctattttgtctacggatcaccccagttgttcaaagttttcccaatggctaagttgttcacttttctcgatggacagaacaggtggggaattttaagaagctgctacactccagaaccagaagagcatgcaaaagcagtcagtctgatcatagctcctagacaacctggtgcaagcacaatcctcattgaggtcttaggtagggacccccagaactgtgttttcattggttaatcaccggtgtccagtgatctgtccttcatagcctgtgaaaatttataacatcctttctgttctcttcaatattatattttatgtcaaataatttatttttcttttcttttcttttcttttcttttttttttaagacagtctctctgtcacccaggctggagtgcagtggtgcaatctcagttcactgcaacctacacctcctgggttcaagtgatctcccatctcagcctcccaagtagctgggattacaagcatgcaccaccatcctggctgatttttgtatttttagtagagacagggtttcaccatattggtcaggctggtctcgaacccctgacctcaagttgatccacctacaggagtgagctacaggagtgagccaccacacctggccaaataatttatttattctaacatgtaactggtaagaaggcctagcagttcatatttgtctagatttgaaacattttttgtgttttttttcttgtaaaagtagactttttcagatgctctaaaatcaaactttatttctagtgtgagctacgtcctcaaaatatcaagttagatctattgaattctctttagcctgacatatttcccaaaaattagtcatattcttcagtaaactttgctgttgtgtttagaggttgacattataaaaattttaatgatgtaacttttctttaaaaaaattttttactgccaattttcaagtacaatctataacaatgtaactgttctgaggactactatgatttagtattctcgtttattaaaattagacattcttgacaaatttctaaaagttgtcaccacatatcacttgtacttaggtaatattttatgtgtttcaaaataccattgtataatccatagtattcctttcaatacttatgtaatagttacattggtaattaacagataactagtatcatctctaatcttttgtttcaaatttttcatttaaacatttaacacactaagttcagtaagtcatctgagggattgcaaactccagtcatggttttgaagtttgtttagtttacctcccacagagacaatgaccaaagcaaccaaattttagtccaatgttacattatttaaaagtggcttggggcagtggctcacacctgtaatcccagcactctgggaggccaaggtgggagaactgcttgaggccaggagtttgaggttaaagtgagctatgatcacgccactgcactccaacctgggcaacaaagcaagaccctgtctctaaaaaagaagaagaagaagaagaaaatactttttttaacagttcagtttttatcactttaaacttgataattcctactgcaagagttagccactccctgctaggagctttgtagatgtattacagttttgcaggcataaggataacaagtcatagagtcctggtaatacctctttctttcactctctcattgcactttccccaccctcttccccactttgtatgtcctttcctaatctaacctgttagttttgcataattttgtcagctgcagaaatgatcaggtgctctttaggatatgtacagtggtagtgtttaaaaagtagttttaagagacatccttgttaagagtgaagaaaaattgggccaggcgcagtggcacacacctgtaatcccagccctttgggaggccgaggcaggtggatcacgaagtaaggagatcgagaccatgctggctaacacggtgaaaccccgtctctactaaaaatacaaaaaaattagccagacgtggtggtaggtgcctgtagccccagctactcaggaggctgaggcaggagaatggcgtgaacctgggaggcagagcttgcagtgagctgagattgtgtcactgcgctccagcctgggcgacagagtgagactccatctcaaaaaaaaaggaaaaattgatgaggggaatgatgagtttttagccaggctttggtacacggtatttggggagatcatatacattaatgctctggttagaggcctgcagatgggtcatggttgattccaaggtgataatgcagaggtagtcagtcaattatgtgttacaattatgtggatttggatttaaaagaattatgggctctcttacaagttaattttacatcttttattattatatataaattagtaataaattatataaattatttgtatataataaattattaataaataaatatttaaataaaatttatttattcaaaagtagagactatataatgtgaaaaataagagtaaaagctacattgtatgaagctaagtttgttttaaaagttatatacatgcttaaaataaggctataaaattaacaataggtatctctgaaaaatgagttatttttgtcttactctctgaattttataaatttctcactaaatgtgttactttttaatttcaaaatcattatttaaattttgaaatagtcacatttttggaaagttttattttccccgatgttttagtgtgctcaggctgccataaaataccatagatttgggtggcttaaacaatggaaatttattttctcacagttctgaaggctggaagtccaagatcaaggggccagcatgttcaggtcctggtgagagctctcttcctggctcacagacagctgccttctccctgtgtgctcatgtggcctttccttgaagagaaaaaaagcaagaaggagacacatgtggcctgggggaggtgggggaaagcagggagagaggagatcactttctcttcttttaaagctacatgcgttaccacccttatgacctcatttaactataattacctcctaaaagccttatttccaaatagagtcacagtgccagttaaggcttcaacatatgaatttcaattcagcccatcactcaataattctcatttatagactagcaattttttttatttttgatgattgtcttctctaatttcataacaatatactttagttactagtcaaggtgcttttgattacaaacaattcactcaacaagcttaaaggaattgattgctagggatacagagttctgtctcagtaggtttatgagggactggaacattgtcaggaatcaggcaactactttttctggctttctatgtctacaaagtctcttgtttctctcattcactatatagcttatttcattctctttgctgttccatgcccatggcagtctatggtcattgcatagctcctgggtgtacattgcctcagtttaagtcatagcagacggggacaaaccaacatctctgaatcctaactccagtgtcctgggaaatagactgacccaggatgggtcaggtccccactttgaatcaattggctttgttggggttggggaacagggtcacacttttatatatacatgtaaataaagacagggtctccctatattgcccaggctggtcttgaactcctgggctcaatggattctcttgcctcagcctcccaaaatgctaggattacaggcatgaaccaccacttccaaccaggggtcacacaacttaaagaaggctgccggtgttcactcttggcaatggccactgttaaaatcttgctctatgtgatcttcctaaagttctttcagacaactgggtagatgttactttcatttaacagaagaaaacattcagtgacttgtctcaagcaacacgtcactaccgtagaacccttcctcaccactgtcttcaccacataccccttagaacctttcatcaccactgtcttccaccacatacccctactcaactactggccacctgtctgtgctcttataacatagactgctaacgtctgtacgagtggttatcacagtacgttataatatgtatttggttgttgtgtctactactctgagaatgtttaaagtgtatgatccatgtattttttaacctggggatgtatgataaactggatgaattgactgggaatagtactagagtccaggttctggagctaaactgtccagcttcaaaattcaactttgctacttcctagctggatgatcttgggcaaattacttaacctctccatgcttcatttatctgaaaaatagaagtaatagtcctcaccttctagagctgttctgaggattaaatcagttgacgtgtagaaggtacttagaactgacagtgataagttaccaaatgtcagctgtcattttatatgttccaaatggtcactttagagaaacttttctgaatggtcttaaaataccagtttaataaagtttactcccaaggcttcttcctttcctgataagccttcctgaagctggaaaagagcattcttcatcatacccttcaaagctattcataagctggctccagtctttctttttgcatacttttctctacatgagatctctgctcaaattgcaccttctctcttcccattccatgctgcatggttctgtttgtttttaaaattctttgaattgtaaaggtttcaaaactaggaactatgtgcatacgactctgtgtcctcctattacctgaggtataataggcacttgaaatatttgttgcttgattggccgagataagagcaactttttgtacaacaaattgtacaacaaattgaatagtgtgtgcacttttgtgtatgaatgttcaacttgtatagcaagttaacagtttttaaaattagctgttaaaaaactaagagcactcatgagaaatatttaaattaccataactacgtgaaaaaaatccacagattagattgtttgaaactgtaataaccagaataccacactccacatattgcaaatcaggctttgtgccgctgctggataatagcatttcttccttagaaattgttattactatatagtaaaagcacagaggaccccatgactatgaattttcatgtcacggaattagtgctgtgagactaaggaactagtaaagggagggggagagaaagagaaacatgcagttggatctgtatctttttctaatatgtaaataatagcaatagaacatcttagctaaaaatatgacataagacattttaaccttttagctattagtgatgatttgtgtgcaaaaactattgtacctgacatccaaaaatattaattttttttttttgagacaaagtcttgctctgtcgcccaggctggagtgcaatggggtgatcttggctcaccgcaacctccatctcccgtgttcaagagattctcctgcctcagcctcctgagtagctgagattacagacatgcgccaccacacccagctgatttttgtatttttagtagagactgggtttcaccatgttggtaaggcttgtctcaaattcccgacctcaggtgatctgcccacctcggcctcccaaagtgctgggattacaggcatgagccaccacgcccggcccgaaaatataattattataggctataaagttaacaatagatatctctgaataatgagttgtttttgtcttactctctgaattttataaatttctcagaaaatgtgtcactttttaattagaaaagtaagctaccacacctgacccaaaaatgtaattataggccaggctcagtggctcatgcctgtaatcccagcacattgggaggccgaggcgggtggatcaccggaggtcaggagttcgagaccagcctgaccaacatggcaaaaccccttctctactaaaaatacaaaaaatagccatgcgtggtggcacatgcctgtaatcccagctacttgggaggctgaggcaggagaatcgcttgaacccaggaggcggaggttgcagtgagccgagattgcgccattgcactccagcctggacaaaaagaatgaaactctgtttcaaaaataatagtaattattattattaattatattacaattataattaatataccagttcaactagaatttggaattatccatcatctcctcacttctgtagtttgtgaatcaaaagtttagtatattttgattctcatttttattattttcactctatgttaaatgaataatgtgtaatgtgacattagttattttaggcagaccagatgagttcttactaagagtacattaaattgaggaccctttgccccttttttatatcagatactctggatgaatattttgaatatgatgcagaggagttcttggtctctttggccttgctgataacagaaggacgaacacctgaatgttctgtaaaaggtcgaacagaaagctttcattgccctccagcacagtcttgttacccagtaactaccaaacatgaatgtagtgacaagctggcccaggtgagaatcttgtgttgaatgctttgtatcttttatataaactagtttatgttcatcatcacctttattttattacagttataattgtcatatttcaatgtaaaattgatcataatcataaagggaaaaaatccaaatcctggaccatagctaataaccttggctctcaaatgaggctcttgaaggcattgcaggtaactctgctgatcagtggggaagtgggcacccaatttcatacctgctgtctcataagctagatttaagactatctctgctgttggattttactttatttatttatatatttgagacggagtctcgctctgttgcccaggctggagtgcagtggcgcgatcttggctcactgcaacctccacctcccgggttcaagcaattcttctgtctcagcctcctgagtagctaggactacaggtgcgtgccaccacaccaggctaatttttgtatttttagtagaggcggtgttttgtcatattggccagactggtcttgaactcctgacctcatgatccgccctcctcagcctcccaaagtgctgggattacaggcatgagccaggacgccccgtctgctttattttgagaatctcagccctggctcatccactttgtgttgttattcatttggtaaattgatgttgttatgattattttccctgcattaaccaatttcccttttgtattcctttttttttttaaatgggaagatattttttgttaatgtttttgtgtaacattgttcaaaatattttggtgtagtagcatataatttgctttaagaatttttctcccacttattagtttctcaaatgtgatccaaaattgtaaactctaaaaatcgtgtctattttgaggctgggcgcagtggttcacgcctgtaatcccagcattttgggaagctgaggagggtgcatcacgaggtcaggagttcaagaccagcctggccaacacagtgaaacctcatctctactaaaaatacaaaacttcgctgggtgtggtggtgggtgcctgtaatctcagctactcgggaggctgaggcaggagattcgcttgaacccaggaggcagaggttgcagtgagccaagatggtgccattacactccagcctgggagacaagagtgagactccatctcaaaaaaaaaaaaaaaaaagatcttgtttattttgagcgtttaatgaaaatgagtttttaatattttggtgttcggatttaagaagtaatctttcctgtgaaatgatgaaattaataaagtaggcaaggctgggccaactcagaggcctgtcagacattggatgtagcagttctttttccacaaggtagagcaaagatacactcctcaagaaaatttgcattataaatgttcaatacagcaggggcactgtggctcattcctgtaatcccagcactttgtgaggccaaggtgggcagatcacctgaggttaggagtttgagatcagcctggccaacatggagaagccctgtctctactaaaagtataaaaattagtctggcgtgctggcgggcacctgtaatcccagctacttgagaggctgaggcaggagaatcgcttgaacctaggaggcagaggttgcagtgagccgagactgcaccactgccctccagcctgggcgacagagcaagtctcagtcgcaaaaaaaataaaataaatgttcattactaatccttgcactctagagctcactaagcatagatccgttattaaatgaggaaacctagatagccaattctgagcaaagctctgcaatagctgactcatttctcacacagatgtctactttacaatgataattttctattttaaacacaaaattaggtgggtttttgagacattttgcttatattcattttctctaagtgccgccaagccagacgaactaggtctgaggtcacattgttgtggaagaataaccttccaatcatggtggaaatgatgctactaccagactgctgctacagcgatgatgggcccaccacagagggaattgatctaaatgatcctgcgattaagcaagatgcattattattagaaagatggatcttggagccagttcctcgacagtaagttgttgaacgtagttcaaagttgttcttggtaaatcaagttttccattacttcttataaattattttaatgtatcatgtctttgaattcctctatgtaataaaattgagatagtatttatatttggcactaaaatgagtaaatatagtacttgcatttagtaattgtgacttcaagtgacatcgtaagtgtattcctatgctcttcaaagcacaaatcctgagtgataagtttatggatctcagcttctgccattctaaaattcagtcattttgtacttgcctacatttaaattatgctttgttacttccttaggaatggtgaccgatttattgaagagaagacgcttctgttggctgtccgctcatttgtgtttttttctcagttaagtgcatggctgagtgtttctcatggtgctattccacgaaatattctctacaggtatgtctagggccaaaaaaaaaggacagtgcgtattcagccaccttggttagcaaccgaatggcattttaccttttaaatagattatttcctgcaattctaaatgtaagtggataaaatttactgaggtttttcaaaacaagttagagagatttggattgactcaatatgaattttgtttgttgtattaaatttggtatgaataatatcaagagaacttttaagcttactttagagaaccaatggacttaatgctgctattataaagtagaaaagttttctgagctgctgaatttttatgtttgacttaatttttggcatcttggataatgtaaacatataggctgctaaacagctaactggctttttaggcagatggccatgagatagggtgtctcttaatcaccttgcacaatggaattagctgaatccatttatgtgctagcaattacaaagtccttttttctgttttaacaaatatttttaagttataatattcttgagctttaatgcttaagtgatctggtgttcttaaaaagatcatctcttccaagcataagctattatatcacttacattggttttatcagaattatatgcatggtaaagtggctaaaagtaaacctcagtggtaattaacgcaaacaaaaataagtgtatgactgctttacatttaaaataatatacaataataaggatctaacctttataatccaataatacagtatttttctgtgtgattctagaatcagtgctgctgatgtagacctacagtggaatttttcacagactccaattgagcatgtgtttcctgttcccaatgtttctcacaatgttgccttgaaagtcagtgttcagtccttgcccagacaatctaattatccagttttgacgtgcagtattcacactaatattggcctttatgagaaaagaattcaacaacataaacttaaaactcatcagcaccataacccaaatgaagcagaacaatgtggtacaaacagttcacagcgtctgtgtagcaaacaaacttggaccatggcacctgaaagtgtgttacatgcaaaaagtggcccaagtccagaatatactgcagctgtcaaaaatatcaaactatatccaggcactggcagtaaatctgaccatgggacatctcaagccaatattctaggctttagtggtataggtgatataaaatcacaagaaacatcagtgagaactttaaaatcattttcaatggttgattccagtatctctaaccgccagagtttctggcagtcagctggtgagactaaccctttaataggctctttaattcaggagcggcaagaaatcattgcaagaattgcccaacatttgattcattgtgatccaagcacttcacatgtttctggacgtccatttaatactcaagagtctagttcactccattcaaaacttttccgggtttcacaagaaaatgagaacgtgggaaaaggtaaagaagctttctccatgacttttggtagtccagagtttagttccccagaagacaccaatgaggggaaaattcgactaaaaccagaaactcctcgaagtgaaacttgtatttctaatgacttttattctcatatgcctgttggagagactaatcctttgataggctctttactccaggagcggcaagatgttattgcaaggattgctcaacacttggagcacattgatccaacagcatcacatatcccccggcagtcattcaacatgcatgactccagttcggttgcatctaaagtgtttaggagttcatatgaagacaaaaatttgttgaagaaaaataaggatgagtcctcagtttccatttctcacacaaaatgttccttgttaggagacatcagtgatgggaaaaacttagtacctaataaatgttttacttcttttaaaaataatagtaaagaaaagtgttctttgaaacatcaaacaagaaatcagtgtcagaacaatcctagtgaaatcatccaaagtacgtatcaggagacacagaacaaaagttctagtttatcaacttcctcaattttgtctcagcacaaagaaaataacttagatttgacaagcagattcaaggagcaagaaatgagcaatggaattgataaacagtattcaaattgcaccactattgacaaacagatttgtacaaataagtataaggaaaaaataataaatgagaactataatccaaaattctttggcaatcttcagtctgatgattccaaaaaaaatgactcaaaaataaaagttactgtgttggaaatgtctgaatatttgaacaaatatgaaagcatgtcctcaaataaagactcaaaaaggcctaagacatgtgagcaaaatactcaacttaatagcatagagaattatctcaataaagataatgaaggtttcaaatgtaaaaagtcagaccaattaaaaaatgaacaagataagcaagaagatccaactaatgaaaaatcccaaaactattctcagagaagaagtataaaagactgtttgtctacatgtgagcaaccaaaaaatacagaggtattggtaagtaacatctaatatgtcaaatgtaagtctcaaatatttgttatggtttaaattttgttcacaggagatctggttataaaggcccaaggttccattatctataggacacacagtctgatagaataataaacctacagaactagtattaacatccttgcaaataacccactctcctaagaacaaatgctaagtaaatggaggaaataaagatcatgctgtttaaaaaataggaagtggtacctttttaaaaaactgttaataggacagtaattgttttcatgacatgttaggtctattatttaggtcttttagctctgttctccccctgctcccccatcttaaaggcctctttttcttctagtcagaagcacccaggccaggcacaatggctcacagcctataattgcaacactttgggaggccaaggcagaaggatcacttgagctcaggagttggagactagcctgggcaacatagtgagactctgtctctacaaaaaaaaataaataaataaaaattggccaggcatggtggtacatgcctgtaggcccaactgtttgggaggctgaggtgggggaatcacttgagcccaggagttgaaggttgcagtgaactatgattgtgccactgcattccagtgtgggcaacagagtgagaccctgtttcaaaaaaacagaaacagaaaaaaaccaaccaaccaaaacagaagcactcagctttttaatatttgatttgtaatttcaagagaatgaatactatataatatttataaaatactacttggattttgtatattgcttgtatataacgttcagttatattacatattaggtttctgcaaaagtagttgaagtttttgccattgaaagtaatggcaaacctcagttacttttgcaccaacctaatagggtacttggttctttttgatacttcaccatatgggacaggtaggacagttatgaggaaactaggactcaaagagaatgacataccagtagctgtacaaagtccttagtgattcaactggcgcccccaccccagtctcttgactcctaatccaggctcctttctactacctcacaataatcaaggacaaatttgtggactgtacaagtccttggttcattcctcttgtttagaaaatgaattaattcctcctgttgcccttttttgtttatttcagtacttataaacaattcttagagcaaaaacagtcagaaatcaaatttgtattagcttaatgtattatttgttagcaggtcagacccaatattagcggtgtgcccattgtgctatgccattggtcagttaatgactttcaaagtgtctatagggaaaccaccaagttactggtcaaaacacctgagttctagtcctggcttcatagtttaggccttaagtgaccgtaaataagtcgtattacttataaaaacctgtttcctcaattttacaagactcatgattaatctcttttgcctatcttagagtggtgataatcaaacaatttataaatattttgtagaccttaatgtactatatacataaaagatattttaagttattttcatttcatttgatttcctaccaaaccaccttttaatttctaaaaatcattaggcttcactttcctttacttttccaagcagtatctcaattatatggaaaatttcttctgaagtaccttgatccaagtctaaatgacctaagtttgtcttctttatcactcaaattagctttcctggacagagttttaaaattttgccatgtttccagtttatatttttcttcagaagatctcgctctaacatggggtttaatcaaatggtagtttccaattttctaaaagtataattgtcacaaaaacctacactggccttaagaatgttcggttcttatgatcttttctgttatctaatagggaggcttaaatctggccgtgatatttttcaagcccactaaggttcatttttttcatgtacctgttttaaatgtaataaacaatttactgtgtgccccttctgaatattttacacatgttggcttacttaatccctctcactttgatatgaaggtaggtgcttttactaactccagtttacaaatgaggaccttgagctagggaaactataaaacttgccagggtcacaaagctaataaatggtagagccaagacccagaatagtcttttataatttttattcatgtaatttttatgaatttctgatctttgggtataaacttctccagtccttaagaattagcctgtttcttgtatcacgtcaaaaacatagtgctgtgactgcattatatataatttttaatttacagtgtttcttatatttctgtatcatgttccaccaaattatatcatctgaaaatggttcttaatattgacatagttttatattttacaatattatatgaatttttcctgtgagtacagtagtcgccccttatccacggtttcctttccatggtttcagttactcatggtcaaccaggtcacaaaataggtgagtacagtacaataagatactttgaaagagagaaagactacattcacataacttttattatggcatattattataattgtattttattattatcattaatctcttattgtacctaatttataaattaaactttaggataggtatgtataggaaaaaatatatatattgttttgtactacacgtggtttcaggcatccactggggttcatggaatatatcccctgagaataagaggggactaccatagtagttttttcacaaattgaaataatcaggtattagtttgctagatgataaattctgaacaaatatgaccatataaagcatttacatttggacatgttttctttagaacttaatttattcagcatattacagtaaccattttagacattgttttccaattggtatatatatattgtgtgtaaacataagatgtagatacacagtttgagcatcccaaatttgaaatgttcgaaaatcccaaactttttgattgctgacaaggtgctcaaaggaaattttcatcggaatgtttcagatttgggatttttgcatttggggtgattaaccagtaaagtatatatgatgcaaatactccaaaatcagaaaaaaaatccaaacttctaaacacttctagtccccaagtattttggataagggatatcccacctgtatatcaccagcttcaccagcaatacctcagaatgtattaggaatgagtctaaaaacaaaaacactgtccaagttctttaaatggtatttaaatattacaattaacatctaattattttcctaacagaggactacactgaaacattcaaatgtgtggcgaaaacataattttcattccttggatggaacttcaaccagagcctttcatcctcaaactggattgcctcttctttcaagccctgtaagcattttttttcttatctcatgcttagaacttacatacatctgaaaggtttacaaataatttcattcaaattttaattgaaaaaaatttaaatatctttaaatttccagtaaggaaacattttattttttgataacacattttacagctatgtgataatacaggaaaagacaaaaatgtgaataaaaatgaaatttattagttataaaatttatctgaaattcttttgcctcaaattgtaactgttactagatgtgaaaaaaacaaaaaccatcaagtggatttgtgtcttactgataccactaactgggtcatctgcaagttaaaactattgctgtttttgatttggaatcccttcacttaatcatcttgagacatataaatctctccactcctcaattactaatagatttagagatctgagtgcagtggttaaaagcatcactttggagtcacactgaattccccctagttatgcaacacaatctcttggagtctcagtttcctcatatgtaaatcaggatgataatgtctaccttagtgttgtgaggatggttagtatcatccctcttgcatgtaagcagtcagtagttagttggtatggctaccatttcagttaaacttgaggcaagcagtaaattgtatagcagaactaaaaatccgtgtaatttgccacaaacgtatttttagttgtatgtgttttttagtaactaaaagaatacagtatctcgcgtatgttcaaaaaataattattgaacaatagatgtagaatttaaatgtataacttggagctcagtcttctattttagaaaagttgaagtccaaacaactttaaaaaattccaaatggattttgttgttttttgtatttttagtagagacggggtttcaccgtgttagccaggatgttctcgatctcttgacctcgtgatccgcccgcctccgcctcccaaagtgctgggattacaggcgtgggccacggcgcccggccatgttttttcaaattcttatgggtacataatagttgtatatatttacagggtacgtgtgatgttttgatacaggcatacaatgtgtaataatcaaatcggagtaaatggattatctatcacttcaaggctttatcatttctttgtgttaggaaccttcctatttcactcttacttttaaatatacgataaattattgttaactttagtcaccctgttttgctaccaaatactagatcttattcattgtgtccaacagtgtttttgaacccattaaccattcccactttatccctccctcctcacaactcttccaagcctctggcaaccatccttataccctttatcttcattagttcaaatgtgtttgttaagctcccccatatgagtgagaacatggaatatttgtctttcttgcctggcctatttcacttagcataatgtccttcagtttcattcatattgttgcaaatgacaggatttcattcctcttatggctgaataatattccattgtgtatatactacattttcttcattcatctattgatggacacttaggttgcttccatatcttggctgttgcaaatggtgctgcactaaacattggagtgcagctatctctttaatatactaatttcccttttttttccttaagatatatgcccagcagtgggattgctgggtcatatagtagttctatttttagttttttgaggaacttccatagtcttctccacagtagctgtactaatttacattcccactaacagtgtatgagggtttcccttttgttccatcgttgccagcatccgttattgcctgtcttttggatagaagtcattgtaactggagtgagacaacatctcattatggttttaatttgcatttctctgattagtggtgttgagcattttttcatatatctgttggccatttgcatattgtcttttgagaaacgtctgttcagattttttttgtccattttaaaataaaaactccaaatgtttgacctacctaagaggtgatttaaaatgcccaagtgatcagggaagaaattttcagcgtcttgctggtgtaaaaagcaccacagacttctggtcaatatggtagactaagtcaatacaggaagacatttgccccttcccccacacagagattctggaagaagtataacttccaaatgcataatgttatgtaagagcaagaaagaaaaattcccaaggtgtaacctggggcaaattttggtccgctaggatatttgaacctaaaatagcactagggttcagttcccctgctgagaacaggaatcaaggctgcaagtctgtaacaatcttatctgagaccagattcttcataaagccaggcacagggaagactggccttctataaatgagagagggggaaaatgtatccatctatttactcgggtggagtagtacatgggagaaaaagaagcacctgaaagaaattgtacctaaatctaagccacacatggtaggggttctgaatttatactacctatgagattcagagatgtctagctaagaaatagccataaaaactaaattggaacccatgaaatccatctagtattagtaggggaaacatgaaactatcccacatctataacccagggcagtgaggatttatttttatagcaaatacgtcttactgaagatgaccttagaggaaaaaaaattacaaagcaccttaaaagaatcagcaggagcaagaaatgggaggatgcacatataggaactctgttatcagagcaatttgagagttaaaaataactgtttaaagtattctgggagatagatgaaggcaaagatagggaatttagatgaaagaatgtggatttgaactaaatagaaattctagatatgaaaaatgcatgaagtgtatacacacacatgcatacacatacagatgaattaaacagcaaactaggatcggctcaatagagattttgtgagtgagtagacaaatatttaggaagcacctagaatgaagcacaaaagggaagagaaatagtaaaatacgaaaaagccataaagagaatgagatgttcaatgtaagtctggtagaagtttaaaaagaaggactaaatagaataagaaaatgcaatattagaaatgaaggcagagaactttccagaattgaagacatgagggtttagattgaaaatttcacaataagttcttactacagtaaataacatggtacacttgtacaactctccaaaatgtcgaggtggtttaaattttcagtgtcatctgtttcttcagtcactaattagaccagagagtcaggtacacatatttaatattctagaaacaaaactgtctaacttgtatatgattttacctttaattaacatttaggtctttgattttaggatattttgagctaggtggtgttttgctttaaatgtaatctggtatacagtgatggttgaaaacctaggagcatagtacttttcaaatctattctctgtaaagcattaggatgcttggaaatgttgcagtaggtggaatgggcaaagcgtgggcagtgctggtggggcctcaggctcctatctctattcggttttcttttttttttttttttcctttttaagttggaagtgtttcccacctcccaaaaaaatagagaagtatacaaaaaagcaaaatgttccttatattatatattggaattccatgcagggtttggttttggaaaaaaatgtttctgcttcttaaaaaatcaaaacctagtaaaagtgcttttatttgtcatctgttttttcaacactaataaaataacataagaacaatatgtaatgaacagcatgattttaaataagctattataggagaagttgtaatatttcaaagatatgcttaaatttcatttaaaaagtgttttatcaattcaagaaaaaaattaacagttttttttttaatatcacaaatgatcgttttgaccttaggttcctcaaagaaaaacacaatcaggttgctttgatctggattcttcattactacatctgaaaagcttctcatctagaaggtatttatctcaaaattcatttgtgtgtttcaaacagaatttcacaaaattctggtctttaacaataaataatgttgattctaaacatcagaattgtaacaggaatcttatttagagtatgataccatgtacacacgcagttattaaggatgagtgtggaagaaattaaggcaatgagtagcaactatatagtggtcatcataataaactcttacattggttttaagtggttttatatatttctagttattaacctctactaccttttactctttgacggaaaaaaaaaaaacaaccttggccatttttttccgtgttggcaaataatactctgattataatctttagtcacacaattttgcccttgtattctcattcttaactgaaaataagattgatatagaagtctgcattattatttatttccagtagatgccactatgtgatatgttctaaattccacctcgaaaccttttaggatgtgtgtatgtgtgtttataaaatataaaatataaagaaagataaaatctgggaatttaaaacttgaaattttatattttaaaatttgataacattaatttattatggtagtttgagtagagttcagattttcttaattttgtacaaaagtaaataatattgtgccttggcttggtgactcacacctgtagtctccagcactttgggaggctgaggcaggaggattgcctgaagccaggagtttgagctgtatgagctatgatggtgccactgtactcccgcctgggtgacagagtgagaccctgtctcaagattaaaaaaaaaagtattgtggctaatgtgttcttttgctgatttgtttttctaatagtcctcgaccatgtttaaacattgaagatgatccagatattcatgaaaaaccatttttgagttctagtgctccacctataacaagtcttagtctcctaggaaattttgaggtaatgtgctttgaaactgttctttaaatgaaaattttataccctaggttctagggtgtcattttatatgtctttaactttggttgtgaaaaggaaagaaataattgtcttttttcaagccttgaaattacctttttattttattttcacaagaagggaaatcagaattgttggcagtgatgtcttagaattggatagctggtagtggagaagagaagacctgatgaaatcaggttggattgaggaatctgttacttaagccgggagcatagatttgaccacatcttcttacttggtaaaattgggtctaggacccagagaaaatagtggtgggctaatagcagccccctcataatcagggaagttgatttgcaaaaccaaaaggttttctgtactttatttgcaacttttttgtaaatctgcagctattctaaagtaacaaggttattttttaaaaattcaaataaagatttctgatatgtttactcacaatatttctacttggggtcaagtagaaatcatgggtttcaattgtctgtaattagaaatcagcttaaccttaaacacgaacttgtaaatgacatttttaaagtgattttaactggtgagttttttaggagaaaataattaaaattttatatttttaagataaatagttttacaggagttgtgttttgatatattaaccatttgctttataactattttaatagtgaagctatctttcacagtcttagtggaaatgaaaagatatttcatggtaagtcttttccatgtcaattccaaggtatcagttcagagatgtcaagctctctattcctctttgtcatcaaattaaaattgcataggccattgttagggtcgggtggctcagcaacctttgtactacaagaaattatttttcttgctccttttgagacatgtactacaaaaaatgtataagtgaaaaagagagcagtctgatatgtcaaaactttggaaaagggaatgtattagactgtttttgcattgctataaagaaaggccagaggctggataatttataaagaaaagaggtttaattggctcacagttctgcaggctttacatgaagcatggtgctggcatctgcttctgatgaggcctcagggagcttttacttatagtggtaggcaaagtgggagcaggcacatcatatggtgagagcaggaacaagagagcaaggagggaggtgccatatgcttttaaacaaccggatctcgtaagaacctactgttgcaaggacagaaccaagctatttgtgaaagatccacctccatgaccgaaatacctcctaccaggccccaccttcaattttggggattacatttcaacatgagatttgaaggggacaatatgcaaaccatgtcagggaagatagttaaagatcagtacacagtttttttcagacgattctatttgtgcagatatacatacattttccaagtgacttaagaaatagagatgttctgagactatccaacccataggtcttatttataatgaatttgatgttttcttcagtaaattacagaagatatttcctctgcttagtgaatttgacattctgtgcaataaaagatggggttagacttgagtcactaaaatgacacattagacttgtttaatgaaaacagggcaaagtcttatccctgtaatgttgttgggggaaatcatgatccttagacattatttgtggggcattaggtggagtctggaaacacatggacacagaataacacccaaatagtctaatagctaatagtcaccttttcttgccaccatttagagcaagcttgtccagcctgcggcccaggacagctttgaatgcagcccaacacaaattcgtaaactttcttaaaatgttgttagattttttttgtgatttttttaagctcatcagctattgttaatgagtgtgtatatgtaagtatctatatatatctacatatatatttttgtttgtttgtttgtttgtttgttttgagacagagtctcactctgttccccaggtctgagtgcaatggtgcaaccttggctcactgcaacctccgcctcctgggttcaagcagttctcctgcctcagcctcccaagtaactgggattacaggagcgcgccaccatgcccagctaatttttgtattttcagtagagacgagtttcaccatgctggtcaggctggtctcaaactcttgaactcaggtgatccacctgcctcggcctcccaaagtgctgggattacaggcataagccaccacgcctagccaatattagtatattttacatgtggcccaagacaattcacattttacatatgccccaagacaattcttcttccagtgtggcccagggaagccaaaagattggacacccctgatttagagttttctactgcaaaaccttgtcatcatccattcaattcatctgtcctgtgattttcttcattcagttcagtccagcataatacaaccattggaaatgagttatttttcctatatgagggaatcttagtgctttctgtcactgtaaaatagcttgtatattctataattttatataaatgtagtcacacagtatttactcttagggggtggcttggggatttatttaagtgagtgtcattgtttttaagataatccatgttgtcctgcatatcaagagttcattcgtttttattactgttgtatggatagaccacagtttgtttattcattcacctgattttagacatttgggttgtcaccacttcggggttattaaaaataaagctgctataaacatttgtgtatgaatttttatgtggacataaattttcatttcacttgggtaactacattagaatagaacagaatagaatagagaatagaatagaatagaatagaatagaatagaatagaatagaatagaatagaatagaatagaatagaatagaatagaatagaacagaacagaacagaataaaatagaatagtttaactgttaagaaactgccaagctattttccaaagtgattataccattttaatttgcatcagcatcgtatgagagttctagttcttccacatccttgccattgtttgcactgatcagtcattttcatcttaattattgtggttttaatttgtatttccctgatgactattgatgttgatcctcttttcctgcacttacttgccaaataagcatatatgttttccaaatattttttccaagtctgaagtttggctgtacatttttgtgatagtgtctttacaagagtaaaagattttaagttttttgatgtcgaattttctttatgaatcttacttttgatgttgaatctaaaaaaacattgcctagcccaaggcttctttacactaatactgttgatatttgagttagataattcttctgaagggctgtttgtgcattgtgggatgtttagcagaatctctggcctctacccacttgattccaatagtacccccatgcctagttctagcaaccaaaaatgtcttcatatattaccatatatcccctgggtgagaaccactggcccaacccaaggtcacaaagctttttttctgttttcttctgaaagtttgtattagctcatacgtttagatctgtgatctattttgagttaatttttacatgataggaggtgtgcgatcaaggttcccttttacgcatatggatgttcaattttctagtcttgaaatcaggtaatgtgagtcctaactttattgttctttctcagaattgcttaaactattctagctcctttatcttttcatataaattttagaatcatcttgtctatttccacaaaatagcctgctgagattttgtttggcctacattaatacaggtcgattggaggaaaattgacatcttaaaaatataaagtctttcaatccctgaaattcatttatttatatattcttttatttgtttcatcagtgttttatagtttttagcatgcatatcttggacatcttttttatttttaataggggtagggacttttctctgtcacccaggctggagtgtagctgcgtgatcatacctcactgcagcctggatctcctgggttgaagcattcatcccacctcagcctcccaagtagctaggactctacgcttgtaccaccacacccagctaattttttaaaaaatttttgtagaaatagggccctgctgtgtttgcacaggcttttcgtaaactcctggcctcaagcagtctactcacctcagtctcccaaactgctgggattacaagtgtaagccaccacgcctagcccagatttttgatatctttttgtagatgtatacctaagtatttcatgttttctgggatattgtaacttaaaaattaattgtcaattgttcattgctagtatttttaaatgaatgtatgtgtgtgtgtgttatctacaaaaaatcgccagtgatcttgctcaactcactcactaatttcagtagattttaaaaaataatccttgggatttttctacatagacagtcttgtcatctataaatagggatagttttggcttttttattttcgtgccttttttttttttcttgtcatactgcactgagtggggcctagcatatatgcttgtatattaaatttacaaaaatctaaaatatctcagataaagtcagcaactaatattggtcatttgccttaatccataaacatttttgtatgtacctctcctatgaaaattttttgcaccttcagaatagactttttatttgggaaatatttgttgagtacttactatgtgctaggaatacaaagtttaaatgataaagttcctgccttagagacgtttattgtctactggagaaggtgggcatataatttacccaggtgagtaaataatttataaactcaagtaattagcattgtaatagaagttgcctagtacttgtgtatctactatctctgctaaaaggattgaggaaagctttactgaggagctgtcatttgagcttggtcacaaaagatgagaaggaatttgccaggtaaatttgttcaggaatcagagattctagacaaagggaacttcatgtgcaaacgtaaaagagcatggcaatgttggaaaggatcaactggagctagagcatgggactctgtatatgttgggagagatgaaatgagaggcatggtggagcttaagtgctgtgctatgaatgttgacctcatcctatagacagcaggaaacaaagtttttaagtggtaggtgatactataaggcttttttcaaaaaaagaaaaagaactctggcagtagtacagaggatacactacagatggaaagactaattagaagatgtagcatttattcagaggagaggttatgaggatcacctaggtcactaggatagtggtagtagtggggatggaaatgaggccctgagactgagaggtaaaatcaacaggatatggattggattgattagagggcaaaaaggagatatagaaggttgattgtgacccaggtcttttggctttatctttttgatcaggagattagaattgctgatatgtcactgtttcacatttagactacacaaacttttagaatcatgaggctttgtagcatttcttttcaaagaattaatcaaaggaatgctactcacatttcatgatgtatacatatatgtgttgatatatttatataaaataaagcttgtgaaaagttttaaatgtttctcataagtgggaaaataaccactaaattttaaaagtagttatctcagtgagtgaccttgggggagggatggataaggagcttctgtactatttctgtacttctaaactttttataaatgcacatttttatgttttaaactaaaacatatcacatactacagtatttataagagaagcaattatttctcggttagaattataagtgcttgacttcatcttttgatggaacttccatatataacctgttaggttttcaggtgtttctctgtgtctagcaccatgaataggcactgtgagggataaatacctgctctgatagagcatatttttaaatttacagatataaaaacaacatagtaaacaattaggcctaactaatgctgaagttgcaggagagttcagtgtgagttggaatagtgagagaagaccaaactgttgtaggatggtagaagactgatgggagatgcagttgacttcaagtcagatgaaaagcagaaataaggacatggcaatggtaacaaccactgttctagtgctagaaagcatagtaatatatttcttttaatcacttctctgcctttagactaagtgtatatttctttaaatagaaaaaaaatgaatgtgttagcttttttaattgagtttttaaaattattttgtcttccaggaatctgtcttgaactatcgtttcgatcctctcggcattgttgatggttttactgccgaggtaggggcaagtggtgctttctgccccacacatttgactcttccagttgaagtgtcattctacagtgtttcagatgacaatgctccctctccttatatggcaagtattttttatattgtatgttttcctgccaaatcaaccaacttaatgacaaatttaagtgctttgatgcagtacttgaaaatataaatcatttcctaacagctgaatacaaactaatatgccaaaatattacctcacaacttctttctaagctagttcaaacaacagataacctcttttgcatttaaggatggtactaaaaatgtacttatttctctttgtcttgaaaaaatgataaaaattgattagtgacactgtaattccatcttgctgagttcacacacattctcaaatgcttagtgtgcactgtgtcctctagtcctacaaggctttggtgacataaggcttctgtatggcccttttactcccttttcggtttggtttgtctttgggcctatttttttctaatcctagggttcttttttttttttgacagcatctcactctcttgcctaggctggaatgcagtggtgcagtcatagcccactgtagcctcaaacttctggcctcaaaccatcctcttgccttggagctcctaaatagctgggtctacagatatgcgccaccatgcctagctaatttttatgttttgtagaggcagggcctccctatattgcccaggctggtcttgaactcctggcctcaagcagacctcccactttggccttccaagtgttgggattacaggcatgagccaccacaactggcctaatcctagagttctttaggatactagctacttcagactcacgctaatgtcttaatggagagtgaaataactaagaggagttacagcaagcttgtccggcctacagcccacatgcaacccaggaaggctttgaatgtaacccaacacaaatttgtaaacattcttaaaacattatgagatttttttgtgtgatttttgttttttagctcatcagctattgttagtgttagtatattttatgtgtggcccaagacaattcttctaccagtgtggcccagggaagccaaaagattggacacctctgagttatagtgttgagccttaagatcaatcttatgatttcacctttccaatttttttattccaatggcttgtggataatataagcattcatttgcaaaaacaatactgagtactagtatatgattagtatcagccctcttccaaaagacaaagagagacaagtagctagccatgcaggtctgtaaaaagttgacagtgatggtatcaaatatggagtcaaatctgggttttcattttaggtgttacttttgagaaatgcagattactgtaggcattgaacattatagcctagtcttgctgcttgaatttcctaacttactatctggcccaactgcttcctctcctaacacccctctccacaaccttctaggttttcaaggacattagtaacaatgacttttgtcattaataaaagctgtaaaaagggacatctatacaattgagaaacaacagagaggaaaggaagctacttttaggaacctatatgtggcctactcattactggcccagtttcttcaaggaaagcttactccattctaagggtgaagattttagtcaagagcttgattagtgtttgacactttgatagaaaaagcagagtggtgactgcttatttattcaaagttttcttttcccaacaacgttcacatctgtgggtcataagcatgaagatgcccagcataggttattatcgaaagaagaggcccccttcacaaacctgcccagttattacatatgctacctgttcatttaccatagaaagatgtacccacttttccagaattattttgaaaaaataactgctaattttggacacttaataaaatggaaagtaccactgagataagtttaataccagaataaatgcatattatactcgaatgcttacaatatgagaatatagcaacagcctgttttgccttaccaggacatcaagaatctgatcagtttcacaccttttactggcatatagtaatagaggatggaaagataaggtctcaaatactgtgatctggccaggcacagtggctcatatctgaatcccagcactttgggaggctggggcggacagatcacctgaagctggcagatcgcctgaggccaagagttcaagaccagcctagccaacatgatgaaaccctgtctctactaataatacaaaaaattagccgagcatggtggcacacgcctgtaatcccagctactcaagaggctaaggcaggagaatcgcttgaacccgggaggcagaggttgcagtgagccgagatcgcgtcattgcactgcagcctgggcgacaagagcaaaactccatctcaaaataaataaaataaaatactgtgatctatcattagtgaacagagtccctgttggccattaggatggcttggaaacaagataaaagagtaaactggctgaaaatcagctcaaataaatatctttgatggaaattaatgagcaagaggtaacttgaactatgcttttaaaaagcaagacagcattaatctttcaccttagttgatatctcaaaaatgaaggattgggagataaaagattttgtcactccagaaagtactagagatgtacacgcagatgattgcagattgttaaataggtattggcaagggtataaatcaggttactgaatttaatctatgcttttgagaaactctgactttcttttctctgataacattcttgagtcaactatcccatttatatttttcctatgaaaaaattagaacattttcaaaaaatagtctgtatttttctattaaaagtttacttaccaggaatgcattctttttgcaagtgacccagttccagtctttcctgctatgaattaattttgttcctcagggaatattctctttatttttgtagttgaatctgttttcaaagaatgtgattatgttttggtaagactatacatatcacagaccagcagagcgaagacataaaacacttgttactcttataataaccttgttactctaataataattttgggacctcttatcacagattatacaaatgactcacaagggtaaaattttagcacagaaaatcctatctttgtggtatagaggtggtataggacttctcattaaataattcccttaaagattaactcaaagccatataatattattctccggttgggagtcagtggtaaaaatgttctccaagtgttatatgacaacacttagctgtttagaaacggttgcagtgtgaaaccaggcagaaatatctaaggcaggtgtgccagtggcaaatttctaataagactttcattataatattagggccacgtatgatttcctttctttgtaattaaccagatcaagatatagttctttcagttttccacttacttgtgcatattccctattccataataatctgagcaatttttgtataagattttgagcatatttattttaaccctactattccattttaaaatcccagaagaagggccgggcatggtggctcacacctgtaatcccagcactttgggaggctggggcaggcggataacttgaggtcaggagttcaagaccagcctggccaacatggtaaaaccccgtctctactaaaagcacaaaaattagctgggcgtgatggtgggcgcctataatcccagctactcgggaggctgaggcatgagaatggcttgaacccaggaggcagaggttgcactgagccaagatcgtgtcactgcactccagtctggatgacagaacaaggctccatctcaaaaaaaaaaaatgccagaagaaaatgtgtttttctcttttgtgttaaatatggtaactttttctaggtataaatattaatatgctgatcaattaaaatgatgaaattattacaataatgatgaataataaaattccaaataatttcccagtccctttctaaaattcctaacttgccaatgctactagtcttaacattgcttacaaattgttttaaattgttgccttcaactttatggtttttttcaaaaagctgtttttttaaataaattgatttagttactgtgttctaaaaactattggaattgaatgtattaaaggaaacaagtataaacttggtagtagttgccttaccagttttactgtatgtatttggtggggaggcagatggctggcaaggaagaacggtaatatattacgtgtagttatgtgattttaaagatagctattatttaggtatattttactttttctttctgaaactaggaagaaaacatgtataatataccatatctttttcatgtagagtaaatagccacactctgctcatttaaaaaaaagtggtatacagagtacctcattaggcacgtagggcagattgtaagagataaattgttaaagtttcattgctgttttggttagggttgcagtttgttgatgtgcttttttcatgctttaaataaccatatgacaaatctgatttgtcaagaaccacgtatgtgttaaccttaatgtgttaatttaataatctgatgtcaagtgttgttcacttggagtaaattcatatgtcagaatgtggctttcccttttacctttatccactcctttttacttcctaaccctggtccaacttccgaacccaacagagagacgtcacctgatagaacagtgctgttttatatttgcttttacataagtttggcatgtacaatgtataataatgaaatcatgaaatgtagaacatacagttctccttaactacttgaaagaaaagtattagcccagttaacgtaaatgcatcagcattcattttttaaagctctttaagtatcacagcctgggcacgatggctcacgcctgtcatcccagcactttgggtggcagaggcgggtggatcacctgaggtcaggaggtcgaagcctggacaacatggtagaaccaccgcccctgcccccaaccatctctactaaaaatacaaaaattagctgggcgtggtggtgagttcctgtagtcccagctacttgggaggctgagacagaagaatcgcttgaacccgggaggcaagggttgcagtgagccaagattgtgccactgcactccagccctggtgacagagtgagaaagcatctcaaaataataataataataataattaagtatcacaattaccactgatagtcatttggttatcctggttattgatcatcctggttattgagaaacttttacacattcaatttgaacttaccttgttttaacatacactttttccccattgattgcatttttgcagtaaggagaacatcctgagaaaaactacttcatatagtagagcagggctcccaaaccttaatgtaaattgatataatctggagaatcttgttaaaatgtatatttgactttgtaaggtctgggaagaggccagacatttcacattcctaacgagttcacaagtgatgctgatgatgctcatctgaggatcattctttgagtaccaaactaactggaggactcctgatatcctcttttagacttctctagtgacatgaccctaatttagctttaaccttgactcaaatcagctctcaatccattgtgttctgatttagaatcaatttggattcttagattccttaataagtaaatgaccaaacaaaatcaaaataccttaataatatccagattaagacacaacatgatataaagttgtttctgaagaaatatttaattttaggaaagtgagattttatagctttactatagaacattccacagccttaaagttactgatttaactttcatttttcactttttgtcttaaacatctcttatcccataaagtagtaccaggcaggaactacagacttccaaattgcttttctattttttttcctgtctttattcagaaatccagatatgtaacttaactcccagactgaagaattgactttatttttggccaaggcttactttcctacacttgtgactttttacatgcccgaagaccaataaattacttgcttcttcatttcccctctccctcaagatacatgggaagggtcctattaccttcctttatttcctttttagttaggaacttctttcttttattcctatatcttaatagtaattttgagtgctgtggccattgatgttatatattctttatagcgacatcaccaggaggaacagtaaaatgtttccttaggggtagaaacatagaatgtatctctattaattcaatatgaatgtttttccatagaaatagaattctgaaattttaataaattacatgagttattcttattttagtcttttatgtacatatgcatcagtttgtactcaatttgtcttcttttatttcaagggtgtgattactttagagtcccttggtaaaaggggttatcgagtacctccttcaggaacaatacaagtggtatgtgttttatagcctacaattgcaataatcattctctcacatacatatagaacttagccctttctcctgctactgctgctgcaacaactttggtaagtaacagtggggctgcagctttgtttggagttcccctgctctgccccaggaatgaccatttggggacctccataaaaggaaagcattaataagctaatcaaggtgaatacttaagaaaaatagcatatgacagtttgcataacttcaataggactcttcaatacatatttagaacctaatattactggtgccttctttttaataaaccaaattgagacgaacctgtttaaaaggagaccccaaatattagaattgctttcacaggaaaacttgggaaacaaaattattttatttctaataatttctaaaattgatttaatgagatgaccacacaaagcagaaatatagtctgacagatgtcagggcagagaaggcatcattccttttggtctaggcattgatctcttttggctcaggagagtcctgctgtctcagaacagtccttcatcatccctggtctagggttctcagaagaataatctgatattaaggccagcttgaaattgagttaactctagatctgacccagcgtaatcctgcaagccctcaaatctattacagagtttgcagactgaaagagagtctagctaaggcttgctcctcatacccaggatttgatctaatccaacaagcctttgtatgacctttgacctcagtgtgttcagtactttgtcagatcacttttactcatcatcattgttccaatactgcaaggaatctgtatatttgtttatttcatatcacacaggaatgaaacagaagtatgtaacatgtgtacgtgtgtgtatatatatatatacacacatatatagtaatatttatataagtttgaggaggaattaccacaagaataccacaagtaaaccgatttcttgaagtaaaggagtgacagtgttctcttgccttcggctatgcagctcatgagaaagtgtgggtcagtggaaagctagctgtcagttgtgataataatgaatcataaactcggaggtaacacattcacctcttgtttggagactgccagctttagtggttaattatatgtcttctattctgtatacagtttaactgtgtataaacatgatttgaactcctggcttatgaggtgtggttgttgaatgtattagccttaatcttaagactcactagatttcaaaaactggattatgatattgatatatttctcattttgattcagtgagtgatgtccagtgccacggatgagcttctgaaagcatgggtaccaagttacctattgatgtgttggtaatttggttaaagtcagatcagcagcttggggttttgtttcaaaacgagtactttaaaaataatattccttcaattattcataaccaagcaacaattgaatttaattcagtctttaccaggatacatattttggtctataataatattgagaattttttaagggctagtgttgctacaaattttgaaatgattccatgtatgagtaaatgaagtattagcctactttagatctaattaattaataatagtgagctttgttttctaaacttggggaaatgttcagataggaaaaagtctcttctttgagcacctattttaaattttataataatcatatgtacctaagacatcaaacatgctaattttacagagcttgtatttttatttgaaatattctgtttgctattaaaatgtgagaaaaattaaaactcaattttgagaagtttgaacttgatactctttagcaaagctattatgtttgaaataattgaactggaatattttaacccaataaggatgtattttgcttaagctactggaactattccttaaagttgctcctctgaacaaggagtaaaatttatatatatgaaatttgtgactaaagattttgatttgttattggaccttatattattgtaaaacaaaaaattgaaccttttaaaaaataatattatttcttaaacttttgaaattgtgttaattttagtccttgaaactgaattatattcagtggtattaccttgttgtttaaaatcttgtttgattattggcacaatcattctgaatcacatcaacaaatcactatttttaaagaataatttctatattgtttcttcagaccttatttaatcctaataagactgtggtgaagatgtttgttgtgatatatgatttacgagatatgccagccaatcatcagacattcctacgacaaagaactttttctgtacctgttaaacaagaagtgaagagaagtgttaataaagagaacatccgacacacagaagaacggttattacgctacctcatacatctgaggtaatgcttcaaattaatatgaaaatgttactttagaacaactctaaaatttttagtttttttttttaaactgtgactctaactagaccagtgtcccttgggactttgcttagcttgggaactcttgatgatgtgccaagatgccgaaagtacatggcataccttcctgtggtggtcattacttgttgaattagggaagttttcatttatagctgtttaatataaaatattttatgccaaaacacatgcatctggggcagtgaaacacattttctaaacgaatactatttaaaaatgtaatacgagggccgggcacagtggctcacaccttgtaattccagcactttgggaggccaaggtgggccaatcaccttcaggagtttgagaccaacctggccaacatagtgaaaccctgtctctactaaaaatacaaaaattacctgggcatggtggtgggagcctgtaatcccagctactcaagctgaggcaggagaattgcttgaacccgggaggtggaggttgcagtgagctgagatcacaccattggactccagcctgggtgacaagaatgagactccatctcaaaaaaaaaaaaaaaagtaatatgagccatataaatcattttatatttttcttttttttttttttttttttcttcttgagacggagtctcactctgttcatcaggaggagtcacctttcatctcgggtccaggcagaagacttcttcaatctgttattgctgatggggaccacctgctatctttctttatatatgccttgcagtggtgttctggagtgaataagcagtgagctgtacactcaagtcccatacatgaaagtccgttaattattctccccaaagctctatttaattagttctttcatctcagtcttctgcctgttctgtatgcaaaagacgtgttctgccagcacaatgtatttcaaccaaatctgacactacctgatgtaagccacatgggaaatgttacacagattgtgggaatgaaaaatctatgaaaaacagacttggaaaactttttttaaaagacatgttatagccgggcacggtggctcacacctataatcccagcactctgggaggccgaggtgggtggatcacctgaggtcaggagctcaagaccagcctggccaacatggtgaaaccccatctctactaaaaatacaaaaattagccaggcgtggtggtggacacctgtaatcccagctcctcaggaagctgaggcaggagaatcacttgaacctgggagctgagattgtaccactgcactccagcctgggcaaaggagcaagactctcacatgaatgaatgaatgaatgaatgaatgaatgacatggtatgaaatagcagactataagaatacctaccaaactagaaaaagattcaaccctctctggttaaacttgcatttgacagcattcctcttgaagtttaacaaccatagctatttgtaaccaaaaccaatactggccagagtaaaaatcagccaccttagcttttataatctccacataatgacaggatactttaaagaaacctttttggggaaaactgtacacttcccaaagaatgttctccttcagtttgggaaggtgaaaaacttcagaaaggagggaagagtgagccagtcagagccagtctgttttaacatacagagctgtaaccaccacatctttcagctagttcaggagtaaaatccacaaacccagagagtatttatgctatgccaagggaaaaacaaagagaaattagcactacagggtatgtttgtctgtttggtaggtaagttaatgtgagtgaagattccaaatccctgcactgtattacagatattagcagtggatagaaacagtttcatatacagttttgatagccattttcattttactgctaacttttctcttgacttttgatggtggctgggttttacttagcctagccactgctgattatagcagttttttatcatctaccccaaatcatgggaggctaagctgtgtgaaatgggtcagtctatggagctagaagatgccagggctacagagcccaaatgtaatgttattgagtaatgtgagtgaactgccacgtgaacctgcagatgaggaaaggtgcatgtactgtggagtcagggaggaaaagtaagatttatttgacactcagatttacaggaagaagcatctcaggcactgagggaaggaaaaggagtatgagttatttagggaatggtaagagagcagcatttaaataaaagcatatgctttggtctttagaaagatcttaaatatcatgttaaagagttagtgttgacctaatattgtagcaagatttgttcttcctactttcaaattttaattattctagtttcttttaaagactcgttctctgaaatgttttatattttgtttatttgtttaggttccagagttctaaatctggaaagatctacctccatagagacgtacggctcctgttctctagaaagtcaatggaggttgatagcggtgctgcatatgaactcaaatcttacactgaatcaccaacaaaccctcagttttcaccaagatgttgataaggagtgatgatttaaagtatttactcagtacccaagtttgcaagtaaaaattagcatagaatggagtgtaccaaattaacaatcaggagagtggattctctcctgttatcctggaccagtttttatgaaaggattcctgaaatgaaatccatatattccatgtagactggaaaaactcatgtcctaatcctttttgtactgttgaaaccacttcattggacatgttgcaatagcaaaacccccagttagattagtgtttacacattttctcagttatttaatatttaatgttttccttaatactcaagtgatgtttgtctctagtgttctaatgtagcacaaatcctatgtaaaatcatactatgtatttttgacattaatgttgaaatcaaatatatgcacaagtctttaattttgtgtaatgtgttaagtgctgttcatttaagttattgaaaatgagaataaaatgttgagcttctttaaaagtaacacactatgcaagcatgtgtactttttatatctctcatgtttagtttttataacaccatatccaggttgctatctcacatagtagtcctttaacatattgtattagcagtgcaatgtggactaagctgcttcactttccctttgcaagttcagatcatcatgcccattcatagccaggattccttatccccaaaacagttctatttttccttaatcactactatagagtctttacattaaattactgtcgtatgctagataattttctcaaattgttaaaagaatatgtactttggaaacaaattagtatttatattgtaaatatattcaaaaaaaactaa

SEQ ID NO: 78 - DNA, 32933 bp, Homo sapiens
gggagattcgattggaaggctgccggcgtgctactgagttcggccggtccgagtcactgtgcgtcgcctgggcccgttcctggtcttctcccccaggtgagctgggtaaaggggttctcgggaagccgaagagccggagactcctaaggaggctcttaacttcattatgaatgagacccacccagagcccggcgcttgttttttcacaagtggttctctgtaaacgggcagccatgagggtaacagaatataaacgtcagttattttattttagactcagtgcttttgcaatcacctaacgaacgtttattgaacacttacagtgccatcgagctagactcggagtgagcttttagaatcggaaatagagaggaaaaggcgcgactcttgcttctgtaatgtgcaaatacgtattcagtgggccactgtgcagagtagtacgtgctgaaaggggatcttccaaaatgctatgatggcttagaaggaacatattttaactgagccatgtgcttaaaccagagcttgaaagttttcttccttttcacatccagccagtccctaccagcctcttgaatatctcagatctgttcacttctctccgttttttactgacattattttggttcgaccctatgactgctacatagctgtgacagtaacccccccctcccccgccgccccagctggttctcctgctttcaatcttgctaccttccagtccagtctccacattgctgggctgataaagttcatatttgaccgaggcactccccattgaaaacctttcagtcgctcctatttgccctcaggtttaagcccaaactctttaacatgacttacagactctttcctatctgacttttgcctggctcttcagccctagtggttttccaccgctccagccatatagaatgtcttttgtgttcctgaagtgcactatcctccttctcaccccaaaccgtcttctgaccctgtccctgacctggctaattcttagtcagtttgcaaagccttttaaatcagaaaccctttcctgaccccacaggactggatcacagagcaccaagtaattatttgtttattctgcagatagttaaatgcttctttcgtctgtgccaagaattgctaggtactgagatccaatgatgaacaaggtagattcctgttctaatggaacttaccttttatggatggaattaaggagaatttacaaggaaactatgtgaattagactggtctaagaagacctttccaaggagttgatactgatgcctaaaagatgagcgtgatccaaccatgcaaaagagggaaagaaaaacattctaaacagagtgaacaggttgtgcaaacgtcctgaggcaggaaagagcttgacatgttaatgttcaagaatctaaggaaagaccagtatagctggaatatatttagaaaggacagttgtatgagatgagtctggaaagatgggcagagaccggatcatggttaggaggttaatccagcaccataaacaggagataatggtgatttggattaagatgatggcagaatatatgagggaaaagtgaatgatggtttctaagtatggaagtagattcaagtaccttctgatgagtgtgatgtgggatatgaaggaaagggaggaatgacaaatgactcctaggtatctggtttgagttactggttagtgagtagtaccatttactgagatgtgaccttctccatccctgtaataaatgtctcataaatgatatcaatggaaaaactgtatcgtactaagattttcctggttcatgtttttaaagcatttttcatcagtatttctcctttcactgaagattttgtctctttgtttttttgcttacttaattttcactctcctgcctgcctctcttacttttctagaattttcgtgtcaatgttactaaattattttttagggacttattatgactgcctttagaaaaattaaacaagtatgtgccattggaggagaccattagacagtgttaagaaaacaattcaaaacagccacccttcccatagctgaggcctcttggcctgtaaaatatgaaacagaaaattggagaattacaaggtgacaaagattttcatgcaaggcaagaagggtttggagaggaacgaagaaagggagaaaaattagtcatactttcttttctttatgccattagaagtggaactagttttttaaaggagtaatttcatcctttgggcacagtcttgaagcaaatacacatagtttctttcaagtgtgaagcttgagcaaagagagtaatggactagaaagactggtaagctactcatcagaaggcatgagttccagacctgattaacttctctgagtggatcagataatgttgcaaaagcactttgcaaactgtaaagcagtcaaatgaactcaaactggattatgaactttaagataggattcacatcttatacttttatgttctcttcagccccatccccagatgccagtttacactaaatacttaattgaactttttctctaggatctaacatagaataagaattagtttagattttctaatctaacccagtttttctagatcttctagtctagccggaagaagaaaaaaagatgtgttggtatgtgcatgtatgggcacggtttttcataaatgattaagttgccttctgagaacttgattatgaggtagttaagctgaaagatcaccaaataatggattagagtaaagaattgcaaaatcatccaaatgagactaagatgctgtcaggccttggggatttaactataaccatgtttatcacaagtgttacacaccatgagatagtctcaatgactaggctactggttttcaagtgtgggcaatttggccattacctgggaacttaaaatgcagattctcaggcccttatcccagacttactgaatcaaactctggagttggagcccagcaatctgttttatcaagccttctgggtgattttgatatatgataaagtttgagaaatacttgtctagtatgaaaatgggatgcagaggttgtaatcaatgagtttatatatctggtaccactgacaaaaccatctctagaatgaaaaatgcatcaggcattagcttgattccattaaatagttgattcaccaaacagctcttcttcaagcaactttctgtttataattttagtataatatgaggttataccaaatatacaaatatgggcttctgatatgtcccttccctgtgatggtaatttttcgtggtaaattagtagaacatctttggattacagttcagctccccatatggcttgtctaaaaggagagaaagcaagtattccagaatatcccatggtaaattagatatgtactatagtgtgtccacatggaccccacatattttaataagcataagtctattggagccttcattcctggacattgacctaggtaatccctggtatgtgccctttgaaaaatcaaaggccaactgaggccttaattagttctgccccaacacttacacttttgtccctctttctaccctcatttctacttttatgtgtgagagatttaaagaaagcaagattttctttgtatattattgctaatgtccctatccagcatttttatagtatttattgatttttttctaattataaaagcaatacacttagattgtatttattgattttttctaattataaaagcaatacacttagaaaatatcttaaatatataaagaaaataaaaatcgcccttaacactaccaccctgagaaaatactttttaaaaataagattatatactttcctaactatcctcttctctttccccattcctcccatcaaaaactaaattagtccccctgttatattttctcatggcactatgcatttccaaaatagaatttgccagaattgcagttaaattttttgtgtgattattttaatgtctgtctcttacactagactgtaagtctagtgactaggtagggaccttgtctgtttgtccatcaatcacactatccccacctagcatttagcagctgcacaactaataactgatgaataaataaatatgttcgcatattaaattgggatatggtttgctgtgatggagctgaaagaaatgtaatactatatcatcatccttcccaataaatgtgaaaagaaagataaactgcaaaagataccacatatgaaattgttcccaagtgtatcatcatatcttcctaattttagtatttacttattcctgatgtttcattcaattattcatcagacatgcatccactatactgcaagtcaagcagtagagagagacagagaaataaaacaaagtataaaaacacccccagagcctaggtaaataaataaataaatacaaaaataaactaggtggcaagtatgaaggaaatattatgaaaacaccaaaggaaattaattaacagtaactgtctgaaacgatcttattctattattgtccaacagacaataaatgggaagcctttttgccattttctggggttcaccaggtgaaatacaaatagtaaaaatactaatgatccctttcattacagttctcaaatttgctgtttttatagatttttagacttacttatttgatccactagagggcagtaaacccttaaataaagacaatgtaaccaaccttcctttaaaagtatagtaataagtgctggcacaattaatttagaaatgaacccaaaatttcctgcttatttaagtttttcatttattagtgagttgtctgcccaattagcaattttttttaggacagacagtatcttattttcacttagcccagtgtacgagtcatgttacaagtttattacatttcctaaagtttgaataacaattgtgtaaagaacatgatttgatgaatgcccatattgttgtggtacagtataaaattctgttttagagccctaaagaaaatagtctctgctcacaatatgaacagaagtaaaaaaattagaagtgaggataagatgtaagtaatgattaaaataagtatgaaataaggtactatatatgaaactaggctgtgtacttcgtatacaaatagaagataattttatgatttggtaaaattgtgttttatatttaacgctatgtgacaaaattgtggcttgggaagaggaaatgcaaatcatgaagattaatatctgaagttcagattgacaatttctgagcttggcactgaagatataaacagatagtccttctacgatcttactttgagtccaggaaaaacaagccatattgaacagataaatttaatataatgtggcatgtgatgaattaaagagtaatttaacttctgggaaaacgtcctagaaaagaagacttctaagaaggatcttaaagaataataagcattaccaagagaatgaaagcattttagagagaagaatggaaaaaagcaaaggcatagaaatgtgaaacatattgtgggggtggggaagcaaggaacacaactcagattgtttctcttggcataaattactagcacataaagagcaaaaagaaagttaagagaataggcattagggagaataaaaccaaatagacaatacactacaatagacaaaacaaatggtaggactacagaggtacaatagtatatggtgtagaaaaaaagaaaagccattccctttgttaataaagaaagactttttaggggaacttcaaatgaaataggaagaaaattctggttatcgtatggcgtctgcctactctgttgtaaaaattttcttgaattgcaaaattctgcttatagttcttcattcatgcaataaattttgttttgagactagtctttgttgcccaggctggagtgcagtggcgcaataccgcgcactgcagcctcaatctcccagactcaagtgaccttcccacctcagcctcctgagtagctggaactacaagcatgcaccaccatgcccagctaatattttttattatttgtagagatgagttcttgctgtgttgcccatgctggtctcaaactggtgggctcaagcaatcctcccaccttggcctcccaaagtgctgggattataggcctgatccaccacacctggccccattcaataaatatttattgtgaacttactgtgtactgagcactgttctaagcactggggttacagtagagaacagggtggactaggtccccgtctttatgaaacttaggctagtgatgggtagatgaacaaaaataagtaagcaaagacatacataggatgactatccagcagggttagtaccatgaaggataaaacaggtgatgccatagaaactaagaggaaggaggattctacttgagctaaagtggggctctctgaagggataacattagagttacagattgaaggacaataaagaaccgactattccaagacctaagggaagaatatcgtagccaaagagaatagtaagcacaaaagcctgagaagggaaatcgtttggtgtgcttgaggagcagaaagaaggccagcatggcttgaaatacagtgattgaggaggagagtggtacaaagtgaggtcagggattggcaagatctacatgacccagggctgcacagaccattgtgagatattgaggcttcattctaaatagcaggattttaagcaggtaagagacagcatgttcaggagtgagctttatgctcttttagctcccctaactcacaggtagatgtacctccatactaaaccctacactaaattggattttagaatgtggaggacaatgcctttgttgacataacatcatttgttatgttaactaaaagttataggaggcctttgttttggactaagctcctgcactaggccccagtggaccagactaaaaatcaaaatagagtcatttatacttaaagttccacctcaccaaatcaaaactacattgttatctgaccttcctagaactcagaagagagaaataaccaaatttcccacatgtgccagtttcaattgtcataacaacgaacttcgctctgcctttgatgcttacaacaaaaagtagccttatgttaaccagttattcctgtatttttctgttcctctgttcccactttaggaggaaagtaactttgaaatgaccaagctgctttttgttctttgtttctactttctttagcccttctctttctgtaaaactgaacttctctgctcagccccttgggtcacttactctattttatggaataaagtatttcccgattctagaattgttacaggaaagtagtcccaattcagacccccagagaggcttctttgatctcgcacaagaaagaattcagggcaagtccataaagtgagagcaagtttattagggaagtaaaggaataaaagacatagaacagccccgagggctgctggctgcccatttttatggttatttcttgatgatgtgctaaacaaggggtggattatttgtgcctcccccttttagaccatatagggtaacttcctgacgttgccatggcatttgtaaactgtcatggcgctggtggcagtgtagcagtgaggacaaccagaggtcactctcatcaccatcttagttttggtgggttttagcaggcttctttactgcaacctgttttatcagcgaggcctttataacctgtattttgtgccgacctcatatcttatcctatgacttagaatgccttaaccgtctgggaattcagcccagtatgtctcagcttcattttacccagcctctagacaagatggagttgcttttttattcaaacacatctgacagaatcataaataaagccaattaagatctttcacaaaattgttgtaattttgtcttttgacagttgcaatggcaaggaatttgaggttttagcacttacaatggcaattttctttgacccttctttctgcctttcctttgtatcctgtattacctaccctaccatgtcctttgagattgccatgtagcctaaggtgacaaccaaatctaggaatacataatcggctttggcagaaccttactaatgtatatataagagtcccaacaaggatagcaaaaaattaggattagcgttctcttttctgtgctcccttcagtaatacagattagtgatttatttaaattatttatctttcatctgtaaatttccatcttattaccttgagtggcaagattttatttttatagaaatgttattttgattgactatcagaattagtatcactttaacatctcccttccatagtcaccacatttctatgtttgtcatcatctttagagtactataccgaaaagattttattattttaaaaccagtgacctccactttgtcagtttgctgatgccagtgtcaaaaacagcatcacccatttcagaattgaaagtttttgccatgtgtttaaaaatgaaagtttcttaatacagctttatctcaaacagttacaaagacctttgttgtaaggcatgtattttatgttatatgttttatgttatgctaatccatttaaaaaattagtaaacaaaccaacctttttttttttttttttttgagacagagtttcactctgtggcccaggctggagtgcagtggcatgatctcggctcactgcaacctccgcctcccaggttcaagcaattctgcctcagtatcctgagtagctgggattacaggtgcacaccaggctaattttgtatatttttgatagagatggggtttcaccattttggtgagactgatctcaaactcttgacctcagatgatgtgcctacctcggcctcccaaagtgctgggattataggcgtgagctaccacaccctgccacagatcaagcttttaattttttctctctctctctctttttttttttttttttttttttttttgagaacaagtctcactctttcacccaggctggagtgcagtgccatgaatacagctcacttcagtctttacctcctgggctcaggtgatcctcccacctcagcctcccaagtagctgggaccacaagctcatactaccacgcctgactaattttttttgttttttggagagatgaggtctcaccgtgttgcccaggctgaatttttaaaaagaaagtataaagaggagaacattgctacaggcataccttggagatattgtgggttgtgtttctgaccactgcaataaagcaaatattgcagtaaagcaagtcacacaaattttttggtttcccagtgcatatattaataaaatgtttacactatactgtagtctaagtatgcaatagcattatgtctaaaaaatacatcttaattaaaaaacactttattattaaaaaatgttaatgatcatctgagccttcaatgagtcataattttttgtggtggagggtcttgcctcagtgttgatggttgctgactgcttggggtggtggttgctgaaggttggggttgcagtggcaatttcttaaaataagacaacattgaagtttgctgcattgattattcctttcacaaaagatttttctgtaccatgtaatgctgtttgatagcgttttactcacagtagaacttctttcagaattggagtcaatcttctcaaaccctgccactgcttatcaactaagcttatggaatattctaaattctttgttgtaatttcaacaatgttcacagcatcctcaccaggagtagattccgtatcaagaaactactctctttgtttatccataaaaagcaactcgtcataagttcatgccttatcatgagattgcagcaattgagtcacatcttcaggctccactttttaattctagatctcttgctattccaccacatctgcagtcacttcctccactgaaggcttgaacccctcaaagtcatccatgaggactggaatcagcttcttccaaactccaattagtgtggatattttgacttcctcccataaatcatgaatgttcttattagcttctagcatggtgaaaccttttcagaagattttcaacttactttgcccagatccatcagaataagcattatctatggcagctatggccttaggaaatgtgtttctgaaataataagacttgaaagtcaaagtgactcattgatccatgagtagagaatggatgtgttaacaggtatgaaaacaatatcaatctccttgtgcatctcatcagagctcttgggtgaccaggtgcgttgtcaatgagcattaatatgttgaaaggaatctttttttctgagcagtaggtctcaacagtgggcttaaaatattcagtaaatcatgccataaacagatgtgctgtcatccaggctttcttcttccatttctagagcacaagcagagtagattcagcataatccttaagggccacaggatttttggaatggcaaatgagcactggtgtcagtatcaagacaccagctgcattcacccctaacaagagagttagcctgttctttgaagccttgaagccaggcactgacttctctagctatgaaagtcctagatgtcattttcctcccatataagtctgttgtgtctacatttaaaatctgttgtttagtgtagccaccatcatcaactagttaagatctacttatcttaactagatcttttggataactttctgcagcttctacatcagcgcttgctgctttaccttgcagcaagttatgttttatgttttggaggtggcttcttttcctaaacttcaagaaccagcctctgctagcttcaagcatttttttctgcagcttcctcaactctctcagccttcatagaattgaagagcattagggtattactctggattaggcttcgatttaagggaatgttgtggctcgtttgatcttctatccagaccactaaaattttctccatatcaacaaaaaggctgttttacattcttacttatgtgttcactggagtagcacttttaatttccttcaataacatttcctttacattcacaacttggctatttagcacaagaaacctaacttttggtctgtctcggctatcaacatgctttcctcactaaccttaatttttgtttctgtcttttattttaaagtgagagatatgtgactcttcctttcacctgaacacctagaggtcattgtagggttaataactggcctaatttcaatattgttgtgtctcagaatagggagacccaacaagagggagagagatggtggggcagtcagacacacatttatagattaaattcatcttatataggtacagtttgtggcaccccaaaacaattacaatagtaacatcaaacatcactgatcacaagtcaccatcagatataataaaaatgaaaacttttgaaatattgtgagaattaccaaaatgtgagatggaaggtgagcacatgccactgaaaaagtggacttgcttgagacagggttgctataaaccttcaatttgtaaaaaaaatgtaatatctgtgaagcataataaagtgaagcataataaaatgaggtgtgtctgtattttattatttgacttctctgattttgtttatttggagatagggtcttgctctgtcacccaggctggagtgccatggcatcatcatagctcactatggccttgatcctcctgccttagcctcccaagcagctggtattacaggtacgtgccaccacactcagctaattctcttatatttttgtagagacagtgtctccctgtgtttcccaggctggtcttgaactcctgggctcaagcaatccccccacctcagtctctgaaagtgctgagattacagacataagccaccacacttggccttcctgatgtgttttatacaaggatattaaaacactttgagctatcatttgacatgtaacattttgctttttctgtttacaaaatctgaagtcttttttttctcttcaagatgtatcaaatgagcacactgaaatctaataaagtgatatttcagctaaaaaagaacaatttccaccaatttaggttctttaaaagattcatgtaagttcatgtacacattgaatataccttatctgaaatgtttgggtccagaagtcttgtgaattttggatttttgaatatttgcacataattaatgagatgcaggaatgggacccaagtctaaacataaaatttgtttatgttttatatacatcttatacacatagtctgaaggtaattttatacaatacttttttttttcttttttagatggagttttgctcttgttgcccaggctgaagtgccatggtgcaatctcggctcactgcaacctccgcatcctaggttcaagcaattctcctgccgcagcctcctgagtagctgggattacaggcaccccccaccatgctcagctactttttgtatttagtggagatggggtttcaccatgttggccaggctggtctcaaactccctacctcaggtgatccgcctgcctcggcctcccaaagtgctgggattacaggcatgagccaccacgcccggccacaatacttttaataatttagtgcatgaaacaaagtttgtgttaagtacttatgtgtggaattttgatttgtgccatcatggtggcactcaaaacatttcagattttgggttttggactttcagattcaagatgctcaaccggtagtttcctttgtattgatggcagacacaagttgtgtatcttcttgtaaaggtgtgaagaagctaaatgacatctttcctgaattactgggatagagcatttattaagaaacaggatacaagaattttcttaaactactctgttttaaatgtgattttcttcctattaatattttaaggagaaaaagaattaattttccaatacattgataccaccttcactttgaaagtgaaacaaatgacatctattagctttgcagtagaggttaagtggttttcctaagaaaagaatatgcactgcaatgaaagatttgccagtcatcccaatggctattttgttttgcagaccacggtgtgaacacatgaacagaagacgaaaatttcttctagcctcagtacttgctctccagaattcaagttttatatatccatcatgtcagaagtgcttctctaggataatcctggtctccaaaaggtaaaagtaaagtctgtaagtgtgagagaggaaatacaaatgcacactgtagatttcctatggctcaagggcaaggaccagatttaccaaacaaggacattagattctctcaggggttggttcttctgtaaatcccagaacagatttcactgctaatcctctattactagagaaaagttttaagttactgtcaagtcctttgctaaatacttgcctcattgaagaaaaataacttctcagagagtaagttccaatactgggtacaaaacttagcccatttctgggatatccctgggaataatataggagacttgtgtttattctttgtttatttttgcatgatcagtagaatagttgttaatataaataaataaattccttgagaccagggactatgttatagtaatttctatcctttagcaactagaaaggtgtttggcgtataattctttatcatggtgctcagatgcaagccaactatacctgagagcctaaggtcttcctctgatctttatagagtagaaacgagaggttaggtttgaagtttctccagaacactgtctctctgcatcgaagagaggacaagaatacctagtaagtaactagaactatgtaagaaagagtagtgtgccagcaatattcttaactagtctttttgtctagttagcattgaatggggaggcagaaaaggattggcagttctaactcatatctagactctaagtaatccttgaagtagttatcacactgttcctttattaagccactctctcaagcactcatttgttagctctaagagaaagaccctgtttgtgttattcatcattaaatccttggctagggcttagttcatagaaagtgttcaacaaatgttggttaaatgaatgaataagtgatagcatgatagtgtttagattgtcttaggttcaccccttttcaggttcttgcctgtcatctgaaacaactaaaacccatgggctatttgcctttcatcaaaatctgtacttagaagcagtgtggtatacagtccttacttaatgttgttggattcttagacaccgcaactttacgcaaaatgatgtataatgaaacaaatttttttctcatcaacgttataatgatgttgtttgagaatctgctataagtagttttgcttaaagtcacagtatccaagaacctatcactaacattaaatgaggacttactgtaatggaacaatttcaagcttcagagaacacaacagagtttcatgtaggctctggctctcattaactatgtgacctagggcaagatagttaacttctgtgagtctaattactcatttgtaaggtgggatcatggtacccacaatatgggatcattgtaaagttagagataatgcacagaaatgttctagtagaatacataacatatattaggatttccaaagtggtagctattattattataatctattataagtatactttaccttattgcagtatgttatcatgattaaaagcataattctctggagctgactgcctggattcaaattgcaaccctgccattatagctgtgtggccttgggcaagtcactttaattatctgagcctcaaaatggggaaagtaatatctgcctaataaggttcttgtaaggatcaaataggttaatatacataacatgcctagaacattgtctgatacattatcagtaatatatagatataaaatatttttaaaactctttctttccagtcatttattttaaagataatctgcaacaaaaatttaggttgaacaataatgccattgttacttatttagacgggtaataccagtagataacattagtgagtgtttgctgtacagtaggcactgtgctaggaactttgtgggcattatatcttttaatacaatagccctatgaagtgaatgctattgttaatgccaacctttaaaggagacaactgaagcttgggaaagttaagtaacttaccgcaaatcatcacacagccagctagttaggggcagaaacatattcaagcctaaacaatctgaattctgtctaccttcatagtcaccatattacttccaaattagcagcgaagtttgtattcagaatgacatcttcccctctctttcttagaacttaaagtgacctcggaaaggacttgtgactggacccttttggaatataaaacccatggcacatagtccttgcctatggaaacatagtccatggaaatataacctgttttctgcatatactacattgacacaaaaattttttaaaactatttccataatttctggtgcttacctttttttcccataggttattggggtacaggtggtatttggctacatgagtaagttcttcagtggtgctttgtgagattttgctgcacccatcacccgagcagtatacactgcaccctatttgtagtcttttatctctcaccccctcccacccttccccccaagtccccaaagtccattgtatcattcttatgcttttgcatcctcatagcttagctcccacatatcactgagaacatatggtgtttgattttccattcctgagttacttcacttagaataacagtctccagtctcatccaggagactgcaatgccattaattcattcctttttatggctgagtagtagttcatcgtgtatatataccacagtttctttatccactcattgattgatggacatttgggttggttccacgattttgcaattgtgaactgggctgctataaacatgagtgtgcaagtatcttttgcatataatgacttattttcctctgagtagatacccagcagtgggattgctggatcaaatagtagttctacttttagttctttaaggaatctccacactgttttccatagtggctgtactagttcacatttctaccagcaatgtagaagtgttctctgattgctgcatccacaccaacatctactggtttttgattttttgattatggccattcttgcaggaagaaggtagtatcgcattgtgattttgatttgtatttccctggtcattagtgatgttgagcattttttcatgtgttttcttggccatttgagaattgtctatttatgtccttagcctactgtttgatgggattgcttgtttttttcttactgatttgtttgagttcgttgtagattctggatgttagtcctttgtcagatgtatagattgtgaagattttcttccactctgtgggttgtctgttcactctgctgactgttctttggccatgcaaaagctctttagtttaattaagtcccagctatttgtttttattgcatttgcttttgggtacgccaatgtctagaagggtttttccaatgttatcttctagaatttttatagtttcaggtcttagatttaagtccttaatccatcttgagttgcttttatataagattcattctcctacatgtggctagccaatgatcccagcaccatttgttgaaaagggtgtcctttccccactattgttcactttgtcaaagatcagttggctgtaagtatttgagtttatttctgggttctctattctgttccattggcctatgtgcctatttttataccagtaccatggtgttttggtgacgatggccttatagtacagtttgaaatcaggtaatgcgatgcctccaggtttgttctttttgcttagtcttgctttggctgtgcaggccatgttttggttccatatgcattttaaaattgttttttctaattctgtgaagaatgatggtggtagggattgcactgaatttgtagattgcttttggcagcatggtcattttcacaatattgattctacctatccacgagcatgggatgtgtttccattcattgtgttgtctatgatttctttcagcaatgttttgtagtttttcttgtagaggtcttttgcctccttggttaggtatcttcctaaatttgttttttttgtgtggtttttttttgtgtgtgtgtttttgtagctgttgtaaaaggagttaaattcttgatttgactctccacttggttgctgttagtgtatagaagagctactgatttgtgtacattaatcttgtatccagaaacttggctgaattcttttatcagttctagcagctttctggaggagtctttagggttttcgaggtaaacaatcatattgtcagcaaacagtgacagtttgacttcctctttactgatttagatgccctttctttctttctcttgtctgattgcattgtctaggacttccagtagtatgttgaagaagaatggtgagagtgggcatccttgtcttgttccaattctcagagggaatgctttcaacttttctccattcattgttatgttggctgtgggtttgtcatagatggcttttattacattgaggtatgtcccttgtatgccactttcgctgagagttttaatcataaatggatgctggattttgttgaatgttttttctgcatccattgagatgatcatgtgatttttggttttaaaattctgtttatgtggtatatcacacttattgacttatgtatgttaaactgtccctacatccctggtatgaaacccacttaatcatggtggattatctttttgatatgttgttggattcagttagctagtattttgttaaggattttagcatctatgttcatcaaggatatcgggcagtagttttcttttttgcttatgtcctttcctgatttgggtattagggtgatgtcgccttcatagaatgaattagggagggttccctctttatctcatagaatagcgtcagaaggattggtaccaattcttctttgaatgtctggtagaattctgctgtgaatccatctggtcccagactttttttcgttggttttttttgagacggagtctcactctgtcgcccaggctggagtgcagtggcgtgatctcagcgcactgcaagctctacctctcttcacgccattctgcctcagcctcctgagtagctgggactactggtgcccaccaccatgcccagctaatcttttgtatttttagtagacagggtttcacggtgttagccaggatggtctcgatctcctaacctcatgatccgcccacctcagcctcccaaagcgctgggattacaggcgtgaggcaccacgcccggccttttgttggtaattttttaattcccatttcaatcttgctgcttattattggtctgttcagggtatctaattcttcctgatttaagctaggagggttgtatttttccaggaatttatccatctcttctaggttttctagcttgtgtaaaggtgtttgtagtagtcttgaatgatcttttgtgtctcagtggtgtcagttgtaatatgtcccgttttgtttcttaatgaggttatttggattttctctcttcttggttaatcttgctaacggtctatcaattttatttatcttttcaaagagccagcttttggtttcatgtatcttttgtatttgtttttgtttcaattacatttagttctgctttgatcttggttatttcctttcttctgctgggtttcggtttggtttgttcttgtttctctagttccttgaggtgtgaccttagaatgtcagtttgtgttctttcagtctttttgatgtaggcatttaggactatgacctttccttttagcactgcctttgctgcagcccagaggttttgataggttgtgtcattattgccattcagtttgaagaatttttaaatttccatcttgatttcatttttgatccaaggatcattcaggagcagcttatttaatttccatgtattggcatggttttgaaggttccttttggagttgatttccagtttattccactatggcctgagagagtgcttgatatgatttcaattttcttaaatttattaaggcttgttttctggcttatcacatggtctatcttggagaaagttccatgtgctgttgaatagaatgtgtaatctgcggttgttggatgaaatgctctgtatattatctgttaagttcatttgttccaaggcatagtttaaatccattttttctttgttgactttctgtcttgatgacctgtctagtgctgtcagtgtagtattgaagtcctccactattattgtgttgctgtctatctcatttcttaggtctattagtaattgttttataaatttgggagctccagtgttaggtgcataaatgtttaggattgtgatatttctcgttggacaaggccttttatcattatataatgtcctttgtctcttttaactgcttttgctttaaagtttgtttttgtctaatataaaaatagctacccctgcttggtgtccatttgcacaaactgcctttttccactcctttacttgatgtttatgtgagtccttatgtgttaggtgagtctcctgaaggcagcagatggttggtgagttcttatccattctgctattctgtatcttttaagtggaacatttatgccatttacattcgatgttagtattgagatttgaggtaccattgcattcattgtggtatttgttgcctgtgtaccttgttttttttgtttttgctttttaaattgtttttgttttataggtccttcatgatttatgcttttaagagattctgtttttgatgtgtttccaggatttgtttcaagatttagagctccttttcacagtttttttctttctttcttttttttttttttttttttttttgagacggagtttcgctttttcgcccaggctggagtgaagtggtgcaatctcgtctcactgcaccctccgcccccccaggttcaagcaattctcctgcctcagcctcccgagtagctgggattacaggcacccaccaccacgtccagctaatttttgtatttttagtagagacagggtttcaccatgttggccaggctagtctcaaactcctgacctcaggtgatccacccgcctcagcctcccaaagggctaggattacaggcatgagccactgcgcccagcctagcagttcttgtaatggtggtttggtagtagcagattctctcagcatttgtttgtctgagaaagactgtatctttccttcatatatgatgtttagtttcactgggtacaaaattcttggctgataattgctttgcatgaggaggcttaagatagggccctaatcccttctagcttgtagggtttctgcaaagaaatctgctgttaatcggataggttttcctttatagattacctggtgcttctgtctcacaactcttaagattctttcctttgtcttaactttagataacctgatgacagtgtgcctaggtgatgatctttttgtgatgaatttcccagatgctctttatgcttcttgtatttagatgcctaggtctctagcaaggccggggaaggtttcctcaattattcacccaaatatgttttccaaacttttagatttctcttattcctcaggaacaccgattattcttaggtttggctgtttaacataatcccagactttttggatgcttggttcataatttcttattcttttttctttgtgtttgttggattgggttaatttgaagaccttgtcttcaagctgtgaatttctttcttctatttgttcatttctattgctgggactttccagagcattttgcatttttgtaagtgtgtccagtgtttcctgaagttttgattgtttttctttatgctatttccttgaatgtttctcccttcacttctcgtattgttttttggatttccttgcgtcaggcttcgcttttctctggtgcctcgctgaattctttttcaggtaaatcagggatttcttattggtttgaatccattgctggtgagctagtgtgattttttttggaggtgttaaagagccttgttttgtcatattaccagagttggttttctggttccttcttatttgggtaggctctgtcagagaggcaaggtctagggctgaaggctgttgttcagattcttttgtcccacaggatgttcccttgatgtgatactctccccccttttcctatggatgtagcttcctatgagccgagctgcagtgattgttatctctcttctgggtctagccatccagccagtctgtctggctccggggtggtattcagggtttgtctgcacagagtcctgtgatgtgaatcgtttatgggtgtctcggccctgaataccacacagtatttggggtgtctcccaggtcctgcaggagcagtccacttccttcagagggtctgtgggtcctcttgggattcctggtttgttcttgcagttgttctggagctaaaattcatagtgcgagccccaacatgctgctttgtccgagttggagctgcaatctaatcctgcctcccatccgccatgatgatctaaatcctggtgcttatcttttctactgttgtttttgctttccctttttcttacttggaatcagttgtaagccaacacaggaaacagaaattcctcatgttcatttccccattgctatagcactgcaagcttatgacagaggagttccatgctcttgcctttgcagaagatcttagagatgctgaagaacagagagacgtccctaaatattttctttgaacctgaaatttttagtgactataatcataataagtattttgtgctttatggaattaactttcttacctccaagatcagatcagtagattgaatgtagttttcaatctataggtattctgcagagccttggggctccatggaagtgcttatggagggagatgggattagagtagtaatagtacctagtgctgagtagtaggtaagactctagggcccccacgttagtttcaacaagatctctattctcatccttatattagtgttccaagttaaatttcatttgaaagggggtttcattatgtaaatatacaaacatagacatacatctataaaaaaaaatgtgtacaaagttagttcggtccttcatatgaagcagtaactacacatacacacacaatagtgtatgtctgtactctccccagattataagctggagaagggatttatttatccagacaagctatctacatagaaattgcccttctgggtgactaatgggacccataattccttttagcctagaaatccatttctaacactaataactttcttttcctatcttaaaataggactcatcgctcagaggctacctatcctctcccccattcccaactacccaaaaagtttatatcatttacttaagcaagtcaaatttaatttcacacatatagatcatagttttcttactttgtgggggaagtgatatgtggaagcattaagagatatgttttttaaaatatgtctcattactttgtgtgtatttaatctgggtctataaacttggaaagggatgttatataatcatatagtcaggatattcttaagctggaatctgtggatacattataggtatgtatgactcctccagtccctaagatatgtagaatatcgtgttcatatctgttttttgtggggagagagtgagtccattgctttcatcagattttttaaggttttcaagactaagaaaacattaaggattacttatctcaccagttcttctacatctgggctaaatataagtacgctagaaaaataaacaaatgaggctgggcatagtagctcatgcctgcaatcccagcatttgggaggccaagatgggaggattgcttgagtccaggattttgagaccagcctgggcaacatggtgaaacctatcctctaccaaaaataaacaaaattaggcaggcatcgtggcatgtgcctgtagtcccagctgctcaggagtctgaggtgggaggatcgcttgagcctgagcggtcaaggcttcagtgagccaagatcataccgttgcactccagcctgggcaacaaagcaagaccttgtctcaaaaaaataaatgaataaaaataaaaaaaaaacaaatgaaacttggtatttttttaactgggatcaaacaaaaaagatagcaaattacagctattatttcagatagatcctttcagaggctccttgaactcaaatctattttcataattctaaggcattatttgccttttcactttcagtctctcatgagtgcataatggagtttcccagaggctacataacacgtactatcacaacagattgagcagagaagcagatatgagaatccagctgtctttttatgaaaccagacattaaagagatttgcaaaatgtaaaacaatgctggtctcttcttactaatttttaaaatttgaaaaacataactatttttcataaaagtatgttttttgtgttaaccatgtaaagggtctgtttttaatgaattaatatttttttgatttctcagttttaatttctcactttcatttaatttctcgttttatgagaaatgtagatagaagccaggtgtgatggctcacgcctgtaatcccaacactctgggaggccgaaacaagagaatcacttaagcctaagagttcaagcctagtcagggcaacacagtgagacccccatctctacaaaaaaatttaaaattagccacatatggtggcatgtgcctgtggtcccagctactcagaaggctgaggcaggaggatctcttgagcccaggagtttgaagttacagtaagctatgatagcaccactgtcctccagcctgggcagcagaatgagaccctgtctgaaaacaaaccaaaaaagaaatatagacagatataagataaacaagttctatggatctaatgtacagcttgagtggtaatggatgatgtgttaaataattcgactatggtagccaggtgcggtggctcacacctgtaatcccagcactttgggaggccgaggtgggcggatcatgaggtcaggagatcgagaccatcctggctaacacggtgaaaccctgcctctactaaaaatacaaaaaattagctgggtgtggtggcgggcacctgtagtcccagctaatcgggaggctgaggcaggagaatcgcctgaacccaagaggtggaggttgcagtgagccaagattgcaccactgcactccagcctggccaatagcgagacactgtctcaaaaaaaaaaaaaaattttgactatggtaatcattatacagtgtagacgtatttcaaatcaccatgttgtataccttgaatatattcaatctttggcaagtaatttttttttttttttttgagacagggtctggctctgtcacctccagactggagttcaatggcacaatctcagctcaccacaacctctgccgcctgagctcaagcaatcctcccatctcagcttcctaagtagctgggactacaggcgcatgccaccacgttcgttaatttttgtattttttgtagagacacagttttgccatgtttcccaggctggactcgaactcctgagcttgagtggtctgcccgccacagcctcccaaagtgctgggattacaggtgtgagccatcacgcctggcccaagtaaatatttttgaataaaaaaaatagatactattcacataaacaaaactctttgatattctcaataattttttaagagtattaaaggagtgtgaaaccaaaaagtttgaaaactgctattctgtaacaaatgacattttagaaatatgggtgcctctagaagttaaatcgggacggtgatgtgaatatgttgtctatatccttgtttctcaaagtatggcctaaggtacatctgcatcagtattacctgggagcttattaaaaatgcaggatcttgggcctcatcccagacttcctgaatcagaatcttcattttaacaagatctctggatgatttgtatacatattaatgtttgagaagctctaatctgtattacaccacactaacatttattttaatccagcatcgttcctaaaaggattaaagaaaactatataaataaatatcttcattatacatatgtactttataaaaatatatatagtttaatatgtaaatgcatgaacactaatagacatagttttttgaggctattattgatactgtcattgcaagcagttctttattttaaccatttggtcccactgttatcatatcataatatcagaacttcatgatacgagttcacagtcttgggtttgggtcatatatttaccaactttgtcatctcagataaaaattcaaactaatttccccatttgtaaattttacctataaaaatgaaataatgtatgttgaaaacatttgtaaactgaatgctaatgcatattagtctaagttttgctaggaattttacattaaacctgtatgcattattgcatagcctttaaagaaattccaatatatattttaaacagttcatttccctagagtttggtactaatggagttttatcccctagtgagtcaattacctttaattcattctatggctaacctacagcacaaactctagcagatttgtataggattatatgaatgggttggtatagatctatcctcagtatggcagaagaataacagcacagatctaataaaggtgagtcactttcagagctacagattttagactccccctagtggccatctggcaacaatcaaatttatacaaccatctttcaccttgctttctgtttgccttttgccactcttttttaagatctttagcaatctgaagaaaaaacaaaattctagtattagccattaccataaaatgtttttaggtgcttgttgtatttcaaaaaaattttttaaactattctgtctgttaaataaagttaacctaactgaggggtggacattaagaacctgaaagatagaaatcagagttataatacattgcaaactagaagagaagttaacagtacaagtgacagtaattatcacaatacttgatataattatgagggagaagcagactaacactaatttcacagtatttgcactagaccctttatttgtctattttaatccttcttcagccctggacttcatagatgaggaactcaagaatttagtaactgtcagacaatgagtacatggcaatagagttacactgccatgtagatgtgtactttttgactagaaagcctttagccaccattacatactgtcttaaaaaaacaagttaaattgcatggttttcatatcaaattttataatctgataagttatcaacatagtctaatgaattaaagaaagtaattttcattatggtgagaaaaatgcaattaagtgctttgtgtataaataggtattaaatattttgagattattttttgtcctctttttttttttttttttttttttttttttttttttttttgagacggaatgtcactctgccccccaggctgtagtgcagtggtgcgatcttggctgactgcaagatccacctcccgggttcacatcattctgctgcctcagcctcccaagtagctgggattacaggtgcccatcaccacacccatctaatttttatgtatttttagtagagacagggttttaccgtgttagctaggatggtctcaatctcctgacctggtgacccacccgcctcggcctcccaaagtgctgggattacaggtgtgaaccaccgcgcccggccttttcgtcctctctttcatgcacagttctcctttagttttccatcaatttggtatgtatttctatcaacttggggctgtttaatttaaatcagtaacgctaactattctgactagagaaatttaaaataagttgatctgaaagagtttaagaagaatttgagttgtgtaggagcatttatacacaaaatgttattttaaatttttactgttctggatttttcatcatatgaaaaacatttaatgaacatctccacacttttttccaccacttttctaggtctaattgtccaaaatgtggctctactggtgaatctggaaatgccaattacagatacaaactttccttaaaagttgcagaatcaaacaaattgtttgttattactgtatttggaagttgcttagatacattttttggtcttactgccactggtttgcacaggtaagaatacttaaaacatcctttttcctgactgcccttagaatttgaagatacaagtttataaggcaatatgcatttttgtagaaagataatcattcaaccccagattgtcaattcctttaaaagacaagcaagtaagaaagatgtttatttcctgaatacatattatgatgatattaaaacagtctccttttatttagggtaattaatctgtaattagaatattaagttataaatctctaatccaagttacagaaatagaggctaagaaagtaacatcatttcaaattgaagaattatccaaattgaggttagcattgaaacagttaggttcccctgaggcagaagaatctatttgagggaatatttgcatttcagaaattgaaattttattttttatctgtattgcaatttaatttgcatagtttgaccttttacgacattgtcctgagaatataagaataagcaattaaagcttttcttggccgggcgcggtagctcacgcctgtaatcccagcgctttgggaggccgaggcgggcggatcacaaggtcaggagatggagaccatcctggctaacacggtgaaaccccatctctactaaaaatacaaaaaattagctgggcatggtggtgggcgcctgtagtcccagctacgccgggaggctgaggcaggagaatggcatgaacccaggaggcagagcttgtagtgagccaagattgcaccactgcactccagcctgggagacagagcgagactctgtctcaaaaaaaaaaaaaaaagcttttcttccccctcagtcttctgccctcctcccctaatcacatgcaagaaatctatgtccacatttttgtgcttgagacaataaagggaccacaaccaggcttatcagagaaaagggatgactttttcctgctttcaagtgaagagctagagatgccaccactattcccactgccacttttatttttccttataatcattgccgggcctgatggttaggcaggtaactactttactcccacttgatcaattggttttgttgatttttctgtgctatgagaaactagagagaacaaactgcctggctcttaaagtcactttttttcctctataaaaggttcatgctgcattttcaaattaattgtgtctctgactttatggcaagtaaaatttcaaagttcattgcttcacattttttactttttttccaatcaaggtacattcaggatcctaataaaattccagaaacactggacaatgatacaactcagaatctattaactaaagcagttgaaacttgctttgttggacaaagctttatttttggagtgacggtaattgagactagctttctttttaataatctgttaacatttccattgtaatgaattatgtgaattttctaaatagttgttaggagttctgtacatgtgaaggcctgtagaaacactttaaactatgtaaaaatagcctataggtggtctgttaaaacaccatgtgtgacaacttcctctttcgaaagtcaggggagcctacttcaaatgctttcagagcttaaaaatataaatttattatatatttagaaatgttagatatttgtttttggtatttagtatttattttgccctccggattttgttcaaattctatagtaaaacttccaccaattctctagctttttaattctgtcttctataaaagagaataatggaacactgaaggcaaagtatcttgagtattgataagaatactaaaactagattaagaaagatggtcttaaatataaaagtgactgtagaagaagttaaaaaaaaaagaagttactcctttgactttgaaggagtaatagttttctgtctcatctatgctaaagggaacaaagagacatttttttccacactggaatcagggttttaaaagaggactccacaacagaagagtgagaaaaatccaaagggaaggtagaatcaacggctacagagctttacttgttaaaatcgtagacagtccttttctctcctctcttctttttcctcctcccctttttcccctcccctcccctcctctctttccttagctaaagagaactatgatagttgccatttattgagccactgctattttctaagcactgtgcagttttccattttattactaaacagtaatcctgcatttttatttttatttttattttataaaggagaagactcaggttaaataaattgtccaaagtctcaacactattaataaatgcgggaactaggatttcttcaaatcagtttaaacaagctctttactctaaggtttatattctcttacatatgctactttgcctataaaactaacagaatcgaaattggaattgggggatggaggtaatagttgtatctgttttaaccttttaaatctgtttattttattttatttttgagacagaatctcactctgtcacccaggctggactgcagtaccaagatcatggctcactgcagccttgacctccctaggctctggtgatctcccaccccagcctcctgagtagctgagactacaggcacacgccaccatgcccagctaatttttgtgggggtattttttttagaggagaggttttaccatgttgcccagtctggtctcaaactcttgaggctcaagtgatctgcctgcctcggcctctcaaagtgctgggattacaggcatgagccactgtgcctggctaaatttctgtttcatgtttaagtaaatggaagacaattttattcttacttaaatttctttgcttctttcacagaattttgaaaaccaacctggacaaggttcagatgccagtaacttcttacagcaatgctctgaccacaaaagaaaagccaaagcactagtggcttgccagattgttctaccagacccaggtattgcaggctttactgtcattgactacttccatcaacttttgcagacttttaatttcaggaaacttcagtgtgactctcaggcacctaacaatcacttacttgctttagatcactcaaatagtgatctcagcagcatatatacttctgacagcacttctgattttttcaagtcctgcagcaaggatactttttcaaaattctggcagccatcacttgaattcacttgcattgtttcacaactaacagataatgatgatttttcagcttcagaacaaagtaaggcctttggtactcttcagcagaacagaaagtccatctccattgcagaggccactggttccagtagctgccatgatcccattcaggattcatggagccttgtttcatatatggataaaaagagtacagcagaaaagttgggtaaagaacttggcttacaagctaaggagctgagtgcagttcacagcagtcatcatgaaattggagttaatgactctaatttattctctttggaaatgcgagagccccttgagtcaagtaatacaaaatccttccacagtgcagtggaaattaaaaataggtcccagcatgagctaccatgttttcagcatcatggtatagataccccaactagccttcagaagagatctgcatgttgtccaccttcgttactcagacttgaagagacagccagcagttcccaggatggtgaccctcaaatttgggatgatctgccattctctgaaagcctgaacaagtttctggcagttcttgaaagtgagattgctgtaacccaggcagatgtcagtagtaggaaacatcatgtagataatgacattgataaatttcatgcagaccacagcaggttatctgtgactccccagagaactactggagccctgcatacaccacctatagctttaagatcatcacaagtaatagtcaaagcaaactgtagcaaagatgacttccttttcaactgtaaaggaaatctaagtcctagtgttgaaaaggagtcacaaccagataacaaagtagaggctgtctctgtaaatcataatggaagagatatgtcagaatattttttaccgaatccttacctgtcagctctgtcttcatcttcaaaagatttagaaacaatagttactcttaagaagactatcagaatctcaccacacagggagagtgaccattctagtctaaataacaaatatttgaatggatgtggagaaatatcagtttcagaaatgaatgaaaagttgacaactctgtgttataggaagtataatgatgtctctgatctttgcaaattagaaaataaacaatattgtaggtggtccaagaaccaagatgacagttttacaatttgcaggaaacttacatatcctttagaaactctttgcaatagtccaaatagaagtacaaatacattgaaagaaatgccttggggacatatcaataacaacgtaacacagagctattctattggttatgaaggtagctatgatgcctctgctgatctctttgatgatattgctaaagaaatggacattgcaactgagattaccaaaaaatcacaggatattttgttaaaatggggaacatctttggcagaaagtcacccttcagagtctgatttttcactgagatcactttctgaagacttcatccagccttcacaaaaattatccttgcaaagcctatctgactctaggcattcaagaacatgctctccaacacctcattttcaatcagattcagaatataattttgaaaatagtcaagactttgttccatgttcacagtcaactccaatttcagggttccaccaaacaagaattcatgggataaacagagctttcaaaaaacctgtattttattcagatcttgatggtaactatgaaaaaataaggattttccctgaaaatgacaaacagcaagccagcccaagctgtccaaaaaatataaaaacacctagccagaaaatcagaagccctattgtatctggtgtttcacaaccagacgttttcaatcactacccttttgctgagtgccatgaaactgatagtgatgaatgggtccctcctaccacacaaaaaatatttccttcagatatgcttggattccaaggcataggtctagggaaatgccttgctgcctatcatttccctgatcaacaagagttaccaagaaagaaactgaaacatattagacaaggaaccaataaaggtttaattaagaagaaattaaagaatatgcttgcagcagttgttacgaaaaagaaaactcataaatataactgtaaaagttcaggctggatttccaaatgtccagacattcaagtcttagcagcacctcagctgcaccctattcttggacctgattcttgttcagaagtcaaatgttgccttccattttcagaaaaaggcccaccttcagtgtgtgaaactcgaagtgcttggtcacctgaattgttttcataaaaagtcacctgaacccaattcctgaacttttaaatctgtttggaaatgtttgccttcaggggtacggaaagcattctttacattttgaacacttggagagaagcaaattgaaaacaggactctgctgggagctactgtgccttttaaaatataaagccattgttttccccagggttttatctagaatactatgattaggtagttgagcactttatcttatactgtttattgtactttaataatattgttaagattgtttttgaaagtattaatgtttgttaaaatcacatatacatccagaaataaagactttgcaaaccaaaa

SEQ ID NO: 79 - DNA, 117043 bp, Homo sapiens
tgggaaataaagtcatttgtatgtttttctctcttgcacagcctaaaatgaccaatgtgtgatttcagtggaataaatggcgtccaaagtcacagatgctatagtctggtatcaaaagaaggtaagttgatagtcaaaacttttagctttctaaatgtttgaatttcaaaaatacatgtttatttcatgctatagatgttaggattttgagtgggaaaggaagattatttttatttttcttgtacttattttacttctaaataaattggaaagatgatgcttaaacatattttttctctactttttactctacaatagcaaagtagctagattaattataatagaaagcaaatctccaggagtggataaaattagcattttataaaaacattaacactttccttagtttaattttttaaaagaaagattagcagagctgttacataacttatatcaatagtttttaatttgtttcttgtaagttacaattcaatagctgaatgtttcagtaaaataaagttttgggaactctattttacaaactgaaatattaaagtgtttattttgatgttttaggattgtcgtacctactttaaatagctgtatcatcttatatatttcagaataagctttaccaatgtaatgtttttctttataaagtccaaaagaatataggcattttttgacaatacaataaactgtttgctcctaatgagtgttgtttatattctttaaaatttatgttgttttgtgtaataccttagatcttttgtgtacatagtggattatatttgtgttcacattttaaaacatttttataccttattcttcaggtctctattaacaaaatataatgatacatttaaagcttttcttatataggagaaaaaacagacttttttttttttttttttttgagatggaatctctctctctgtcacccagactggagtgtagtggcgcgatctcggctcactgcaacctctgcctcctgggttcaagcgattctcttgtctcagcctcccaagtagctgggattacaggcatatgctaccatgcctggctaatttttgtatatttagtagagacagggtttcgccgtgttggtcaggctgatcttgaactcctaacctcaggtgatccgcccgcctcagcctcccaaagtgctaggattacaggcttgagccaccgcgcccagccaaacagatgatttttaagttttgttcaattgaaaataagtgataattaaaacactttaaaagttagacaaactaagaatatggcctttttaaaaatattttttgagacaggatctcactctgttgcccaggcttgagtgcagttgcacactcatggctcactgcaaccttaacctcttgggctcatgtggtcctcctacctaaacctcccttagtagatggcatgggattatggtctgtttttagatgtgttatttgttttctgggtagaacatgccataggtatacaattatatttttcatatgaggtactttattggaagtattgatattgatatactattaattgtcttttgtgtttgttagtgcctccttttaaacttttaaacttccaatcaagttaaaaatcagtctgcttagctaaagagctaaagaaaattgtaagttaaggaaaacaaaacaaaacaaactttaaaaattttcctgtctatatctttgaaagtttttctctttcctaatttctatctacgggagtaataaacattttctctgtttggctttttacattaaacactttagactttactgaagatcatttatagaacatacttgattgacctttcttgggatcagagggtttgaaatattatactcagattcagttagccctgtaactgaagttagccctgtaattgaaatgaccctcttatccaagggtcatttacctgacagctttggatacatgcaaccaaaatattctccagagcaactataggaaatgtcataaaatatactagcaaatgtaatcacatattctattatatatatatttatttatttttgagacagggtctcactctgttaacacagtctggagtgctgtggcacaatcacggctcaccgcagccttgacctcctgggttcaagtgaacctctcacctcagcctcccaagtagctgggactacaggcatgtgccactatgcccagctagatcttgtatttttagtagagacggggttttgccatgttgcccaggcttatcacataaattagggagttgccagaaccattaactggatttgatttgctctatttttttccttttgcttttaaatttaattttattgaagaaatacatgtgatactttgaaagattagtgtttcaaggattattgcaaaaaaaaagcagcctgcaatactatccatccctatccttacctaacctttgagttttgctcccccagaggcaatcattttaaagtctttatagctcattggttctgaaaccaaagttctcccactcctcatcctaataacttttgatggaatactggcatttatgggtgggagtcagagatacaaaatgtcgtacaacattctaaactaggattggattgactgactttttctttaaagggccagatagtaaataatttaggttttgagtcataggtctctgctgcaaccactcaaccttgccttgccattgtagcacaaaagcagccatagacactatataaaattaatgagcatggctgtgttccagtaaaacttaatttacaaaagcaggcaagggtctagatttgacctgtaggccttgatttgctgacccacactctaagacagcctttgttgaataacaccatttttaaaaatgatatttcatgttttgaagcatgcctgccttgttttttcttggtcattttattgtagatgttacttgttgacttctgactatatgattaggatttagcttttttataagcttcccctaagtttcccccctctatcatcccagtgactccaaattttggtaaaatcagtatttggtgcttacattattatgtttgtgtatgtatcatttaaagatatgttatgttgtaatatttccaatctgtgtaactttttttcccctttgcttggttttacgaattctttttctaagtctctgatgaaattgtaacacttctcttattgcagtcagtcatattcaggtttatctcttccctttttcctttcttggaactgactctcctagaattctctgttcatctagtccatactgaatagattgttcttaagtcatgtctcccggctgccatcttagtattttcttttatcattagcctgagggttcccctcactggcttaggtcacacagatctgtttttctcttaaatatatgcttactaaaaaaaatttttagaggcatttgtacttcagtgaaatgaaggcaggagaactgcagctgtacttactgattatttaaccacaggtgaataactttatttctttgagtctcaatttccacttttctacattgactagctaatggttctcagcctcttttcaatcatggacccctttgtgttgaaagccaaggatcatattttgagaaaaatgtatacaatatacatatacagaaaataacacatctgtcttaaaacccaggttaagaagtcctggattatatgatttttaaaagttttaatattataatgttctttgattttgtgactatcattcaatagtatccagcttatactgagtagtatccttgtaaataaaaaccaaaaacatttatcttcattttcttgaatatttgtttggttagtaactcacttctttttatttttgagggagggtctcactttgtcacccaggctgaagtgcagtggtgtgaacacggctcactgcagcctcgacctcctgggctcaaacgatcctcctgcctcagccccccaagtagctggaactacaggctcatgccaccacacccacctaacttttgtatttttttgacgggatttcaccatgtttcccaggctggtctcaaacttctggcctcaagcgatcctcctgccttggactcccgaagtgctgggattgcaggcctgagccactgtgcccaaccataactcactttagagtcacctttctccactagaaaattgtgacgtttttatatttatgatttgaatactgaatggccaaaaaccatcacttgatttgtagactcttttgaacatgagctctaatatcagatgtgaaatttccaggagaaaatgaaaacaaactttgaaattattataaatgcgtacagaaattctacttaattatcaagtatttttgaataagttattcttttgttttgtttttttgttgagacagagtttcactctttcaccctggctggagtcagtggtacgatcttggctcacagcaacctctgcctcttgggttcaagcaattctcctgcctcagcctccccagtagctgggattacaggcaggtgctactacggccagctaatttttgtatttttagtagtgatgaggttttgctgtgttggccaggctggtctcgaaatcttgacctcatgcgatttgcccaccgtagcctcctaaagtgctgggattacaggcatgagccattgcacccggcctaaataaattattctatgcatggtttattttgacattttaaaagtcctttaatatccaattttaaacttcattttatcctattgtagccttcatagttatgaataattttaaaattcctgttggtccagagtaattttcagttattaacttggaggaactgttaatgcaacaagaatgacaacaggggagaaaccagaatagtttttagttaataatgagctgttgaatgtgttttgtggcaaaatactctgctttcatatatctagtttctcatttccaaggagagggaatggagttacttatcttttggaagttatttgaaatagggacctgaaattacatgtattgaaagataattgacacactaagtattcctttaaacaatatagtgacctgtaagattccactgtgactgtgcagataaaattatgagagaatgaggttctattttcactaggtaaatatataagagaagagtggcttagaaaaactccccaaatttaaaagggaaaaaaagcactggcaacattgtatagtcatagtaaaacagtgaatttagcttatagggctgaggaagaactgtatgatacagatcttggtcattgtctttaaggagtcagttgccaatgagaaaactaatgaatatgtttaatggcctttaaatatgagccagctttgggattcatttagtaatttaaatgagaaactagcctgagtaacatgaacttgactggtaactgctatcaattgtaaatagttgggaactttaaattttccacctttttggtaaagttcagccatgttaatgtgtgtgtgggcatgcacacgtgtgtgtgtgtatgtgtgtgtacttaagtatgtgtagggcatttcagagtactaacttgcctaagattgcacagatggctcaaaagtattaagtctcagctttcaactccaaaaccatgtgcagtcatttaatattatccttcctccatcagtctcctggattctttcgcaggtaagacaaatctaactcaaactatcttaaaggggaaatttattggctttcaagctaaaccgtgctgagtagtgaagcttttctcagggtttacttaatcccaagaccagagcaccatcagatgtgtccgtctgcctctttttttcctattgcttttctagagttggcttattccttcccatcacagatgcctttctccatgttgtgagaataagccccaaggtccctccataccccttctcttttagctccttgagaagaaaggatgtgtggaggaccgccatatgggggtttcctacccaaaattattcctgaccttttttcctggtggaagagcctctattttgttaaggaattcattcctctccacaggtcttacagccaaagaatgtgtatccgaagtctcagagggggtgaatcctgataagtctaacccaatcatggcattctgtttcccttgccagtgactggcatagaatggggcatgtattccaattatggctaatgagaaatgaagccttctgggaaaagtctctcacatcctaaaaacaaccaataataataatagcaaaccttatgtgatgcttattatgtgccactttttcaatgctttacatatattaaataacacagtataatgatatgaaatagagggttgccttcctgtcttgggacattggtgggtgaggcactgttgcctgaaattagtttcccttcccttccctcccctcccctcccctcgcctcccctcgcctcccctcgcctcccctcgcctcccttcccctcccttccccttccctcccctcccctccccttcccttccgttcccttctcttcctgcctatctcgctctgtcactcaggctgttgtgcagtgacacagtcatggcttactgcagtctccaactcctgggcttaagcagtcctcttgctcagccttccgagtagctgggactacagacttgcactatcatgcccaggtagttttcttccttttttgtagaggctgggtcttgctctgttgcccaagttggtcttgaactcctggcttcaagtgatccttttgcctcagcctcccaaagtgtcgacattgcaggcatgagcctgcaagcctgaagcttttatagtgacttagttcccatgaaaggagctttctaataggctgaggatgtcagaaatgaaagatggaaagaaaacttgagctttttaggactttatgaaccataaaattaatcagttctgaaagtgacctaatttgggatttcttactgtatgagagaataaatctctgtattttttcagtcatttgaagttgggttttttagtttcttgtttctgaaagcatcctaagtgatacacagaagtgctttctgatggggtatggctttctatacagtcctcttgccttggctggttatagtagtagagagaaaattaagatctaccaaaaagaagtactgaaccatagacaaatgcgcttattacattttcacttttatgtccttttcttgaatgtaattttaaactaccatgctttatagtatgataaggttaaaagagcactgtgtatagcatcgcgacctctatttgattttgtgacatttaccagcttatgatattgaacatgttatttaatttttctgagccttagttttttcttttgtaagctgcagatagtaatgcttcccttggatgaatcacacaggttgtgacagaataagtcaactttaaatatgatttttaaatctatgttcatgtttataggtacatagtaggtttaaatatttgtggggtacatgagatattttgatacaaacatataatcacatcactgtaaatggagtatccatcacttcaagcatttatcatttctttgtgttccaaacattctaattatacccttttagttattttaaattgtagagtaaattattgttgactgtagtcaccctgttatgctatcaagtactggatcttattcattctatctaactgtggttttgcacccattaaccatctctgtttcccatccctactacccttcccagcctctggtaatgatcactctactctacattttcatgagttcaattcttttaatttttagctcccacaaattagtgagaacctgtgaagtttgtctctctgtgcctggcttatttcacttaatataatgtcctccagttccattcatgttgttgcacatgtcgggatctcattctttcttacgacggaatactactccattgtgtatatgtaccaattttctttatccattcattcattgatggacacttaggttggttccaaatcttggttatcatgaatattgctgcagtgaacatgggagtgcagatatctcttcagtatactaatttcctattttggggtatatacctaggagtgggcttgctggatcatatggtagttctatttttagtttttcaaggaacctccgtactgttctccatagtggctgtactaatttgcattcctgtcaacgatgtacagggattcccatttctccacatccttgccggcatttgttgttgcctgtcttctggagaaaagccattttgactgaggtaagatgatatctcactgtagttttgatttgcatttctctgatgatccatgatgtgaagcaccttttcatatacctgtttgccatttgtgtgtcttcttttgagaaatgtctattcagaccttttgcccatttttaaaatggattattagatttttttcctatagagttgtttgagctccttgtatattctggttgttaattcattgtcagatgggtagtttgcaaatattttctatcattctgtaggttgtctctttgttgatattttcctttgctctgcagaagctttttaacttggtgtaattgcatttgtccatttttactttggttgcctgtgctttggtagtattactcaagaaacctttgcccagtccattatcttggagagtttccccaatgttttcttgtagtagtttcatagtttaaagtcttagatttaaatatttaatcaattttgatttgatttttgtatatgatgagagataggagtctagtttcattcttctgcatagggatatccagttttcccagcatcatttattgaagagactactttcaccatttgttgaagagaacatccatcgtgatgttcttggtacctttgttgaaaatgagcttactgtagatatatggatttgtttctgggcttctattgtgttccactgatcttcatgtctgtttttatgctagtaccatgctggagttttttttgttttgtttttgcttttttgagatggagtctccctctgtcgcccaggctggaatgtagtggcgtgatcccggcttactgcaacctctgcctcctgggttcaagtgattctcctgcctcagcctccagagtagctgggattacaggcatgcgccaccatgcctggctaatttatatatatatatatttatttatttattttagtagagacggggtttcatcagttggccaggctggtcttgaactgacctcaggtgatcactcacctcggcctcctaagttgctaggattacaggcgtgagccactgtgcccagccactgtgctgtttttgttataatagctctgtagtataatttgaagtcatgcaatgtgattcctccagttttgttgttttcactcagaatgtctgactattcttggtcttttgtggttccaaataaattaaattctaggattattttttctatttctctgaagaatgtcattggcattttgatagtgctacattgaatctgtagattgctttgggtagtatgcacgttttaacaatattaattctttgcatcagtgttttgtagttttcattgtggagacatttcatttgcatgattaagtttattcctaggtatcttattttatctgcagctattgtaaatgggattactttcttgatttctctttcagattgttcactgttggcatatagaaatgctactgatttttttatgttgattgcattctgcaacttgactgaatttgttcatcagttgtaatagatttttggtgcagtctttaggtttttccaagtaaaagatcatatcatctgtaaacaaggataattggacttcttcctttccaatttggataccttgtatttccttcttgtctgattgccctagctaggacttccattgccgtgttgaataacattggtgaaagtgggcagtggctgggcatggtggatcatgcctgcaatcccagaacttcgggaggctgaggtgggagaattgcttgaagccaggagttcaatgtcagcctggggaacatggctcaaccctgtctctacaaaatttaaaaaaaaaaaaaaaaaatccaggtgtggtggcatgcccctttatttctagctacttgggaagctgaggtgggaggatcacttgagccctagaattgaggctgcagtgagccatgtttgtgccaccactgcactctagcctgaaagacaaagcaagaccttgtctcaaaaaaaaaaaaaaaaaaaaaaaaaggcacgatggctcacaccctaaggcaggagggtctcttgaacccaggagttcaagagcagccaggcaacatagtgggacctcgtctctaaaaaaaatagagaaaaaataagccaggcatggtggcatacacctgtagttgcaactacttgggaggtagaggcaggagaatcacttgagcccaggagattgaggctgcagtgggccatgattgtgccactgcacaccaacctagttcacagagtgagaccctgtctcaaaaaaaaaaaaaaaaaaagaaaagtgatctgttttcttcccagaatgtgggggctttggggggaaaaaaacaaaatggtcatccttgttgtgttttagatctttgaggaaagtctttcagcttttccctaatcagtttgataccagcaatgcatccatcatatatggcttttattgtgttgaggtatgttccttctatacccagtttttttagtgtttttattatgaagggatgttgattgattttgtccttcattttgttgatatgatgtatgacattgattcatttgcatatgttgaaccatcatgcatccatagataaatcctacttggtcatgatgaatgatctttttaatgtgttattgtattcggtttgctattgtgttgaggatttttgtctttatcagggatactggcccatagttttctttttttgatatgtctttgtctggtttgggtatcagagtaatactggcctcataaaatgaatttgaaagtattccctctttttctacttttcagaatagtttgagaaggattggtattagttctttaaatgtttggtaaagtatagcagtgaagccattgggtcctgggcttttctttgctgggggactttttattacagctttgatctcattacttattattggtctgttcagattttggatttcttcatggtgcagttttggtagcttgtctgtgtttaggaatttgtccatttcttctaggttttccaatttattggcatatagttgctcatagcagtctctaataatcctttgaatttctgtagagtccattataatatgtccgttttcatctctaattatatttatttgtgtcttctttttttcttagtgtggctaaaggtttgttgattattttttcaaaaaacaaacttatttcattgatcttttgtattttttggtttcgatttcatttatttctgctctgatttttttttttttttttggagacagatctcactgtgttatgcaggctggtcttgaactactgagctcaagtgatctggctgccttggcctcccaaagtgctgggattactgctctgaacttttattatttattttcttctactactgattctgggtttgatttgcttttattttctagttatttacgatgcactgttaggttgtttgagtttttcaacttttttgatataggggctgattggattaaagaggattaaactttcctcttagtactgctttcactgtatctcataagttttagtatgttgtatttctattttatttgtttcaataattttttaaattttcttcttcatttcttcattgattcactggtaattcaggagcatattgtttaatttccatgtgtttgtgtagtttccaaaggtttttttgtgtgtgtgtgtgagatagccttgctttgttgcccaggctgcagtgcagtggcacaatcataactcactgcagccttgaattcctgggctcaagcaatcctcctgcctcagcctcttgagtagctgggaccacaggcatgtgccacccacctggctaattttttaaagttatttttgactgggcatggtggctcccgcctgtattcccagcactttcggaggctgaggcaggcagatcacttgaggtcaggagtttaagaccagcctggccaacatggtgaaaccccatctctactaaaaatagaaaaattagatttcttgctttttattttttgtgtatctgttgtaggttttttgatttgaggttatcatgaggcttgtgagtaacatctcataacccattgttttaaactgatgacaacttaataccgattgcaaaaactaacaagcaaatgccccttgctttttaactttttgttgtttctatttatatctttttatactgtctttatcttaaaaagttgttgtagttgttagttttaatacgttcatcttttagtctttctactcaatatgtgagtggtttatatatcacaaatacagtgttacaatattctgtgtttgtctgtgtacttaactattaccagtgtgttttgtaccttcagatgtttcttattgctttttaacctcctttcagattgaagaactccctttagcatttcttgaaggacagatctggtgttgatgaaatctctcaccttttgtttgtctaggaaagtatttttccttcatgtttgaaagatatttttcctggatatactattaaaggataaaagtttttttccgtcagcactttaaatatgtcatgccactctctcctggcctgtaaggtttccactgagaagtctgctgccagatgtattggagctccattgcatgttgtttcttttcttttgccagttttaggctcctttctttattcttgaccttcaggagtttgattattaaatgccttgaggtagtcttctttgggttacatctgcttgttgttctacgaccttcttatacttgaatattgatatctttctctagatttgttattatctctttgagtaaactttttaccccaatatctctctctctgcctcctttttaaagtcagtaactcttagatttgcctttttgagggtattttctagatcttatagccatgcttcattcttttttattcttttttcttttgtctcttctgactgtattttcaaatagtgtgctcactaattcttttttctgcttgatcagttctgctgttgacagactttgatgttttcttcagtatgtcagttgaatttttcagctctggaatttttttttttttgagacagagtcttgctctgttgcccaggctggagtgcagtggtgtgatctcagctcattgcagcctctgcctccttggttcaagcaattctcgtgcctcagcctcttgagtagctgggactacaggtgtgcaccaccatgcccagctaattttttgtattttagtagagacagggtttcaacatgttgccccggctggtctcaaacttctgagctcaagcaattcgcctacctcggcctcccaaagtgttgggattacaggtatgagccaccgtgcctggccactcagctctagatttttttttctctctctctctttcttttttttaaagtcaaccagtatatcttgaagccccagaatttgattaacattttaaaattatttcaatcttattgttaaatttttctaataggattccaaattccttctctcttttatcttgaatttcattgagcttcctcaaaatagctattttgaattatctgtcttcatggtctcatacctttgttactcgggaattggtcactggtgccttatttagttcatttggtgaggtcatgttttcctggatggtcttgatgtttgtgggtgttcattgatgtttggacattgaagagttaggtatttattgtattctttgtatcctgggtttgtttgtacctatccttcttgggaaggatttccaagtattcaaagggaatttagttttgtgatctaaatctttggtcactgcagccatgtctgcatcagggggcaacccaagcttggtaatgctgtgactcttgcaaacttgtgcaggtactgctttggttgtcttcagtaagaactgggaagactccctggattgtcagggagagtctcttcctttcctttagttttcaccaaacaaatggagtctctctgtctgctgagctgcctggagctgggggaagggtgatgcatgcacccctttggctaccactactaggactgtgcaggttagacctgaagccaatatggcactgtgtcttgcccaaggcctacagcgactactacctgggctatcagtaacattcactcaaggcccaagagctcttcagtcagcaggtagtaaatccagctaggcttgcgtccttccctccagagcatcaagctcccctgccctactccccgtaccccccaaccccagcccagggcaggtacagaaatgccatccaggagccagagcctggagtcaggaatcttagaaatctactccatgctgtattctgctgcagttgtgttggcacccaagccacaagacaaagttttttgcactcttctttctcctttgctcatgtaggagtttctctctgtggccaccaccgccccaggcccacagcaagtactgcctggctactgccagtgttcactcaaggaccaagggctcttcattcagtgtttggtgagtaatgccaggcctgttctctctgttcagggcagcaggctttgctctggcccatgctgggtccagaaatgctgaccaggacccaaggcctggaatcaaggaacccaggagcctgcctggtgttctaccctactgtggctgagctggtgcccaagctgcaagacgaagtccccctttctcttccttaagcagaaggaatcactctttgtagccatcacagctgagaatgtgctgggtcacacccaaagccagcaggaccctgggtctcacccaagacctgcagtgagtaccgcctgggtaccacttatgtgtattcaagacccaaggggtctttagtcagcaggtgatgaatcatgccatggctgcgtccttctcttcaaggcagtgggttcccttctgtcccagggtgtctagaagtgttgtctgagagctacagcctcgaatgggcacttcaggactctgcccagtgccctattctgttgtggctcacctgctatccaagttccaagacaaagtcttcttagtcctccttactcttcactctcctctccccaaatggaaggaaggagtctctcccagagctgtgagctgcactccctggagttggagaaggagtggtgcaagcattctcttggctgccccagctgctatctcactgggttgcatgcacgccaagtccactggctctgagcccagcacagtaccaggacttgcctaagaattgcagtccttgtggcctagagtgcctttcaagtttatttagggccacagaaggcggtaacctgtggtggtagggctagccggaacgcagtttctgactgcttggctggatgatacccctctgcctaggactggtctaaatgctccctccaggggcaccagctgaattctgccccatgttgctttccactgtgacagggcagcaccgagttccaatgcaaagtctcataatcactacactttctgtcccccaagcacgttgatatactctgtccacaccacgtggctgctgctgggaatgtgggaggggtggtgttgacaattcaagactgtctttcctacccttttcagtgtgtctttccttgataagggttaaaacaaagtactttgtttactcacctgatttttggtttttatagaggtgctttcttgtgtagtttgttcaatttggtgtttcttctggtagcatgattgctagaggtttgtatttgaccatcttgctccaataacctaaatatgatttcttgaaagttttttttaccaggtgtgatgttgcacacctatagtgtgcacacccagctacttacaaagctgaggcattgattgagtccaacattttgagtccaggttgggcagcataacaagaccctcatctctaaaaaataaaaataaatgtttaagtggtttataaattgtcaataaatatgaagtacagtcagccctccaggtctgtgggctccacatctgtggattcaagcaactgtgaatcaaaaataaatttttaaaaatttttacttatttatttatttatttttagagacagtgccttgctctgtctcccaggctagagtacagtggtgtgctcatatctcactgtaacctagaacttctggactcaaatgatcctcccacatcagcctcccaagtagctgggactacaggcacgcaccaccacacccagatcattttttaattttttgtaaagatggggtcttgctatattccccaggctggtcttgaactcctaggctcgaagtcctgggattacaggtgtgagctaccatacctggcttaaaagtattttttaaaaatgggtggttttgtttgtactgagcatgtgcagacttttttttccttgccgttattccctaaacaatacagtataacaactatttacagaacagttataatgtattaggtattataaataatctagagattatataaagtatatgagaggatgtgcatatgttatatgcacatattacaccatcttctataagggacttgagcattcatggattttgatatctgcaagtgttcctggcactaatcccccacagatactgagggatgactttatcactcttaaaaataataatagtaattatcttatgacttgcaatataacagatgacaaattagagtatctttcagtacttaagaatatctctaatgaccatgtttttgctactaatactcttcctttgatctggccaaactggtgggtatgtggttaaggcaaggccagagatggttcttcatccccttggccacagtgatcagtccaggtatgcgcagtgacctaagctgtcctttcataaacttttcaaaaattagagctgataggaaagactcttgcttctttcatgggggagttaacaaggatgaaagtctggagctacctctagatgtgttactgtattggagaaagttgtggaaagaaggaggaaatgagatagccccagaggtcatgaataggaaaaagagacaaccacaggccatcatggtactctggtctttggattctctctaccctgagattagctttgccccaagctttgagtagttcagccattatccgctaaggaattctccctttgttgaagctagtttgaattggattttttttaagagccctgactaaaacatggaaggagtatgtatatacaaacacgtattaatttttaaagaagtaacagtatatattcagaaaatcacatgaaatataaatcagcctgatgaatttttaccagctgaacacctgtgtaaaatatggctcagatcaaaaaccttccgtcacaaccatctgatggtaaccaccatatgaggcagtgtatcttagtagttaacaagaacacaggttttgggttttagaaagcagagatttgaatccttgttcttgagagtctgtataactttggataagttgcctaatttctctgaattccactttgttcatgtatataaagggataacactgtcttttatatttatttaaggattaattattgttacatgggtcagctgtcaacccagagttattgctttatattccttaaacttatcagagtactttatttcatggattaaaaaaattctcatgaggcttaaaatttcttgtaaatgaaaaatctgaaatactagacttctaatatccaaaggtagaaaagtgggtatttagttggtgtttgttgtctaacatgcatacagcaaaatcatgattaaatagcacttataaacctcaattttgcttgcttcagtcactgatcatgttttccatctcttcctctttaatgtcacttacttgccaaaaataagacttatcctagcagaaatagataggttagtttagttgctgtaacatttgccttttcacttaggatttttcttccctattttggttatgaagttcttaattttcctcctacacactgtctccagtttgggtatctgtagcctaaataatttgggttttagttttatttgtttacaaggaaaaaagaaactatactatgtgatagttgagggtttgactttagaggttatctagttcctgttaaactttttgctttataggcaagaaatcggacacccttagaagttaataacttgatcatgaattagtgattaaaaccaaaactaaggtctgctgacttttaggccactggtcttcctgtcctaaagtttctttgagaaacagaccgaagagactttgatgtaactcatttgtttaatttgagaggttttttttgtttgtttgtttgtttttaggtgacctctgatgtctctgtctttggagaagtatacacttttttttttttttttaaagatagggttagtattacagatacatatgtgttgatttaacaatgacaggaatgatgatgatgttagagtaccaccatacatttaaatagcatttttcccaagagtgcttctgtatatagtctcatggtttaatttattgtgataatgaaataaattaactcagtggttataacaagatataagaagttatattggttttctatgtctttcataacaaatgaccacaaactgggtgacttaaaacaatagaagtttatttttttcaccattcatgagtccagaagtccaaaatcaaggtgtcagcaaggatgggttccttctggagagagactgtgagggaaaaactgttctctgctttctcctaacttctagtgaacaatccttgttgttccctggcctgtagattcatcattccaatcttcacctcaatcttcacattgccttcttcacactctttctgtgttctctccttttcttatgaggacagtagtcattggatttaagtctcatctaagttaagatcttatcttgagatccttaactaattacatctgcaaagaccttatttccaaataaggaactattctgaggttccggtgcatgtgaatatttgtgggacactattcaacctactactgaaggataactgaagtatatttactggttttaatggatttcgtgtggagatgtgtagctttatttccatctgtgtagctgtatcgtagaccaccagtgaagaactgagtaagagaaggtcaggatcccaaatattttcttcatgttcttaaaagttacgattgtcgaacacctaggtcctctttttttaaaaaaaatttttcattccttaaagataccttgcaaaacaggaagtgagaatttcttttctttctttcttctttttttttttttttttgaagcagggtctctctgtgttacctgtgttggagtacagtggcacaatcacagcttactgcagccgcaacctcccaggcctaagcgatcttcccgcctcagcctctggagtagctgaggctatgactataggcatgcactaacacacctggctaatttttttattttaatttacaatgagaccctgtctcactgtgttgctcaggctggccttgaactcttgggctgaagcaatcctcctgctttggcctcccaaagtgctggaattacaagtgtgagccaccatgcctggtacctagctcctcttatatgaagtgttaaggaatacgtttatgcaaaattaagcacaattttctgctttcagttcttattaaatagatatttgggttgtttaacctaacagttatgaggtttcctttcttacttattataaataataataacattctttcacttttaaaaaactgcatgtaagttaaaccagagtgtatatttctcaatgtcctaatcttggaggattgtcaaacctactttgtgataaattattgattgtctcttaaaatgctgattgtctctattgggaccaaaaaacattgaatataaaagtttacatttagatgtgtataaaatattaatctgttgtttttgttataaaattggagcagttgagtcgacatgtgcagtttaaaaaatttatactcttattgaaatcaaatgtatgagaatattattttttctataactgctacaggctaccgaaaagccattcctgtctttgaggctacaggattttgtatttggggctaattatacacaacaatttaaagtgattatgtactagaggacatatttggctgtcctaggttagctggttttatttttatttagcaactttgggtgagtttcttaactttcctaagccttggtttctttatctgtaatattgagataagaatccttttaaaattgctgtgatgattaaatgacacaacatatataaacaccaagtacagtgcttggtgtatagtaggtattcaataaatactgctatagcacttcctctcccttctgttcacttttgctaaatatagactgttgttattaatcaaatgttaaattaaaggtttttgttaattgctctttttttttgaggcaggctctcactctgttacccaggctggagtgcagtggcacaatcacggttcactgcagccttgacctcctcggctcaagcaatcctcccaccccagcctcccatatagggacgtgccatcatgccctgttaattttttgttttgtgtattgtagtgatggggtctcactctgctgcccaggctggtctcgaactcctgggctcacgttatcctcccacctcggcctcccaaattgttaggattacagtcatgagccaccttacctggccttaattgttctcttaaattggacatttctatatcagttaaaatggaaaaacaccattagaagtggtcagttttcctttgtatttttgaaaattatgtacttacatttaattgctctctcccttattctttaatttctttttttatttttatttatttatttttattgtttgctttaatttctaacacaattttttccttagggtgtgtcattctttatctgggatcctttgaagtactttgttttcatggtaaagaggggtgttttaggaaggaacaaaacaaatgatgcattaaaaagtggatagaatagatagctataaaggcagatatagtttcagttatatcttacacttaattctacatggtaattttgaggaatgcactatcctacgtggtgaattttctgggtatttttttttaaatgatcaaattttcttttacttttgactctttcctttaacactgcaaatagagtagaaatgaccattttctaatattttcctgatttgtggtggttattgtctattatgactttggttataatacattgtgatagatctgtcctttattgtgagttctcagtttagccttatcttgatttgttgtttaatcagtttgcagaattgtaggtaaataggccaggcacagtggctcatgcctgtaattccagcactttgggaggccaaggtgggcagatcacttgaggccggaagtttgagaagagcctggccaacatggtgaaacctcgtctctactaaaaatacaaaaattagccagctgtggtggtgcatgcctgtaatcccagcactttgggaggccatggcaggtgcatcacctgaggttgagagttcaaggccagcctgaccaacatggagaaaccccgtctccactaaaaatacaaaattagctgggtgtggtagcgcatgcctgtaatcccagctattcaggaggctgaggcaggagaatcgcttgaacctggaaagcggaggttgcagtgagccaagatcgtgccattgcactccagcctgggcaacaagagcgaaactccatctcaaaaaaaaaaaaaagaaggaaaaatagaaaaaaatacctttcactcttccctagcagtacctttttaggcttctacacagtaatgtttatagactccaaggggatccatctatagttctccttagtataaaagtactgagttcataaaaacattatcagtagaaaattctttaaggtttttgaaatgtcttttttacagtgttaaggcactataatacatacatttctacatttttaacatttattttatatttgttctctttagaagttaagtgtttcataatagaatgtttttggtttttgttttgcaaataccttggtacatcaagactaggaatttctatatagtatataatttatttgaaatactgcagtcatttgcttatgactttttttggataaaaggaatagtttttccgttaaaaggaagcaatcattggcctgtagcggttgccagatacagcacctaaaaattaaagtagtagtttacacaggtatgaggagatccaagaaatgatgctatttgaatagagctgaagttctttattgaataaagcttcttatacctgtggggtattggaaagaaaaatattttatgacttactggaaaactagcctggaatctttttcattttttgatgaataggtttaaaacagagatgttcatcaatgatataatatttgccggttatattccaagtgtcttgcagtcagtttatttttaaccatagcaacagacatgatggtgaaataaagtagtagattactgttggcagcctaaaattaggcaaatgtaccaactttgaaaggcctgggagtgactaaaacactgtagttaacctgctgtatgtttacagttctacaaagaatgacataaatgccatttaacaggtaaacttagaagctaaattgctctttgcctaatggaccatagagtttattcaaataaaagctgtagattcagcaccaaggattgattcacagagaataaaatgctgaagatatacaacctaaaagtttcccatttgaacttttgccctgaatcaatatccttattggcatatatttgcctggccattttaagtgaagtcttgctttagtttgctttctgtttttggtgtctttttctctacccctgtgatggattcgaattacaaagagttctggtttacctagtttgtggagaagggggatagtgtaatctctaatgaagtaggatggtatataaagagctagttagtaaggtagccttattaaaatgtacttcttttacagctttggggaatcagaggaatgacgtcttatttttccaatctcaaaatggtaggcagcagggtgtatttctaattactgctgttttgtccactgtgacactttattatatggttcatttttatttactggtagaaaaccaaggagtaaattactaggtagaacctccttacattgatttcatataaggaaaattcagtacatttagttttacctatagagattgatttttaggattaaagattttttttttcttccctgtccacctcacctggtctcagtgtagttctaaagctaaagtttattacacatggattattaaagacttttttttttttaaccaagactttctctttccaaaaaatcatgtcctgataggatttacacgcatttatgtttaaataacatttatgatgtgcctactatgtatcaggcactgagttccctgttttgttttgtttttttttttttttggaagataggttcttactctgtcgcccaagctggagtgcagtggcacgatcatggctcactgcagcttcaacatcctgggctcctacctcagccttccaagtagctggggactacaggagtgagccaccatccccgcttagttttaaaaaaattttctgtagggatggagtttctccatgttgcccaggctgggctcaaactcctgagctcaagttatcctccagcctctgcctcctagagtgttgggattacaggtgtgaaccaccttacccagccccacggagttcttatctttaggaaactctgcatcatgggggagccaagatgtaaacaagtaactattatgctttatggtaaatgctacagtagaattaccttgaaagtgttacaggaactcacataaagttccctgtaaattttttcctctagtcaccattctgttactgcttttgtcttctaaatatttctcaaatctgttgtgatctccctaccttcattactctttcattcttgtgccagttaaatattttttctcacatccaccagagtgatttatcttaaacaaaaatttgaccttgtcacttatctttttaacactcgtcaaagcctttctttcatatgtggtataaactctttgcaaggcctataacgatttttctggtctaattccagttagctttgtagcctcattgcctacccctttcagccttcaacttttcttaccttctaacaccatccctccaaataaaactgtttgaagtcttcccatgctatttttcaccttagtgtttagactgcccacttatgcttttaattttttttttttttaactgaagttgctccttaaaactcaaagctggcatcttcccctcacggatatctttcataatcccctgaaaactggattaggtatctcctcctgctagtgctcctatgggaaagttgtgtgtgttctttttgtggcagtggtatagcgctttttttttttcttgattctttctctttacagtttacagagtaatattgtagttacctagcatcctccaaaggtcaccactgtgttgcttgtttgtttaattatcattatgaacttatggctttaaagatatttcatatgtttccacctgttggagttattgtccataataatgtctttcccattgtcagacagattgttctgtcttaataataggagcttatttaggttggcttctgaatctttttgacatgaccctagtagtatgatagtattcactgaggaaaaaaatttgaaatgggagcaattgtttctgcatggagacagggaaagctacagagagatcttgatcctcttttaccatcctagatataaacattctgagatgttccatataagctaaattcattctgctccatttaacaataattacctgggaatctcctcttttttctttttttttttagacagagtctcgctctgttgcccaggctggagtgcagtggcacgatctcagctcactgcaacctctgcttcccgggttcaagcgattctcctgcctcagccccctgagtagctgggactacaggcatgcgtcaccatgcctggctaatttttgtatttttagtagagacggggtttcaccatgttagtcaggcttggtctcaaactcctgacctcatgttccacccagcgcagcctcctaaagtgctggcattatagatgtgagccatgtcacccagccaatctcttttataatatcaattattattctacttctgtattacagtggtattttgtttattctactgcttattacagcctgacttgataattaatctcccctgctaatccatgagagtaagaatcattatctttatatcgccattatttcagggtcttactgtatacttggtacttggtaaatgtttactgctttgataacagtgctgtcaggagacagtatttatattaaacttctaatttatatagttttttattcttaaattaagtacctttgatgtgccatgtatcaagccaggcacttatttcaagggacttgatttgagttgtcaaatctgtgaaataggctctttatactgattattacattaagtattaggctgggctcggtggctcatgcctgtaatcccagtactttgggaggcgaaggcgggcagatctcttgaggtcaggagttcaagaccagcctggccaatatggtgaaaccatgtctctactaaaaatacaaaaattagtcaggcatggtggtgcacacctgtagtcccagctatttgggaggccgaggcaggagaatcacttgaacttgggaggcagaggttgcagtgagtcaagatcacaccaccacactcctgcctggatgacagagcgagactacctctccaaaaaaaaaaaaaaaaaaaattattaaacgtaatagtttattctgtagtaacatttcctgaagtgtgctctacatgatgttaataagtattaggagaataaaaggattttgtagtcaaatcagtttgggaaatattgagtgagacacaggcaaacaagttatatgatttcaggattttccagtgcaaataatgtgcagttgactgtctaagaggcagacagagaaaatatcatttctcaatttatttgacttaattttttcccctgagtatctgttgaacatacttaggaaaatactggcctgtggttaacaagttacgtaaaagagtgtggtgcagtggaaagggcatggaattggaagtcagaagctgggttttaccatctgtaaaacctgacgtctcttaaagcctcaattgtctcgtcagtaaaaaaaaaaagttaatactggtctgtacagcataagattgttctctttaatggtctcttatttgatttcaaatgaatgaatagcaataatatgttaggtatttttaaaataagtaaccaagttatgttaatatttttggcatttaaattgccttaaaatatgacatagcttttcttgttatagtaaactattagaaatatgtaaacaaggatggtgctgtagccttgatttatattttgtacacatgatttagtcagggttatgttttagaatgataaaccagagtatatgctatgatgagtagtaaaagaatgcaaataggcatatacattctttccttgtcacatgctgcaatatgaaggaaaaggaagcattaggtaatagccagatgacataatggttaattattgagcttttgcatgtctgttcctgttgtttgctccatacatattagtacatttagtccttataattaccctttgattaataatactaattattttacatgttgttaaggctaagttggacttcttgaagagttttgtgtatttttatttgctttttaaataagccctgacagcttgcctgctggcaagatagcccacagaaggtaatacagggagaagtatatgacaatgattagggattaaatgtaacccttcccagacatctcttagtgatcagaaccaaggcaagtgaacgtagggtcgtttttgtggatggatattaatgaaattactggtgggtaagagcacagctatggagccaggttgtctgtgtttgaattcctgtttattgctactatttaaccttgtacagcctaagtctttatactgtaaacatagagatagctgtaatacctacttaatagtgctgtgagaattaaataagttaatacgtggaaggggtatcagcacttgataaatgctgactacttattattgctgttattgtaatattgtgaacattaactgcctcaactggcatttgaggagtaaaaagcagagacattagtatacttcagtaactgtggttggactttctatccaaggtgggggaaagggcgcagctaaggagttctggtgtatcataggaaaaaattatctaatagtagatagcagttgacaagagtatgtgagagctttcatttttttctcctgacatcatcttagattgggtgatagacagtgtaataaagtaaatacttaatctacagcttgatgctgtaaaacatctgtgcagttctcctttacatacgatcttttgttttagtagattgatgaatccctgtttaaggaatttacaaagttggcagaactttaaagcaagttgtattctagggggcaaatcatgcccagtaccttttataaagtagttaatacagatgagaggatatcataaatatacccattaatgttaagaaacatttccttttttccccccattctatataaagtaccttggtggaaacttcccagtctccttggatggcatttagccttttatatgtgaaagaagtaataaaattggatcttttgtttttttttttgagacagggtctcactttgttgccaggctagagtagtatcctgcactatcatagctcaatgcagcctccaactcctgagctcaagcagtcttcctgccttagcctcccaagtagctggagctacaggcatgcaccacctcgcaagtggctaattaaaaaaaaattttttttttttttttttttttttttttgcagaacagagtcttgctttgttgcccaggctggtcttgaactcccggcttcaagcaatcctcctacctcagccttccagagtgctgggactacaggcatgtgccaactcgcccagccaaaattgaactttttattacaatcatgaatacaaagaaaaagtgaaagctattcttcatattctgattaattaaaaacaaatttcagtaagtcaaagaatggatatacctgaaatgggtagcacatttacttaattctcatctaaacaagtaatttgaaacggtttctgctactaagaatagcaatttccacaaattgctattattttgagaaaagacaaatcagatttatcctaggaaggtagcattagataatggaaagcctatgggcttttatgcttgcagatggaatccaacttctgtgttttaaaaactatctggccttgggctaacatctctgagactcagtttcctcacgtttaaaaggggaatgataatgttgacttttaaatgatttttgagaaagttctagcacagtatctgagaaattttaaaataaatattccctttcattttggcttgaacaacttgaatttgtaccacacataaatatagatcctattcgtactttattaatcttagtgacttaaaaatcaagcaggaaaaagcaaaaaaacaaaaaagatctttggaatagaacatcctgtctttcagtctggttctgtcattggttctcttttgactttgagcaagttattgaaggtctttacatctgtttcattttttcagtttttaaatttttaattgatacgtaattaattatacatcttatgggatacatgtaatattttgatacatacaatgggtaatgattagatcagggtaattaggatatccattacctcaaacatttatcatttctttgtgttgggaacattttaaaactactcttccagctatattgaaatatataataaattattgttaccctcctgtgctatcaaacactagaacttaattctttctatgtgtgttttgcacccattaaccaaactttctttatcctcctcacttcccagtctcctgtattactctctacctccatgagatcaacttttatagctcccatatatgagaacatagcaatatttgtctttctatgactggcttatttcatttaacataatgaccttcagttccatccacgttgctgcaaatggcaggacttccttcttttatattgctagatcatatggtagttcaatttttagttttttaaggaaccttcatactgtttaccatggtggctgtactaatttacattcttaccaacagtgtattagcattcctctttctctagatctcaccagcatatgttattttttgtcttttcaatagtagccattttaactagagtgagatgatatctcattgtggttttgatttgtatttccccgatgattagtgatgttgagtttttttgttgttgctgtttttgttttgattttttaacatacctgttggccacttggtttgtcttcttttgagaaatatctatggcgatcttttacccatatatttgaattggattatttgtttttttgctgttgagttgtttgagttccttatatattctggttattaatcctttgttggatagtttgtaaatattttctcccattctgcaggttgtctcttcactctgttgttttctttgctgtgcagaagctttttagtttcatgtaattccatttgtctatttttgcttttgttgcctgtgcttttggggtcctaccccaaaattctttgcctagatcagtgtcctgaagtgtttctccaatgttttcttctagtagttttatagtgttaggtattacttttaaatctttaatccattttgttttttttttttttggtatgttgtattagggttctctagagggacagaactaatggaaaaaaattatatatatgagtttattaagtattaactcacactatcacaaggtctcacaataggccatctgcaggctgaggagcaaggagagccaatccgagttccaaaactgaagaacttggaatccgctgttcaagggcaggaagcatccagcacaggagaaagatataggctgggaggctaggccaggccagtctctcttttcacatttttctgcctgcttgtatgctagccacactggcagctgattagcttgtgcccacctagattaagggtgggtctgcttttcccagcccactgactcaaatgtttatctcctttggcaacaccctcacagacacacccaggatcaaaactttgtatccttcagtccagtcaagtttgcactcagtattaagcatcacaagtccaccccttgtcaacctgaacccatacacatctcctgagatcatatataatcttcaaataaagacaataataagcctaacataacacagctatcctttgtacaaccagaaatgcaccaatccccattccaaatactattacataaagttaacaatacttaaatgctgatgtgaagtcaataaatctttatatcacatgataaaggagaaaggaaataaaaatgaagatattttcttagtataagtgtatacatgcacaaacatttttaacaaaagaaggaggaaacactcatgacagttacagtccttgtttctgcagctgatcgtgtggtcgtagctggtattgatgactaccttcttctactacccattctgtattcccttggccttcagcaagcacctcagcaagtcatggtgttttctctggtggagtgacccaaaccttcattcctgaatggtctcggggtcatttgtagtcctgcctgaattgggctgttgtagtttcccattgaccttaatcacacggcatggtgatattaagagacgccttaatggatcttgtgtattccatgaatactcttccttacctccgttgtggagtagtagactgatttcatcttgatagtccaggccaatcactgtaactcccttcttagcctgttgacttaaaggtagggggagcccaaagtgtccaggtggcaatcttaacttccagtttaatggagttgtgtctcctcttggcagtgttcctccctctggaactaagacctccaggccaggagaacgtaatgtctcaggaacaggaagcaaaaattttactagtgtatcactaggggtgatggtaagtggtgctacttccaattctaccccttgattcctgaacctgtgaatcctggctattggagaaacagtaccatatattggatgctgattcagagcatacactttgccccagccctgcaaagtattgtcacctagttgccgttgtaattgtgacttcgaaagggtattccactgttgtgtcaatccagctgcttcagaatgatggggagcatggtaagaccagtgaattccataagcatgagcccactgccacacttctgtagctgtaaagtgagtgccttggtcaaaggcaatgctgtgtggaataccatgatgttggataaggcattccatgagtccatgatggtagtcttggcagaagcttgcatgcaggataggtaaacccatatctggagtaagggtttattccagtgaggacaaacctctgccctttccgtgatggaaaaggttcaatataatcaatctgccaccaggtaactggctgatcaccccgaggaatggtgccatatggagggctcagtgttggtctctgctgctggcaaattgggcactcagcaatggctgcagccagatcagccttggtgagtggaagtccatgttgctgagcccatgcgtaacctccatccctgccaccatggccactttgttcatgggcccattggacgatgatggggtggctggggaaagagactgagtggtgtcatcctctccacttgattgttaaaatcctgctctgctgaggtcacccactggtgagcactcacatggggtacaaataccttcacagtttttgaccactcagagaggtccatccacatacctcttccccagatttgtataaactaagtaggaatgcaataggcttcctatcagttttacttctaggaacactgtgattaattagccaatgccagagctctacatgagtcagactattctgattgccgctttgcctctgctgtccattatggtagccacacccaccttgcctttgatggttgattgctgccacttggcccctgccacctcaggatccagttattcccattgtaatttaaattttgtagttgagtgactgcacttcccactgttagacctgacatacctgaaagagcaattacagggctcttcagagatgcaggtgctgccctcacaaatctagttcacaaggcattggtcaagagtacctcttctggacccttctagctggggaggtcagtaggtctaaagtgactaatccgctccaccatcccagtctccctaagcctttagatcccttcctctacattaaaccaagggagatcagacatttctagctcactcagagtgggccatcttttaatccggatttcagcaaaccaagcaaataaactattagaacctttttttttttggagacagagtcttgctctgtcaccagactagagtgcagtggcacgatctcagctcactgcaacctctgcctcccgggttcaagcgagtcccctgcctcagcctccaagtagctgggattacaggcatgtgccactatgcctggctaattttttgtattttagtagagacggggtttcacaatgttggccaaggtggtctcgatctcctgacctcgtgatccccctgcctcagtctcccatagtgctgggattacaggcgtgagccactgtgctcggcctagaaccttttttaactcccggagctgcagcattaaatgcagagtccctacttagtgggcccaaatccataaattcagcttgatccaactctgtgttccttccgccgttatcccacacccttaacatccattcccatgcctgttctgcagatttctatttatataaattagaaaactcaagcagttctttttgagtttagtgcacctcctcatcagtcacactatcaacccccccatctctaggggccggctgggactttagtctagttatagttctagaagcaaacaggggtgtgagaggtggcacctgaggagaatcagtgttatcttgcctcacagctgcctcaggggaggccatcactgttgcctcaggcagcacaaggtttatctcttcagacaaaggtggaaaggctgatggcagcatgggtcggggaggggatgttgccactactggggatgaggaagctgttccttctggcaaaaaaagattcatcagaatttacaaactcagtgtcctgcctcatcagggtcctcccacacgtctccattccaagtttcagggtcgcattcttttctatcaatgccctcactttaacagtagacacctggcgacgctgtgcatgtacctttcagtgaaggtcagccacttgcgtgataatagcttgtgtctgtttttctacaatttcagctatttctctaggggagataagactctcacccagggcaatcttagcagatttgaggctcagtatctgcttctgaagccaggagatagaatccctgagttcataattttctttcatcactttgtccactgaacttaggagcaaccaaccaacttcattatgttccttggttctccacatatggtcaaaggtattgtgttgagtcactaaactccttgcctctcatgagtgatgaatcaggagtgtcaaatgcatttattttgcaaaactctccaaacagttcatgccaaggactaacagtgttctccatactattagaaatagagtccttagcatttttgggtctaatcacattaagcagccaactccagaaaccccaaaaccaacaaaagaactccatccttaatattctgttcctctagaaccactcctggtaccaaaatctgttggtcaaggttctctagagggacagaactaatggaataactatatatataaaggagagtttattaagtattaactcatgattacaaggtctcacaatagaccgtctgcaagctgaggagcaaggagagccagtccaagttccaaaactgaagaacttggaatccgctgttccagggcaggaagcattcagcacatgaaaaagatataggctgggaagctaggccagtctctctattcatatttttctgcctgcttatattctagctacactggcagctgattagattgtgcccacccaaattaaaggtgtgtctgcttttcccagcccactgactcaaatgttaatctcctttggcagcaccctcacagacacacccaggatcaatactttgtatccttcaatccagtcaagttgacagtcagtattaaccatcacatatgtggtaaaatataggggtctagtttcattcttctgtatatggatatcagttttcccagcaccatttattgaagagactgtcttttccccaataaacgttcttggtgcctttgtcaaaaatcaggtggttataaataggtggatttatttcagagtcctctattctgttccattggtctctgtgtctattttatgccaggcccatggtcttttggttactataggtttgtaatatattttgaaatcaggtggtgtgctgccttcagctttgttctttttgcttccagtcactttggctagtgctgtatgaattgtaggattgtttttttctatttctgtgtaggggttgcattgactcagtagattatctttggtagtatggtcattttcacaacattcttctagtccatgagcgtgggatgtcttcatttttttgtgacctctttgatttctttcatcagtgttttgtagttttcttacatagatcttccacctccctggttagatttattcctaggttttttaaaaaaatagtttaatttttaaaaaatctattcctgtgtgtgtgtatgtgtgtgtttaaagaaaacagtcatcttctttaaaattggaataactctgtctatttccaggcttgttataaggattaaacaacattgtttaagtaaagtagttggcccagagcctcctatatcatggttgttatatttgttgactaataataacaggtaatatttatttatttatttatttatttattattattattatttttttgacatggagtctcgctgtgttgcccaggctggagtgcggtggcaccatcttggctcactgcaagctccgtctcctgggttcacaccattctcctgcctcagcctcccgagtagctgggactacaggcgcctgccaccacgcctggctaattttttgtatttttagtagagacggggtttcagtgcgttagccgggatggtcttgatctcctgacctcgtgatctgcctgcctcagtctcccaaagtgctgggattacaggcgtgagaaaccgtgctgggccaataacaggtaatatttattgaacacttcatgtgtgccacacaatgtctgaaagtactttatatacatttcatcatcacaaaaagcctattaaatatatattactgctattatcctgattttataactgaggcaactacggtttagagaagtctagtagttttcttaaggtcacacagtgcctgtgtgcctgagctagaattcaaatctagttggtctgggccatagtatctgcactctttacttaacagtgattccactccccactttacaaccaaatctagcctatttcttttacttttttcttacctggctttgggttcttaggtggttgagagaaatggcattaaatttgtcatctgtgtctcattccctgcctggactgccatcaaggaccagcaaatgcttaataaatggtagcagcagttactgattattaatacaactatcactttttaagtgtttttagtctattagaagtcttgtacatttactgactaggtcgattttggtcagtgttatttaactgagtaaattcaatttttataaatgcgtctgtggccaaaagaattatgaccagtgttgattaatgtcttagattaggtgggaagatgaagttcatgtcttttgaagtttttttctcttttaagtttgatatataaaatatgagcaacacttttattagtggtaaaatgaagataatgtttatatcccatctttcactgtgtttctttgatttagaagctaaagaagtcagctgggcttggtggcttacatctgtaatcgcagcactttgggagggcaaagaggaaggatcacttgcgcccaggagttcaagaccagcctgggcaacaaagtgagatcctgtctctacaaaataaataaaataaaataaaataaattatccaggcatggtggtacacacctgcagttgcagctacgcaggaggctgagatgggaggatcactgtgattgcaccactgcataatttaagagtgtgttttaaataattttcaatgatttccactctataataattcagataacacttatcaaaaattccaaataattttgaattgagtaatgttaaattgtgtgggtttggctctaaaagctttaacacttgggaattataggtttgttaaatagaacttgggtatttacccttaaagtattttcaccctctgtttgatttaaataagatatatttgaattattttcccatgattaatggaagtcagtaatgatcttttctctctcttttttttttttttttttgagacagagtttcgctctgtcacccaggctggagtgcagtggcacaatcttggctcactgcaacctccacctcctgggttcaagcgattctcctgcttcagcctcctgagttgctgcacgtgccaccatgcctggctaatttttgtattttcagtagagacagggtttcactgtgtcggtcaggctggtctcgaactcctgacctcatgatccccgctctcggcctcccaaagtcctgggattacaggcgtgagccaccacgcctggccaataatgatcttttctttcctcactagcagggtcttcacagttcatcatccaaggttaggttaagtagaaaagcagaagttaaattatctttgctaaaatgactttttggaaaaggttattaatcacatagtagcttgataaataaatccactcagaacatactgccatgtaccagcaagttggaaaatgaacagtcttcataaattatgcagaatggtattggtttgcatgcattaacagcaatgttctcattaaacttgggccaggaaaaaccaccatggtgttctgcttctacttttcaccacatgcgtaaactgtgccaacatcagccagctaagacatgggaaggaaaggaaaccaaggctgtgtagggccccttagcatcaggatttctggaaacttctctcttaggatctgtagttaatgttaattttattcctctgtctcagccgtctgtctctgtttctcctattcatgtgatgtctagaatggaaagtctggctccacttgagttgtgtgtctggctttgaatcactgttgggggaaggggatgtgcaggatcaaataacacagatgtggaggttggtagtccctctcagagtatagcaagacttcagtactttatgcttagtgatgtagttgcccaattaattcatcttgcctactgcccggaaaaaccaatgcactgagaacagcaggtttttgcagcagagagttgaaaaatcgcagggccaggcaaacagaacaagagaggttattattattcaaattggtctatgaaattttggagactgggttttgttttgttttaggataatttggcaagcagtgggctagggaataggaaatgctgattggttggatcagggatgaaatcatagggtgttaaagctgtcttcttgcactgtcagtccctgggtgggattacaagaccagttgagccattttatgggtctgggtggcgccagcttgtccattagaatgcagggtccgaaaaatacctcaaacaccaattttagttttacaatagtgatgttatctgtaggagcaactggggagtaggagcaactggggaggttatgaatcttgtgacctctggctacatgactcctgagccataatttctagtctcatggctaatttgttagttttacaaaggtggtttcaaaggaggctgtagttttgggaagggctgttatcatccttcctttaaactataaactaaattccttccaaagttagcttggctactcccaggaatgaacaagcacagcttggaggttagaagcaagatggagtcagctatgtcagatttctcctactgtcataattttgcaaagcagtttcagtgattgatttactgattttacgtaagtataaatgagagatgggtattgaatcaactagatgtgtatttttaatctctaaattaaagatttatttctttaagtattaaaaagggtggcttggcatttgagggttattgagggacccctgaagtgacactgtatctagatagatctatctagatctagctaggtaggtggatgttatctagttcacctggccgaatggccttttttcaaacctgcttttattctgtgatgccgtggttagtagtagcagtgcagtcccaggtacttaagccagaaactgtcatctttatttcttatgcaaccatatccagtgagtttcctattcctgtacattttatcttacagacattggtcctttcagaccatctcttagtggtatgcaatagtacttaacttgattcggctttgaatttgactttttgaatattttttctttgtatttataacttcttagaggcagattctaccgtaatcatagtgttactagcattgagggctaatctttttaatattttttgaggactgaaggaccatagctggggaggagtcagatgagatggtccatggctgctgctgcttctcatatggccaacccctcatggctgcagaggcctaaagaactcgtgatggccttctctccttggcttcttccagaagttggaattctcccagctctaccacaaagctgtttgccgggctccctttcttccattccctccctttcctgtatgaaccagttgaattatttccacaaccacctaatgcaatttaagttactcttctgtcacaaagatggaatgtttttgttttcctgggtaattggcatattttagcattttggctctttaactcattttttttcctgatgtccaagaatggatggataattgacatagtcaattatctatcatctatctgcctttttatactactaaaatttcttatggttttgttgttaaaatatctctttagctgaaagtttctcttatgtatcttataggaaaagccaaatttattttcataaattgattttgagcagtggcagttgctttcttaataacttgccctcttctactcacagtacttttccatgagaaatgtatacaaaagcatctagcctaacacctaacacttgattgttagttgagggtattagctcccttttcctcttgatttgtaaaatattggtttttattataaatgttaaagtgatacatatttatcataggaaaagtggaaaatgcaggttaagtataatgaaagttagaatcacacagttgctctactgttgacattatgactttttcccaacaatattagcatcgtattttttattttcctgttttcatgtaacataaccaaaagtatgttctcacattactaaattttaaaaacataattttatgaccataacattttattctctgagtatgccataatgtatttattaagccattcccctgtttacaaatagcattcgttaagttgtcaaactaatcttttatttgtttatgagctttctagaggtagagatttctcagtaactcagtaaataggaacattttcaggcttttaagacatcagtccccacatataaaatcattctcccatcttagctgccatcccatcctgtatgtagataccctgttcatctctctcaagatctttattctagaccttctttgtctttcttgggctccaacacctcacaccaagatgtcttacaagtggatgccctccttaccctgcttgagtttctgtaccctgtgcttggtcatccccacatgtggtcatccttctcgccctgctcaggctctgactctcctcacccccacaacgtcctccttcacatcccgcttggattgataccccatgcctggctacacacgtgcatcaggctctctccactgtagctctggcaccgtgctttaggcccccatggttctgccccatctaatggcttcagtgctgaattgttcaggagaagcagagggaaaagagaaaggaaactataaagattaaatgaggaaacttgcaagtgcatattatcatgcctggcatacttgtaggtgtttggtggtagagtatgtgtggatatttaaattccgctcctgatcctggacttttgaaccttggtggtaaaaggaaaaatacaaacataacctacttgactgcttctaataccaactcagctgcttatgctctatctggtatccctccaatcactctctctagtggacaatatattctgtctctccaagtggttgtttttttaccttttttattgtccccattccccaaactccccagcttccaaatctcatctaatgactgcctcctgtttaaacgagattaaggtcattgacattaatgtatttaactgccataaccacttcaaaatatttcagtatttttagctcttcttgctttaccttttcttgaaactctttccttgtttagccttaattagtatattgtcccagtcgtcttcctacctatccaatttttgtaagtctcattacctgcttttgattcttctcccctccatatatatgtttatccttcttaatattttgttcttggtctccttaatgtattcaatttccttaggtgatcaaattgaccacataacatccaaacacccagtttatgctgctgaggtccagattttgtaccttcccaactctcctgatctctagccataattcttggctgtcttatggctccaatggctggttttgttttttttttttacttcttttttctttttttgtagagataggctttcgccatgttgcccacgttggtcttgaactcctagactcaaataatctgctcacctcggcctcccaaagtgctgggattatagatgtgagccactgcacccagccaaatggccttttttcaaacctgcttttattccaggatgtcatggttaatagtagcagtgcaatcccaggtacttaagccagaaactgtcatctttatttctttctcatgcatccatatccagtgagtttcctactcttgtacattttatcttacaaacattggtcctttcagaccatctttcagcggtatgcaacagtacttacttgattctgctttgaattatgactctttgaatatttttttctttggatttataacttctgagaggcagattctaccataatcacttctcttcattgaaataaaaaataccttcaagacttttttctaaacttgagtcagtgttttactatgtcattaactggctttccttggcaataggagcttgatcaggattcgtgatttgatgataggtatgtggtctgtagtatccttttttggggattcatgcagagaatcgtgtcattttagatgatgttgggaatattttaattagctttagcttttattactcataatgaatggaatctttgataactagctagcttttagtatctgcagatgagaatgtgtttggtgttttgatccaaatggctagctagatatataaattgaccgaattctagaaatctgttttcttccttgaaaagtcacattgtcccccaaccaaaagatttcaaatcttaaaaaaaaaaaaatttatttcttttaaaatttgccttctactcaagtagctttactttttttagtaacactttttaattatattccgataatgatttatagaaaaataaataaatgattggttaaagcaaagagatttgcaagtggttgcagagcaaactctttgcttatagtcaataatatttattccatggtttagacttcttttcccaattaggatatcttaaatttgaatacttacccatttaaggtcttcccgaaataacactagaattgtagggcagtatttttaatgattgggttaaaggtcttctatggtttggcctttcattatgtttttagagttttaaaaaaagattgattcagaaaagttagagatttggtaaaataatttggtagttgttatgcatttgaaagagttgctagctttggacattttctcagaccacagctttctgtgtgacattatcatcatagtttatattgtgtaattaaatgattcatcttcctcatttgatcctcatcattaaagtcacctgagtatctgacttatacaaacttctttagaggtgtgtgtgcatgtgtgtgtaattgtccattgcacatgtgtgtaatggacaactagaaacattgaacaatatgtagattaaaatagaatgttgtaaaaacaaaaaaagaatggggtagcacataaattgagtagtaggttagaaataagtcctattaggagcaatttcaggattcagagatatttctaggtggttcaagagacaaatttgttcgagaagtagtagttatgagcaaaatcagtgaaaacctatttgatatccaaaggattgagaactttacttttgaattagaagtcttaaagaatgtcaaaataattagtttccactatttctggatgagatttgtctgaaggttattcatcattctaatgatttgaagtggcccagatgtctcttattttttgcaatatgaacagaagtactgagaataattgtcaaatgttcatcatgaccacataattttggggattatagatataattttctttcattggtgattagtgttttattctcacattcactattttgttcagtaacttaactttgttatatcacttagccctctcggttttctcttttttaccaaatttataggtagataattatggcaatgcaaaccatatatttttagcttttattagtatattgtatcttggcaaatgtgatcctgtcaacaaaatgattttattagcagctccattttatctataaactgtaagcagttaacaaaaatattacactgtcaattaattaggaaaaagacttttatctgcacacccgttttggctttcttctttgtaccttctccccacacctttctaactactcttattgcttctatctgatgttatagcattgaatcttttgtctctctgtagccatccaaatcattagtgagcataaatattgtcataattaaatattgttcagctttagcaatttaaaagtgaaataattgaagcctagagagattaagatttgccaagaaagaaaagaactaatatttttacagtgcaccaactatatacaagactatctttttacatttcagttctgtgaaatgtgttttattgtccccattatacggaggttgagaggtcaagtaccttgtccatgtccatgaggctctagttatggtggaggtaggataaaaatccaggtatcttaaacagtccagggtcttttccatttgtatcagcaaatattaaaagctggggaaaacaaagtgttaaaatccagcactccaaatatgacaaagtgtattttcttttccttgttttctctgagaatttgtctttttaaaattaaaaaagaaaattttcagtagcttttggggcacaagtggtttttggttacatgatgaattatatagtgatgaagtctgagatttcattgtacctgttacctgagtagtgtaccttgtacccagtatgtagttttttatccctcatctccccttcccaccctaccccttctgagtctccatagtccattatatcactctctatgcctttgtgtactacccatagcttagctcccacttataagtgagaacttatggtatttgattttccattcctgagttgacaaagtgtattttctgactgataacatttatttttttaaaaagactcaaaaaattatctttggttgtacagctattaaatcactattaaaatatggaatgttgggctgggcgcagtggcttacccctgtaatttcagcactctggtaggccgaggcaggtggatcacttgaggtcaggagttcgagaccagcctgaccaatatggtcaaaccccgtctttaccaaaaatgttaaaaaattagccggatgtggtggtgggcacctgtagtcccagttactcgggaggctgaggcaggagaatcgcttgaacctgggaggcagagattgcagtgagccaagatcgtgccactgcactccagcctgggtgacaaagcgagacttcgtctcaaaataaataaataaataaataaataaaaatatgggatgtttgcattaggtataaaagcaacataaactttgcctattaacatcttatgattgatgatgcatacaccaaaaaaagtaatgtttttagaatatcaatttagagatggaaagagtcaccaagggcttgtgcatctactttttttaaaatttttttttgttttaaagaggttatctcgagattttgttgttgttgttacctaggctggagtgcaatggtgcaatcatagcttaccgtagcctcgaactcctgggctcaataaatccttgcccctcagcctcccaagtagctaggactacagacacatgctgctgtacctggctgatttttaatttttttaaatagagatgagggtctcactgtgttgtccaggccagtcttgaactcctggtctcaagtgatcctcctgccttggccttgccttgcaaggtgctcatattataggcatgagccaccaagcccagccctatctcaagacattctgtaatctcttgccttgagggtattattgttatacttttttttttgacatggagtcttgctctgtcacccaggctagagtgcggtggtgggatcttggctcactgcaacctccgcctcccaggttcaagtgattctcctgcctcagcctcctgagtagctggaactacaggcgcccaccaccacacccagctattttttgtattcttagtagagatagggtttcaccatgttggccaggctagtctggagctcctgacctcaggtgatctgcctgcctcggcctcccaaagtgctaggattacagatgtgagccactgtgcctagccttattgttatacttttaacagatactcttgctgacaaaattagacagcatttatcctggcacatgattggcctctgatgtttgttgcatggggttcatctaggaataaatttgggctctgtgttttcttttttgtatggcatttagtgtttgtgagaattaatagcttgcttttcagagtttcttaaatgagattcagagaaaagaaactaaacatggtggtaggaaaaattagggctttgacatacagtattatgatgtatctgttcattagttaaggaaactaggtgctttaaatatgtttgcaaatctgggtctctttttgccttgcttatttttatttgagaattcttaatcttttatctaagcactcagtctaattaaactattgataactacctttttgaagcaagacaccttgtctttggcctcttgatacctgagccactgctgttctgaatgtgataacctaggggtaattagatagccgaagagtagcttttcaaattgtttttcaaagatacttcttttctaaaattcctaagtgatacgtttctcatttcaccatctaattatctaggttttaacatttgtatttttgataccatcatattcataagaaagttgtttcataggagccagagctgaccttggcagatacctagacaaaggcagtctttttctctacctaccaatcctcccgtttctttacgcttttctttccttcccagttttcccttcctccatttccccctttcccttttcttcctgtttcccattttgtttgtctcagtgtatagaaacatataaaattagagtaatggtaggaggaggtacatgattctctataaagttcctattcagtgatagtaactttactagttactatggaatatattagtttctaagatagctagttcaaattactttggaatccaatagacctgggttcgaatcctggtttataaaagtagtacatctccattgtggtgaggggcaggggaggaagtgatacagtggctgggcgcagtggctcacacccgtaatcccagcactttgggaggctgaggtgggtggattgcttgagcccaagagttcaaggccacatagggagcaacataaggagctgtcacctctacaagacataaaaatttagctgagcaaggtgggggtgcacctgtggtcccaggtgctcaggaggctgaggtgggaggattgattgagcctgggagatcaaggttgcagtgagccaagatcatgctactacactccagtctgggtgacagagtgagaccctgtctttaaaaaaaaaaaaaaaagtgatacagtaacaatgaatataaggcagaaaggaaaagtgctgttgtctttggtacttctcagaggtaatcattattaatgattttcatgtatccttctaaatatctggtgtatatatttacatatatttaatatagcatattagctatgttaatttcagtttttacagcatgtataaagtgttcattttcctgttagaacagtcttcagtaggtcagaaagcatctaaagaatattcatttagttgaattttcatctgtttgatattactaaattccagtatctcaatttctttttttttttccttttgactcttacccttcttactgctttcaggttgctgttccataattattgttgttgtttttttttaaatcagttttgacctctgtaatggctcaaactttagatgagaaaacatactagaagtggagatgacagaaaatgatgtttgtatcttaagacttcagtcttctcagggaagtagtaactggctagacattcttccaggaatggtgatggtcacagtaattaggaattaaagcttgtgggaagaaaatctttaattgaccttgttgtcattaagaagaaggagttattctaaggcattggtataggattgccagacatgttaccaaagatacaggatgagtttgtagatgacaaagtgcttggtcatctggaaccaggaatggaaaagctgactgtaggtcagctctgggaatgagtgcaccagaggcttaagctattcagggcgtctctgggagtaataacaagaaccttgataaagttgcttaccatagccaagcaccagagaaaggacttcacattctcacaatatacaaaactattggctacagaatataaatcaggatttcagagtctcctcttacatgatggaacaatgtttttccctccttgaaacagatcattacttatgaagaatatggttggatatctataccattacttgtacgttaattaccttggtatatctctctctgtgtatctatcaacaaaacattatttgagtatatatcctttcaaaatgttaggtacttttttttttgagacggagtttcactcttgtagcccaggctggagtgcaatggtgcatcttggcttaccgcaacttcctcctcccgggttcaagtgattctcctgcctcagcctcccaagtagctgggattacaggcgtgcgccaccacgcccagctaattttttgtatttttagtagagacggggtttcaccatgttggccaggctggtctgaatggtctgacctcaagtgatctacccacctctgcatcccaaagtgctgggattacgggcatgagccgctgcgcccggcctagaatgttaggtacttttaaagaaacctcttttctgtgaacctatggattatgttgaataggcccttttctaaacacacaaacactggaggcattgggggagggaggagaaaaagaacagttaggaggtatcaaaaatttcgaagtcgtcaaaatattacatagtatttatttctcaattgaagacataccatcttattaaaatcactgtaccattagacaaatgttaccactgatcttcttttaatcttttgtatgccatttttaaaaaagtagttattttcttcctgagttttctttcacagagaactataattgaacttggccttgcgatttaattttatgtagaagaaatttgttaaaaaccacctgtcaaacttatgtgactcaatcaagtctgccaagtctctctgagcaacagactgagaccctgtctcaacaaattaaaaaaaaaaataagagggatacagtaacaataatataaagcagaaggggaaagtgcattattcgtgtttagaggtaaaatggaaaatgtgtgttaatggaaatatctgttaggggtaaaatataaatgttggaaatggtttgggtatatttgtgtgttagaggtaaaatagttggaaaacctgtcccgttattttttaactttggtagcacagctctgcaaattattctttatccatgaccctaagtcttgagaagatggttattctctttcctagtcctaagtgtcacttcttttcttgccctataatgattgacagtagaattatgtttcattcagggaagagcttgactccagccacagggggtctgatctactatcctgccagctgggaataaagtgagactaaaggctggaagagatctttagaatcccttcactctcacttctaggatctggctaccactctgatttcatgatgccactggtgtactacacacatatcccaagaaacaaacaatttcagagataattcagtctgaattcatatgtaagggtaatttgttaaaggcatacacgttattaagcaaaaccctgaacatctccttctgagacacctgcatttaggttaaccagcgtcctcacaaaaaaactacctctccaaaaaagtagtctgtttgcttaagtaactaaaatgttcattctggtagtattttctttttttttttttttcctttttttttttttttgagacggagtcttgctctgtcactaggctggagtgcagtggtgtgatctcggctcactgcaacctccaccttctaggttcaagcaattcccctgcctcagcctcctgagtagtggggactacaggtctgcacgactacgcctggctaattttttttgtgtgtgtgtgttttagtagagacagggtttcactgtgttggccaggatggtctccatctcctgacttcatgatccgcctgcctcggcctcccaaagtgctgggattacaggcgtgagccaccatgcctggcctatctggtagtatttccaaaacagaagaagtctgctgcaaaggagaactgattcctgcacttacagacatttaattgctgtaattgagaatgaaatttatctagtttaaaaaaattaagacgcgcccccccccaccaccatgagacattctattaacagtaaaagttgcccttcctctcacctatcaaatctttgaataaatgtgtctttccagtaaaacaaatcattttatcctgtggcttttttaataggaatgtctatccacccacctttaggattgcattctgctatttacagtgaaatatgtcagctttcaagaagcatttccacttttacctactgcttcactgtggagtttcttaggctttctgtacctttctaacctcgggcctattaagtaccatgctggagttgcactgaacctagttatgccaaggattgacatccatttctgatttggtctatcgaataggattattttatttttcctgattttaggattataggacatgtatctacacattcactttcttgagtcgcctagaaataaaaatagttactttgtagacaagttaggcacccttttgtgtatgaaaacaaaatactgccaaaatagttattaaaacatattggtgcctattctttattagttttaattattattttactaaaaagtatgtggtgcattgaaatagttacacttttttttttttttttttttttttgagatggagtcttgctctgtcgcccaggctggagtgcagtggcgcaatctcggctcaccgcaagctccgcctcccgggttcacgccattctcctgcctcagcctcccaagtaactgggactacagatgcccgccaccacacccagctaattttttgtatttttagtagagacggggtttcactgtgttagctaggatggtctcgatctcctgaccttgtgatctgcctgcctcggcctcccaaagtgctgggattacaggcgtgagccaccgcacccggccttttttttttttttttttttttgagacagcatctcactctgtcacccaggcagagtacagtggcatgatcatggcccactgcaaccttgacctcctgggctccagtgatcctcccacctcagcctcctgagtagctgggactacaagggcacactaccatgcccagctaatttattgtgttttttgaagagacagggttttgccatgttgttcaggcttgtctcaaactcctgggctcaagcaatttgcctgccttggcctcccaaagtgctaggattacaggcatgagccaccatacccagcctaaaaaaataaattactgcacctggcctaaaaaataaatttttatttgcatttaagcccagttattctgaattattctattagagcagaattattcatgtggaatctatgttcccatacttaccttttctgattttaaggaagatgactgattgattgaatttataatttaagaggatgaggggcaactagtcaccgcaggtcacctctaccattaggactaaccagttggttgttgtttacctagagtttcttaatcctgcttcatagagactcatggcagttttagttacatataagtatgttgtttggtctaggtagcttggtctaggtgttacaatattttaattttgggggtataatatggtttttttttgttgttgttgtttgttttttgtttgaggcagaatactctgctgccctggctggagtgcagtggcatgatcatggctcactgcagcctcaacctcccaggctcatgcaatcctcccacctcagtcccctgagtagctaggactacaagcatgtgccaccacacctagctaattttttaattttttgtagagacaggtctcactacattgccaagattggtaccaaactcctgggctcaagcgattctcccacctcaacctcccaaagtactgagattgcaggcaagagccactctgcactcagccataatatgatttttaaaataaaagagtcacaggaaagtggtgaaaaagagaataggatttacaggaccagaagaattaatacgagcaagataacgtataagagagaatagccgggtgcgttggctcacgcctgtaatcccagcactatgggaggctgaggtgggtggatcacgaggtcaggagatcgagaccatcctggctaatgcggtgaaacaccgtctgtactaaaaatacaaaaaattagccaggcgtgttaaccaggcgtggtggcacgcgcctgtagccccagctgctcaggaggctgaggcagaagaatcacttgaacccaggaggcggaggttgcagtgagccgagattgcaccactgtactccagcctgggcaacagagcgagactctatctcaaaaaaaagaataacagacattaaaggttcttatcaagtcacttaagttattttattctacctcctttgtgtctacttttaacccattttggtattctcagtttctcagttcttgaaattgagatataaaaaataatgtgtagattaaaggactttagggtaaattatgttgtgagtcagaaaatactctttcctcctgtattttcttataatatcattgcctatctctggtcattttctgtctctagtctcttaagtgtagttatctgaaatatttttaatttcttaggcttctaattttaaattaatgcaaataatgaaaattcctagtcacagttatatggtgttgacccatttcagtgtccttttggatatggggaattaagtggaaactggagacagcaggagctaatagcaaataacttgggtgggaacaataaagaatgatttgttcatcctgccctggtgaaggtatagttcagagaactttccagcatctaagaataataaaaatagaagctgtaagaaattctgcttcataattattttcctgtgtcttcaatcatttcacaactttgttttccaatttaaactttaagtggtaattgcagtctgcatgtttataaatttttaattgtatagcatattagtacttgtcttctttaaaaataatgccataaagaatttgtcacttggaagtttttccccaaatataacagagctgtagcaattgtgtttatttacaattaaggattccctagggcagtggttttcaacatcagaatcatcaagagggattttaaaaagttttttaatttttattttaggttcagggatacatgtccaggtttgttatataggtaaactcatgacttgggggtttggtgtataggttatttcatcacctgggtactaagcatagtacctgatagttttttgttttttttctgaacctctccctcctttgaacctcctccctcaagtaggccctagtgtctgttgttctcctctctgttcaagagggatttttaaaacataggttttggggcctcactcttgtatttctgattctgtaactctggagtggggcctgagagtttgcatttctaacaaattccaaggtgacgctagtactactggtcctgaaatcatactttgagaaccactgcaataatatgatactgatctgagaagtctgagatagggctaaatctaatctgtgctgaatgaatactgagttgcttgtatttcaagcagagttatacctatttgatgggtaccagcaatgaccatttaatgtagtgtcttcttttcatagattggagcatatgatcaacaaatatgggaaaaatctgttgaacagagagaaatcaaggtaaggagtttatttcattttgtttattttgaaacatagttctatgaattattaattacattttctgtagtgttttttaatatacttttaagatataaattactattctattgaagcttttaaagaaagaagtaaactttatttaccatagtcacgtttactcctgatgttggttttttctttttatcatctttctgttcttttaaaattgaatttctaatgactatttttttgtcagcttttttcccctttcacttgtcaccttatacttctagtttgctttttctcccttttgatgctgtcattgctctgtacagtttattaaactggtaagtgtttcaggatttttcccgcctgagtgatcctgtgcaaatgctggtctgcttaattgagatctgctttttggtgctactaacagattgacttggactcgaaaagagtcactgaaaagttggtcattttaaaaaagaagttaggacagtaaagcactaattaaaatgtttttgtagtaggcattttcttcctgaacatgtaatcatatctcttatgctgataaaatattctcatagattaccttgctagcatgaaaactgtttttcaactgaatttattgtttcccagcactctttattggtaataagatttatattttttcatttgcatagatactaatcagtgtgtttttgcacgagctaaatttaatctgggcacagacagtattaccttagttacttgacattttctattttgtatagaaaagttttcattagattgaaaaccagtgtctatagttactaaagatcagtccaaaaatttgttaatgtttagactacttagtcacttgtaataaagagcaagattctttcccatttggcaattataatctctaaacttttgaggaaggattaatacatttaacaaagttgtggtatgcgttaaatataggattaagtcctgggacagaaagataaaatagattatagttttgtaggggagatgcataattacacatgagataaattcctttaagagaggcatgtctaaaactctatagaagagcgagaggggagacaagcctggggaggttgggaaagatttcatagaggaagtggttcattaactcaaggaagacatttcagacagatgaagagcagatggaaatatatgtaaaggatggaagaaacatgattgaggcaggactccccaaggagtttgatttgataataggttggatagaggaaggagactagtgtcattaggagtaaaactagaaaggaaaatggaagtcagattatgaaggggcttgaatgccttgccaaagaatttagacataatctggaaaacaacaggggagatattggaagattttaagcagaagattatattttgacaaatgtacacaggcagcactaaggatgataggaaatactggaagaagagcacatttagaattctgttatagaaatatctatttggtacttgggagggacatttgagagttctcagtttataaagtgtgaatatgtataggtatgtgtttgtatgtgatacatacatacatatataaaacattatatagatatagctataggaatgagtagatttctgttgaatgatgaaataaaaggactgagaacagagcattgggaaataactaacatttaatgggtaggtaaataaagagatgcaagtaaagaaggaaagagaagtaggagatccatgagaaaatagtatggagagagtatgaagaagagttgggatagtcaagcaaataaagagcagcagagaggtctagtaagatgccataataccttttatcctctttgacagttagaaagcctttaactcattagacaggagatataagtaccttgagaggttatgttatcaggttgacacatttggaatttaaaagcctcagaaaaaatatatataaataatttttttagtttttggaagctattcacaaattactatttgtattcacaaattactacattacttatgtaacctcctcttttttaaaagaactcttttaaatcctaaatgtatgttagggtgaggaaggattatattagttactacttggtgctactaacaggatgatcttagggaaagttaggacctacaacttctttctgaagtgtgtctccctttaaagatgataccttgtaatagtaattgaagaattaaaaacataaaaacttgctcttttggtaggtctgaaggtagcaagttatctcgatcgttcacagacagttatagatcagatgaagtccttgtttcactctttccttctttcccactattgcacttgactagtctttaaaaataaagataaaaatgagacaaaattaaagaaaagttgttctcattatttttttttccttttggggtgataaaaaaatttctaaaactagatagtggtaatgattgcacaatattgtggatgtacttagaaccactgaattatagatttttattgtttcctttttgtttgtacaaagtcatggggtacatgtgcaattttgttgcatgcatagcttgcgtagcagtcaagtcagagcttttggggtatccatcacatgaataatgtacacactacccattaatcaatttatctggctcacacctgaaatcccaacactttaggaggcccaggtgggaggattgctttagtccaggagttaagaccagcttgggcaacaaagtgagacactatctctaaaaaaaaaattatttttcttaattagctgggacatacctgcagtcccacctacttgagaggctgaaccaggaggatcacttgagcccaggagttcgaggctgtagtgagccatgatcacaccactgcactccagcctgggcaacagagtgagactttgtctctaaaaaatacatacatacataaataataaacttatcatcctccctactcttgttatttttaattaaaaggatcaatttgttaacaagcctaaaagcacatttcatttttactaaacattctagtggaggcaaattatggtgtaaaataattccgtatttattctaaggaagttagagaggtacgtaactgtggtgtattaatgttaatatttgattaagaaaaaaacactctacctgttgtttagagaacagtgtaccaaatgtattgagtttgtccaatgtaattgattctttcattagttgtcaaagcagtgagcagctactagagaaatcaaagacatgaaaatatattttttggaaatgtttatttttcaattaaagacccagagttgatattgctaaagcgtaaaaccttttgtaagttgcgaattatttttccataaccattttagaaattataactaaaaactttgattttttctgattaccgtgaccaaaatttaaaagtaaatttggaagtttttcctgttttactgtctcctagacttttaaagcttcttaaaagactagacttaaaaagcttataaagtcattacagagaaaaagggggtgggggaactaaacaagatttctagaaaatgaaactgtttatgtactttgatggagtctagatattaacaatacacagaagtctagataactgaacagaagcactttctaaacttaaacagcccatttcattttttttttttttttttggcccaacattatctgtgtacttagagagttttttttaaataaaaaactttatactactgtgtttgagtcatttcactataggaacatactataagagtttaaattatatttaataaataaaatatttttattattggatattaattgcatttgtggtgcttgtttctactttctagtttgtgcataaattagtagttttaaaaatctcattttttaaagaaaatgttacttttcattttttatttgttcatttaaactgtttaacagttcttgatagtactgaaagctatgctactttgtgtgaatgtggtttaccccaagccaattgaaaattttccagtgtaaaatagctacttaattaaaatcagatgttatgaatgttatatcttgatgctttcttttatttttgtgaataaaataattatagatttgatcgcaactcactgcatcctctgcctcccaggttcaagcgattctcctgcctcagcctcccaagtagctggtattacaggcgcccgctaccacgcctgactaatttttgtatttttaatagagatggagtttcaccatgttggctaggctggtcttgaactcctgacctcaggtgatcctgcccacctcagcctctcaaagtgctgagattacaggcgtgaaccaccttacctggccttctgttttttttttttttctttttaaacctttaaattatcttgataggctaccttagagggaaaattttattgaaactggctattagggtgtggctctacaatatagctcaaaataaatatattttaatagaatataaaattggaaatgaaccccaaataaacaaggtcgattagaagaagcatgttgaaaaacagtagttgcacatatcaagacaacttactgtttctcctgtagggacttttgattcttaaaacaatcttgataaaaattttaggtatacagcaataaattaggattcagattagtcagaagacattggcaataaggttactttcaagttgttagggaagcaatttataaaaaacaagtaaattaaaatgtgttactgttttcaaatatttttacagtaataaaggtaaaatcttactgtaataaacaatactaaatccaaatagtgctttattaatgaagttttgtttaaatatatgtattattacagttgcttctccaatttgcaaaatcttgggaatgatttctaatccatcagccgctttatagtgacattaaaatcagaaataatgtacagatacagcccatactcattatttggggtagctatgttctataaagtcacccatgaacactgaattagtgcatactgaaccattgctgcctggggaagtaccttgttttatgtgtgtttctgtttaaagacaccttatttaatatatatttttgattcattaacaattcatggccaacagcactgtaaatcatatctgaacagaggttatctttatttatttatttatttattttattttatattgtttgggacagagtcttactttgtcgccaggctggagtgcaatggtgtgaccttggtttatggcaacctccaacccctgggttcaaacagttctccttgcttcagcctccccaagttgctgggattacaggcgagtgccaccatgcccagctaattttttgtatttttagtagagacggggtttcaccatgttggccaggctgttctcaaactcctggcctcaagtgatccgcccaccttggcccccgcaaagtgctgggattaaaggcgtgagccactgtgcctgggtgaacagaggttatctaacacattttctctgtaagacacatcacagcattcttgcacttaggaacacgagacactgttttaagcactatacttgagggccatcttgaacaacaggattgccaacaaaaagcacaaaaatgtgaaaaacataacaaataaaggacactgtttacagtaatcagagctgaaacaggaaggttaaagcatcaccttgttcgacctcagctgagaacatgcacgttgggtgactcaattttttttttttcactccatgcgtgtctgcaaattagggcaaaagcaccgtgaacgttgatttgggggtacaaagaaattttaccaagtaggtgtgtttgcaattatggaatctgagaatatgaggatcgactatatataaaattatcattgctatttctttaacttttaccctgtctccttcatttttgtttttgcatctctgggtggtttgcaacttcagccagaactatttgaagggattcaaagattaattgcatattggtttcagggcgcatttttggtttagacacctcagttaattctgacctcaaatatggttctcttctttgttttagattcaaacagaatacttaatcagatttttactttgatggggggtgtcattgttacttggattaggaccaaagacaggatttactgcacagttacttgcttaattgaatgaataaaaaccaaatcatctaaacacttgtgtcatctcgcagtaattggctcctgaagagtttagcttaagctcttgcagttctttttgtttgttttctcttttttatttttatttttgttagctcttccaattcttaacattctagtcttaagtaataatttactttgttataggtttttttttcactagttttgatctacaccccccactccactctgtatactgatagcagaaacttaattttactcagtgttcaataatttcaagtttaaatgaattcagtttatgacaactgcctctccctcctccccttcctggttatggtgtctaagttttgaggtgatgaggtggcatttatggtctgatgaggggttgacatgtgaacataatggcaaccatcatccttgagtagtgcattgtcctccctgggtctcagctgattggcgtctgctgagaagtctgcatcctttctggtcctcagctgtgtgatttactgctttctgaaataatgcctccagcaccacaccttgaggttccttcagggctgctgctcccctagctagcctcaacgctctccaaatgccaatatggggccaatatagttccctctacacctaaagctgtacacctaaatttgcttggtagtaatagtatttgtagtagaattttactgttggtaataaaccggcctggcatgttacacacatctctaaatatatctttttgaacaataataaaatttattacaatactgtaattgtgttctgtttgtaacaaatgcataatgtgttacattttgttggtactattaacaattttattttaaattgaaagctttagaaattgattttctcctgttctagatttaagtatatatacaattccaatgcttcttttgatatattataggggctaaggaataaaccaaagaaaacagcacatgtgaaaccagacctcatagatgttgatcttgtaagaggtgagtctgataaataaatgcttaatacaagtagacattgttctggaagaaacagaattcaaaataggtttaaatattgtattaggctgttttgcattgctataaagaaatacttgagattgggtaatttataagaaaagaggcttaattggttcatggttctgcaggctgtacagaaatcacagcaccagcacctgcttctggggtaggaagctttacccatggcagaaggcaagcgggaccaggcacatcacatggccagagcaggagccagagagtggtagtggggaggtgccacacacttttaaatcaccagatctcctgagaactcactcactatctcaaggacagcctcaagccatgagggcttcacccttatggcccgtatacctcccatgaggccctgcctccagcattggagattacaattcaatatcagatttgaatggggactgatattccaaactatatcagatatctatctgtctgtctatctttttagaaataaaaacattgtgaaccttgatgaagacaagaatagtattaaaaagagagaatgggaccaggtacaatggctcacacctataatcccagcactttgggaagctgaaggcagaaggatctcttgaacccaggagtttgacaccaccctgggcagcagagtgagatcctatctcaacaaacaaacaaacaaacaaacaaaaccaaaaaacaattaaagtggtgatttgtaattcctaactagaactgacatttgaatattgttctatatttataaaatatgtgggagaaattctgttatttcaaaaaatgtttttttcaaaatatttaaagtatctataaattggacatttctcactcatagtataatacagaataaaattatgtggtgatgtttttcaaacattgaaatttttttctttaaagaaattaaagaataatatataaatatactctgttgtcctattttacttttttcagggtctgcatttgcaaaggcaaagcctgaaagtccttggacttctctgaccagaaagggaattgttcgagttgtatttttcccctttttcttccggtggtggttacaagtaacatcaaaggtcatctttttctggcttcttgtcctttatcttcttcaaggtataattaagtgatttttgcttttacttttcagaatgttacattgttaggtttaataagtctttgttttaaacatatgctaactactactgagtatgatgtataagtatgttaataaaggcacataattgatttggtattaaaaatatttgagaaaacaaagcagttatttttcagtataattttatgaatatttgaatctatagatggctaaagaaaaatagaaatcgagaagattttttaaaattagaaaaaaaacctcatcaaaatgcatcttccacacatacatacataccagtcttttaaaaatacaacctatacaagtttattattcctgccataggtatagtttcttttttctgtgccttttaccaccgtgatgtgagctgtccttatactttatcaaaattctgtataccgtgcactctgctaggtgctttctagattctcatttcattctcacatcaacctgatgaagtacagggactgttactatgcttcgcttatagacgtgggacctgaaagacctgagtgcccaacgccacatagtcatcaagtatggtagagcccagattcaattctaagcattctgatcccagaaccacacacttaaccgctcttatggtgcctcctaaaacaacattctagtgcatagtcttagcagcagtatataacacaacatgtataacattgtagagcatttagaaactaaagaagaaactattcatattccatcacgtgaacaaagccgttattttcatttggttcatgtcctttcagtctttttaatatgtgattaaaaaaaaaaaccatgattacaatcctgaatgattatttaaatttgttttatcaacagattctaagagatactttttaaataaatgaaaatataataaaaactgcagactgttatttagataaagttgtttcttctaagccaggttacatcttatatacataaaagggtgtggactatgataattttgtggtttgttgttattagaatgtgtgtatgtgttttctgattaaagatataataatattttcatggcaggaaatttggaaaatgtagaaaaagctaaagaaaaaaagaactacccatcatcttgcctttaaatttataatactttttaaatagttgagattattttatatgaacagctacatttttttttacctaatgtcataatatcaaagtctttgtaaatataacttctaagttactagaaaatatcttgtcctacttcaatattgggcagttaagctgattgctattttttgctattataattactgctgaagtgatcatatttgcttatcagtattttctagttatagtgatcataatttttatcattttcttgttttcttctcaaaaggacttaagagagcttaatttaagtatagttatcttcaaaggttttctggcttacctagatgagaaaactttatttgaatgtggtcagaaattgcaatagtttattagagtaattcagtaccattgattgtacatcacagtgcattgtgctttttaagatattgctgctttctagtattccacgacaaacaagtttccaatgtaactaaaagttcactgacattgtataattatattgtgtctgaaatttacttactggttcctctaagttaaatagggaacacgggttagattgggcattaaatgagatatttttaagttcagaatccaagtttaatcataaggcccttatgatgaacactaaacattctcctagtaaagcttagttagagaaatgacttaaccttcttaaagtcacacagctagtgccaaagtcatgatgtgactctgatgaccctcggcaggctgccattacctttgaaaaccactgtatgtctgtctccattgcagcaccctgtggaaaagcagggtgctgcagtgctctgagttatgtcctcattcttgttcgcacttcttgaaaggcagaaagaatcaaatgcagtcagatttggttttatataactatgtatagttttttttatttcaattacatgctttttaagtatctcagctatgtattctcagctctatccccatttctgcatgtcttggttgcctagtttcttgccaagattactgccaggaaacctcatatcatcttctactttctgtccatttacctattaaatgacaaattcaaaccagctgcttaagatctaaatttcttcactagttatcattgctttcaagatgcaatctgagttttcaaatccctccttgaatttctatcccaccttaaccaggctaaactagctctttgctgtttcttaaacattccatgcttttttgcctatgtgtctttggacatgcaactccctttgcgtggggtagcccttttcccttttgtttagtcaatcctctatgttctctcaaatttagattagacatcagacatcactttcttgaagaatcctttcgtaactccccaatgtagttacatatctttcttatgtatattatagcagttaatcataagtgttatattagtcaccttgggctaccataacaaaataccacagattgggtggcttatacaacaaaatttattttttcaccattctgaggggtggaagtgcaagagtgaggcaatgtcagagttggtgtctgatgaggcttctctgacttgtagatgtccaccttcttgctgtgtcttcacagggcctttcttgtgtgtgtgagtggagagagagagtactctggtatctctgcctcttcatataaagacaagagtcgtatcagtttaaggccttacacttacgaatctgtttaacctttactacctccttataggccctgtctccaaacgtagtcacattgtgggttagggcttcattcagcatatgcatttgtgtggggaggatgaaaggagcacagtttagttcataacaggtattttcattgtttctttatatgtctcttctttcctgtaaaccaagcttgtccaacccatggcccataggccacatgcagcccaggatggctttgaatgtggcccaacccaggttcataaactttcttaaaaccttatgagattttttttaatttttttaaagcttatcagctatcgttagtgttagtgtattttatgtgtggccccagacatttcttcttgcagtgaggcccagggaagccaaaagattggatacccctggtctaaaccaagggatagggagcggagactgtgtcttgtctttttttctgcattgcctaattgccactgaatcttaaagattaacagtcctaaaaatggaagataatattccattctattctattctgttttttagacatagggttttgctttgttgctcaggctggagtgcagtggtgcgatcatagttcactgcagccttgaactcccgggcacaaacaatcctccagcctcagcctcccaactagctaggactataggagcacgccaccatgcccagctaattatttttatttttatttttgtagagatggggtcttaatatgttgcccaggctggtcttgaactcttgacctcaagtaatcctcccacttcaccctcttaaagtgctgggattacagttgtcagccaccacagtttctctctgttgctcaggctggagtgcggtggtgcagtcatggctcgctgcagcctcaacctccaaggctcaatcattcctcctacctctacctccatagctggaactacaggcatgcactgccattcccagctaatttttgaaatttttttgtagaggcagggtttcgccttgttgcccaggctggtgtcaaactcctgggctaaagcagtccacccgcctcagcctgtcagagtgctgggattacaggtgtgagccattgcatccagcctactcctagagttccccttgcccagtacgtgaagtcctgcctttgaaatatttgtgcccaacaacattctgtcttagttgatctccagcagaaatctctagcagcactgtctagttcgtaggacttcattaaatgctcaaaaagtataactcagcattatataaaataagtgaatgttttctctatatatcttctttttttttgagacggagtctcgctctgttgcccaggctggagtgcatgatctcagcatgatctcggttcactgcaacctccacctcccaggttcaagcagttcttctgcctcagcctcccgagtagctgggactacaggcgtgtgccactaagcccagctaatttttgtatttttagcagagatggggtttctccatattggccaggctggtctcaaactcctgacctcgtgttctgccggcctcagccttccaaagtgctgagattacaggcaggagctaccacgcccggctctccatatatcttctaaaccttaacttgagaggaaaacaaaaaggggaagtgataccagagttacggaggaaaagctactgtctcaggaactgagaccatgggagggacatgatcacttttagaaagatacagtcagaagaaagaaggaaaaagagaggaagaaagtggctcctcctcctttttctaatgccttgtcgtcagaatttcacagtatgtaataacttcctgttaagatatacagaaaatataatttgtatgctcccagccctaggattacagagaatggtgatcacagggctgaaagagttcagataaataaccagcaacaggttatataaaacctaaagttttaaaagatgttctcctttgtgtctgaaactctgaacttcttaagtaagcatttgtacttgccccttttaaaattagagttaatggcacggtgaaaccccatctctactaaaaatacaaaaaattagccaagcgtggtggcgggcacctgtagtcccagccactcgggagcctgaggcaggagaatggcgtgaacctgggaggcggagcttgcagtgagccgagatcgcaccactgcactccagcctgggcagcagagcgagactccgtctcaagaaaaattaagagttaatggtagctaaaaaaaaaaaaaaaaaagctactattcaccaatgttaagtatacatttacggtgtataagcagcttttcaaaatgttttacatgcactacctcacctaaaacctattatagtgcctatgtactgtatgtatgctgtgtactatgtagatacacagaagattaaaccaaggctcaaaaacattaaagaacttgataaaagtcacattagaattcatattaaaaacaaaaaagactctctgcttttcaaaattccagactgttatggaataactagagaatttgggttaaattccagggtaattcataacgatgattggcattttaaatttttttttcttattacttacagttacatacagctgaaatttgttttcatgatactctttaagtatattaaagtgtattagcagattaagtgatgttttaagcgtttggtatattggaccaggattctttgagttgcaggtggcagaaactaaatgcaaactagcttttacaagaagttggtttttttggtcgttaattttactgtttatcataaaagctaaacaaaaaaaacccaggaaactagatagaatagtacaacagctggggtggccatatgtcccagtttgcctgggattgtccaacccaagtttactcatgttgtcctggtgcctttcactctcaaaagtgtcttggtttagatggtaaattacatggtcaccctaaacacctaaatacccatctctttaacaatgattaacgttttgggatgtttacttaatctgttttgttaagtaaattatatacattgagacattttacccctgaatacatcaatatatgtctcttcaaaataagcacatataaccacattacagtgataacacttaacaaaatgaccaaaaatcttataatatttacattttattttaggtactccttggccctggattcaggcatggctggattgagaggctcggataatatcttcacttctttttgctgtagactttggtcttgctggtcacattcttaggttggctctttctaggtggtggctaaggtggcccctagcaatttcattttttcatagtctttagtgtttgtgatctaggagaaaggtcttgaagcacctatattagtccctgaaaaagactgattggccctgcttaggtcacttgcccatctttttataagcttttgtattcagacttactaagactgtgacaagcctaggttacatgtctatccctgaggtgggagaaataagaatgtatgattgatggataaaggagggagacgaaggtaaagagagtttatgtccagaaagtctaagggatgctgtgtaggcaaaacaagatttcccttcatgtagtaatagttagcattgatggatgtttagtggtttctctggaaactatgcctaagtaaatttgttattaattctaaggagatagacctctattaataagaagctctttgtatctgtatgatacacttatcataagatttctttatttgtaaaacaaagaaataatgtacttgaggttagggtagttctttgattgtctgtgatgttacttagaaatgtcctttgattcatatgcatctaatttacgttgcagcgttgaggtgtagtttagagactatgttgggtgttgtcttgttccgagagtttattactaaataccatggttaggctgcggcagacaataaaacagtctgagagagcttgtctctatagtaatattttaaactcatttaaatttagaaaaatattttggcaaaaaataatgtaaaaacaattttaaaagttttgaagaggtgactatcagatctataattaagcatattttctttccctttttatagttgctgcaatagtattattctgctccacttctagcccacacagcatacctctgacagaggtgattgggccgatatggctgatgctgctcctgggaactgtgcattgccagattgtttccacaagaacacccaaacctcctctaagtacagggggtaaaagaagaaggtactgttttttaaaaagtaatctttttgtacatttatgtaatttgaatctacgattgttcttgactcctcttaccttcatagactaaaatcttatcttgtaaggttgctgtttcaaaaaaacactgagcttcagaatcaattaccagatgatttagtttccatatttgcttcaaggccattttaagaccacatgcctgtgtttttgtttcttttttttttttttccttgaagctcatttatagtcacctaatatcaatgtagacaatatatgttagctagattgttaataattcctactacttataaaaatcttgtatttctaatagaagatgctttggcaaaaacaaaaacctagaaaaaatttcagctaaactgtatttactaaatgctatttggttttgttttgtttttttttttgtattttttttgagacagggtctcactgtctccgtcacccaggctggagtccagctcactgtggcctggacctcctgggctcaagtgatcctctcacctcatcctcctgagtagctgggaatacaggtgtatgccaccccacctgactagtttttttattttttattttttgtagagatggggtctcactttattgtccaggctagtcttgaattcctgggctcaagcgatcctcccacctcggcctcccaaagtgctgggattacaggcatgagccaccacacctggccactaaattctgtttgaatctgtttaatattacccttgattcagtaaatatagcatatctcactggccaatcagcacactggagtttgttttaaggttcttttggagcaggtcctcttttgaatatcattgctaagagattgtgacatttgtagttttttggtgctgagatttaagcccatctcatttttaaaagataatacattagataaatagcaatgtccataaattagattataattctctccaatctaaattttcttctttcttcatctgcagataagtggcattcaaatagggaagaaatgcttttgtaaatatccatccaatgcaatcctttcaatcttctgtccactgacctgccactataagcaaggaccaataccttaacatttctagaaattggtcttgaatatgcatcatgatatttggattaaattttatctagtaaatctaaattttattatgtgttaagtaaagttcctgtgtttatgttttccaaaattttgattgtactactgagaaagtggttattaaaatattaaagctgccttccattcttaatctcttctgatgaaggaaattaagaaaagcagcccatttggaagtacatagggaaggagatggttctagtaccacagataacacacaagagggagcagttcagaaccacggtacaagcacctctcacagcgttggcactgtcttcagagatctctggcatgctgctttctttttatcagggtttgtatttatttaaggttttatatggcatagagatggcactatcctttttctggcacttcagtctcaggtaatgaatattaattactttaaatgtgacagcctcattatggattttgttttgataaattataatagtatagataatggaaaaatagacactgtaaactttatttggctcatgtgtacatacatctatacgagaatgaatatatcaaagcatatttagctaggatttccttttttttttgggacagagtctggctctgttgcccaggctggagtgcagtggcacgatctcggctcactgcatcctctaccttctgggttcaagtgattctcctgcctcagccacccgagtagctgggcttacaggcacgtgccaccacacctggctaattttttgtatttttagtagagatggggttttaccatattggccagacctcggcctcctaaagtgctgtgattacaggtgtgagccaccgaacccggccaggatttcttgattttggtttcttttatatttctgaagtactattttacttgtgttaattggttaatttatttttatcaccgttttgggtcaaaattggctgtattaaaatgtcatgtgaattgtataatttttttcttctaagttcttgcctcaattatccaaaattatctgaaataaaacatataggcattgttacttaagtgaataaaatgtatattatagtatgtgattctacttttgtacaatgtaccatgagcatttgtgtactatacaaaaatggctttttgcatacaactatacaaaaatggctttttgcatacaactatacaaaaatggctttttgcatacaactatacaaaaatggctttttgcatacaactatacaaaaatggcttcttgtatagtttgtatagttgtaccatcaatgaagacttaccaaataggaaaatataattacagcaaacattaaaaaaaacctaactcaagcttgtattattattattattattttgaatattcagaacacttaagggttgtattactagtttatatatacctataataaatgtgaaaaaagttaaaaggctatgatcaaaatattgagtgtaactgatgaaaggtacttaatcaagaaaagggatattgcaaataactattctgtcactttgttaactccactaataccatatttcatcaatttgtgattgtgctcttaggataaagtttatcatgcattacagaactaagcagttatatccagggcatattttcgttgattgtaattttggggaaagttttccagattttaatagtttacagtaacatggcattaagtgaaaatcctttctattccaatcacctattcttcctccagggacaatatgttttgttttcgtttttaaacttgggttgaattctgtctatatctctctcttctttagtcttttaaaaaaaatgttttgcacataactaacttggatgtaatatagctctcctttctaactttggcatgcaacaatttagtcactgcaaagtcagtttcttgagcatttccagataagcagttataaatagcgtaatggatatatttcactttttgggaatcattcttttgttttggttgtctacaactgatattatgtgtagtattcagagtccccctaaaactagcagggttgatacctttggaagtttactatgtttctcttatcaaatgagatagagacttaaatattcctcctgttgggcagcagcatgaccatgatcatgactgccattgcagtggctgtccattatagtggcgaactcactctggatttattctctttaatcatgacagctgtacatctaaatattttaaaagatgtactgtgtttatctcattttggggctggtttgctagcatatgaatgagacttttattaggtacaagtagatcttaagagaagtgttaattttagaagtcctaagctgagttcagagatcttgatgatattttcttctttcaggctttgttaagacaggaagtgcttaaactaagcacttatcaactaagcacttatcaacttatcaactaagacttaacaaaattgtttctggtgataaattgaaaagctggatacttccgttaagttatctctgttaacataactgataggaaaataaattaataaccacacagatacctaagctttgtgtatggtatgttgatggttttctagatgttaggttgagaaccactattctatttttgtatatatatatatttttaacctatctcactgcacactgagagaaccacctttttttttttttttttttttttttttttttttttttttgagacagggtctcactgctgtagtccttggtggagcgcagtggcgtgatcatggctccctgaagcctcaacctcccaggctcaggtgattctcccacttcagactctcaagtagctgggactataggcatttgccaccatgcccagctaagagaaccactattttaaaaccctgtatttataagttggaaaggtactgtttgtcatctctaagtacattttattctcaagataaaactattatttttgaaacaagacatagtatttttcatttgaaaaattgggaattactttaataaacctttatgaacctgagaaaacaaagtctaagaaaatgtcaatttaaaaagagatagaggctgggcacggtggctcatgcctgtaatcccagcactttatgaggccaaggcgggtggatcacctgaggtcaggagttcaagaccagtctggccaacatggtgaaaccccacctgtactaaaaatacaaaaattagctgggcgtgatagtgggtgcctataatcccagctatttgagaggctagggcaggagaattgcttgaacccaggcaatggaggttgtagtgagtcaagattgtgccactgcattccagcctgggtgacagagcgagactctgtctgaaaaaaaaaaaaaaaaagatagaaatcaattatatttcctaaggatttagtactttaatttcaattaatttttaattaatgtaattatagtttctattaaagagattgaataggatgaattacatcttgattgtgtgtcgttcagcatagtacttacttcagaagtcacatggatcctaagttttctttcatgtcctctaagattcatttcaccgtgacaatatcactgaaaaacagcaaacaggaattacagctctcactatgttgccaaggctggtctcaaactcgtgggctcaagcaattctcccaccttaacctcccaaagtgttgagattacaggtgtgagccactacacccagctttattaaatctttaactttcactttagtgttaaaaacagtaaatactaaggctaaaagtgacaggaatcttaaaggtagatcagtcaggcatattagttaacatgtgatctggttttattctgattatctgtctctaaatcaccaggtcaaattaaaatacaaaaaaattagccaggcatagtggcacgtgcctgtaatcccagctacttgagaggctgaggcaggagaatcacttgaacctgggtggcagaggttgcagtgagctgagatggcaccactgcactccagcctgggcgacagagctggactctgtctcaaaaaaaaaaaaaaaaggaaaaaaaaaagaaatatctaataagtaccatcctaagccaggcattgagtcacatgctgggagtacaatgctgaagctcataagctagtgggggaaaatcacatataaacccactgaaatacagtgttagaaatgcaaacaaaatatcctaggagaacaaaggagggtacaatgatctctgccaaggagagtcaggaaggcttcacatttcgattgggtcttgaagtgaatttaaacaaggagttggatatgcaatatttttacaagaagagtagttctcagaaatctgataaggtcatagaaactaagctaaactcaagaagctaagaataggagagtgagcagctaaggcacagtggaggaggagagcggcaaccttatgatggttcactgactggctgaatgactaagtctggattgctgggccttcttcgaggtccttccccctcagcttggaaagatattcctaggaaaagcccctagttgtccctacaagcttctttaacacccagaccagaattaaatctgagattttttttctcagagaatcatggaatgatagagtcagaaaagatactgaaaatcacagttttgttgtctctaacatccctcagaatcttagggattctcaaaatgggaaatgaaagtctgtaatcaattttcaatattctgaaaaacctaccagaaatttgacattttctggtagtattaaatcacagctttccttggtttgtgctagagttatatcggatccacattaaactgagattctgactgagctgtcttctaaatataagctgtttcctcattattattgttattattattattagtttttttggggtggaggatggagtctcgctctgttgccaggctggagtgcagtggcacgatctcggctcactgcaacctccgcctcccgggttcaagtgattcttctccctcagcctcccgagtagctgggactacaggcacgcaccaccatgcccagctcatttttgtgtttttagtagaggtggggtttcaccgtgttggctgggatggtcttgatccttgacttcgtgatcctcctgctttggcctcccaaagtgctgggattacaggcgtgagtcaccgctcctggccattattattttttattttttattgtttttgagatggcgtctcactctgttgccaggctggagtgcagtggtgcaatctcggctcactgcaacctccgcctcccgggttcaagtgattcttctgcctcagcctcccaagtagctgggactacaggtcccacgcccagctaatttttgtattttttagtagagaaggggtttcaccatgttggccaggatggtctcaatctcttgacctcacgatccgcccacctcgtcctcccagagtgctaggattacaggcatgagccaccatgcccggcttgttttctcattatttttatgctcaatttggtaaaaagcttttcaaaatctaggagtaaggtaataaattactacaatatttgcaatttacaaaaaaacattttcactgatttcatcttaatttattcttcataacactgcagtcactaataacagcagagccgggaggccaccactctcgggccagagttcttttcaaccgctccaagcttctagggttttttccttgccaagggtgttgctaagggtgcactgtgcatgtccaggaaatactgcttctatcatggaataaataaaagcgtgtatagagatatatgtctcctgttttcaagaaactactagccttgctgtccaggtgcctgtgattcatggtgtttgggttgatctaagaaaatagcattaactctggttttatgaaatgaatattacatgcatgaattgtaaatatcagaaggtagatttgtgtgtctgtgtgtgtgtgtgtgtgtgtgtgtgtgtgtaatactaaaaagtataatttcttcctatacggtaatactttaattcctaatatcagcttctttctgctttccatttttgctgaggaatggtgatttcagtatatatgtttattttaaaatcaaaatgctttttatcttgcattctgtttatttttgtgcatgttttgaagttgacaaaatagaattaacttcccttttaaaaatgtaagtagaattttacaatatttgttttttaaataagtctctcatccccactgcctttactgtatttttattccctaaaacaaggcaacaggaggaattatttaaacatctaagtctcagtaacctgtgttccttttaataaattaattttaccaatactgtccctttgaggtagttacttttgtttattaatgccaacatgagtcatatagcaatcagtggtaaaactaaacctgcctggagcaaccacgtttttgaccctctttacctgcaataattggaatttagctctcctaccatttacactccagcttgggagacagagtgagaccctgtctctcttaaaaacaaaacaaaacaaaaccacagttgtttcttggtatccatgggagattggttctgggatacctccacccaccaccactcccaaccacccccccacccaggataccaacctctgaggatgctcaagtctcgtgtataaatggtataatatttgcatataacacatgcatatcctctcatttactttaaatcctcttttaatacctaataatggtataaatgttatgtaaatcattattatactgtattgcttagggaataatgacaagaaaaatacgtctgtacatgttcagtacaggtgcaagcatagtaagcctaactgcattttcaatttgaggttggttgaatccacaaatatggaacctgtggatatggaggcctggtcgtgacccacttattatcctgctttcaccttctagctttagcatctatagattattcttgccctaattattgttatgattcccaagtggttatttttctaactccatcattccttctacatttattagtcggcattctgctttaaggagaagttttcctttatttatttactcatatatttctattttattcaattttttattgtcatttattttgatgatcagatcaacctaattttggccatggaacccctttgagcaattaaccttgctatccgacatatctgtatcagtctttgagcatttccttactttctggcacaacaaaatgttttgggttcaacttgtatttcctctgtcccagcctagaatcaactattgtttcaagaagagtagtatatagaaaccaaaatctgagttcaagatacacttgttgcgattggggtgttgttaaccccagtccttttcagtgagcacagctagaaaatgtgtatttggtcctttacaattacatttatttctatagctatccaggtatattatacaccatcaatttgcattgatagctccaattcaaatacaatcctgcggggttcattctatctcttctttttatatttatatcttctttctgtgtcagtgagaaaaatctgattcccattatcctcaatatgtttacttattccattagtcacctttatatagatcaacttctaaccctgccaggctgcacctggtacttttctctaatattgtccctaaatgggcttccattattgactatcactgggctgcttttgctgtcccactccactgatattcttgcaagtgctttcattaccagctactggcaggctgcctttgtttgtaaactctgagagtaatacttacatttagcatttttcttttgccactgcagtttagtttgcaacttaccttcatagggttcatgagaagcatcaaatacctactacagcttagtaaattactgttcttgtctgctgagagtgtagcatgaactttgaggagatagtggggagagaaacaacccagagaagattggagggaagcagaggtaaggacaggaggaagtgagagatagctgaaaggtatcatatgggatgaatgctaccagtactctttcccctgctttcacgtagtatttaccctgccctgttaaggaaagaatacattctccttagaaaaatggttaaagcagcagttattacagactcaaagacccttttactggcctaccctcacccccctaccaccacccttttttttaaccctatagagtctggttcattctacacattcccaaattttcagccactatttctactttgactgctggcctccaggctcatgttttcagttgcctactaacatttctcagagtgttccatctttcttcctaaataaatttctcttcttgcatatactgtctgattaatggttctaccaacttttccatcttctttcacctaatttatcccccttttcctctcccttctcagcccagtctgattttcatgaacctttataaatacctttccagtacattctctcttccttatctttgagtttctgacattttcaggatatcaagtaacaacttcacttggtctttttccacatctgcaggttgcacagtgttcaagggagaggtaaaggagacaattaataactaatgtttctatcactttctttcccagacagaggaagtaacaagtttcctctgcgtcttttattttctattttttgcccattttcctctatcctataattcatgttcctccctctctccatcctctttatcctatggcttattgttcccttggtctctccatgcttctgaggatcatacagaaagtaaaggatctggagatttggcttttcagtcttgcaactctgtggagatgtgctctgaatgactaaaaagcactggagctctgtagagcatatgggaaataatggtctttctgcccctttaggaaccttggagaagaaggacaaggaaggaaaggggcctgtttgcataagacagaaactttctaggttgatgagtgtgttaaaaaatcctaacaggcagtttcccagagagtaggcagtttgaggtagtatggagaatataattaacttaatagtcagaaggtctgtactctagtgcgagctttgcttctaactgactgcatgaccttaaataagtcacttagactggttcttcgtccttgtttccaaaatgagcatgtagaataggtgagttttaaggtcctgctcagttctaaaatacagattccaatagaactgagtaacttagtgttaaaactaatgtggggttttttggtatgtgtgcatttttaaaaaacttttggtttttgacctaactgaaggcaatatactatttttatttttccttacttgcaaaattgatacctctaacaaaaattcaagggaatttatttaaatataattgctttaaaaatgttttatgatagataatctgcattgagcacattttaattttgtgtgggactaactttatatttctactaaccgtttcctttggataactgttctttcatccactgtagtctttgaagaggactcctcaagtgtttgcctgttagtaaaaaacatcttatttcccatgttgtattttatgtgttgaaaaaaaaatttattcttataaattcctcaattctagccctttagatatttataagctgcatgattgctaatatcttttccagagattatttcagtgggtgaaagaggttacttctttattttctttgtgttgttctttttcacttcttccattatttagaaacttatttaaaattttcgtttttttatatctttttatgttgcaaaagacctgtgtcttcactgtatattaaaatgagttgtatactaaaaggaatttatcaaactaagttaaaccatgaattgcaacttaacctgacaattagatcatttcttaaataaaacttcaaaatatatttttaaccataataaaatgggcaaaattttgtttctagattttgttcaaagaccagatgatttactaagaattttttgataagttagggcatgtctcctagaattgttatctgtaagacctcaaaacctttaagctgaaataggacattaatttacatgtttattttagctgttagatatatttctaaattattatacaaatagggtggtcattaaaatttagagaaatagctatctgatgtaattattaacagattataatttctatcagtaacctatccaaaataagctaagtccaaacattcttctgcatattttaatttttagatcaaagaaagcaaagaattcaattgataaatcaactgaaactgacaatggctatgtatcccttgatgggaagaagactgttaaaagcggtgaagatggaatacaaaaccatgaacctcagtgtgaaactattcgaccagaagagacagcctggaacacaggaacactgaggaatggtcctagcaaagtacgtgtgatttttaaaatagtttgcctatgtgattttatattagccaatgtaaagtgacttagatatagtagttgcccttgaactaagtattttctccagaattaattctgtgagcgtttataacactgatgaaactgtaaatgagataaagtgttgtgattaaacttgattgacaatataatctgacaccttctgaattgatggcttcagtttttccaaaatgctttttttgagacggggtcttactctgttatccaggctggagtgaggtggtgcgatcttggctcacagcatcctcagcctcccaggcacaaacgatcttcccacctcagcctcctgagtagctagaactacaggcatgcgccaccatgcccggctaattttttttttgttttttgtagagacagggcttagccatgttgcccacgctggtctcgaacttctggactcaagcagtccacccacctcagccttctaaagttctaggattacaggcatgagccactgtggctagccccaaaatgttaaaagcactttataatttacagttgttgtttgttaagccttactttttctttccctatttctgtgtgtgtaagaatttgcactaagtggaacatgcgaataattcaggaagctgaacagggaaaccagttttccattcatgttctctataagaagatatcttgtttttcctgcattcattacctgtggtgtcaacatacctgttttgttttcttttgttttgtttttaatctggaaaaaatcttactggggacatatttgttaaagagaacaattatttctttacttttccaaaatagagagactctggttttattgtaacaaagcttaatgtgatgtcttctatttctttgcttcactgaattttttttggttgaacagtttattctttagaagctgttacagtaaaaaaatagagagagagtcaaattaaaagatgttacctctcttacatttgggaatgtgagcatgaacatattgtgttaaggaaaataaagaaaagaggattctctaattttgggtaaagtatatgttactacttgaacgttcatgtattttcagtaccagtagccatagaagagcatgggcctgcaatgaatgtagtcccttactctgattttagatttttttcagcatttagctctgataatgtgagcctctcatcactgttattcagcagataaattttcagtcatatgctttcaaacacgttttcaggcttgtattaatattacctagtaaagttgtatgaggaacatgaaaatatcaataaaacgtatgctctagagtcatttaatttcgtaatttctaaactctggatatcttttacaaattgatgtgtgtagaatgttgtctgacgtgcgcacatgcagttgctatttacttcctcttatcctgtaaaccattattaaattagtggtgggtcttacaattgatggctttttcagtttgaaaaaatagtataatatgttctttcaccttcttttaagtggtctctgttctgcttttctcctgtttatattcctttttttttttttttttttttttgagacatggtctcactatgttgcccaggccagagttcagtggtgcgattatagctcactgcagcctaaaactcctgtgctcaagtgatcctctcacctcactctcctgaatagctaggagtacaggtgtgcactgctatgcctggctgattttttatttttattttttaagagactgagttttgctatgttgcccaggctggtctcgaacccctggcctcaaacagtcttcccacttcagcctcccaaagtgctgagattacaggcttgagccactgtgcctggcatatttcttatttttggatgctgtttcaaatccttttctgaacagaaatattacaggataatatttgacaaatggctgttgaagtacttttaaaagtaaaaatgccttaaaagtatagtcactgatttaagatattttttcagaaaatcaggtaatactaattagttactttgtggtagttgaggatattttgaagttgtgtgtatatatgtatgtgtaatttcaaatttcatagtttaaaagctaaaaggttggttagaaattacctataatcctctttgtgtactcccaacttaggatacccaaaggacaataacaaatgtctctgatgaagtctccagtgaggaaggtcctgaaacaggatactcattacgtcgtcatgtggacaggacttctgaaggtgttcttcggaatagaaagtcacaccattataagaaacattaccctaatgaggtatatactttgtccttaagtgtatacatacgtatctattttatatgttactaatttataacttctttcaacaattaaaaattgttgaaataaatatttcacattattatcaatatttattattgttgtatgatctggatttataaaatagcagttttaggtttacgtattgcacatgtattgatagatagccacacatttgagctcattttatgcattatctttgaagactcatacattgtttgttgtttgcttttaaagaagaacattctggagagagaatctgcaaactcctgtgttcactttttccacaatttgaaaggctttatacatttgatcatagcaaagttattttaagtaacttccttcatattgctgtcaccagttattaagtccccatacttcaaaattcagttcttttttctttgtttctatttttccttattaatctttattttctctaaacccttttcaactatatcatatctcttgagcttcaaattgtttaaataaagaatttcattcaattgtattttcagtttctaatctaagggtagaacatttggctttaaggcaaataaattacactgtttatcacttttttataaacattaccttctactctttttgagctatgttagtaattttttccttgatggttttgggttaaacttgtaaaacaaacacatgttacgctgtgctggaatatgattgccttcagagtattaagattagaagagttactattctttgcacactcttctttgtggttgtgtctctggttaatctttctggtgattgtggttttgtttcttttcccagtggttgccatacagacactaatgccagtgtgtctgctctattgcctcttcacccatgtcatttgatgtagtgtttcttgttcctaagccagataaccaagcttgtaaaattttgtcttactgtatgtactgttagaagtcagttggtgctggaagggagacggagggctgtttgacccctctcccagaataaattatttagcagtagcagtatttttctcactccatgatcttggcttttgttggtttgcaactgtattttaaacgattgagtttcttgaagcgcagaacattattctacctattaacttttaaattaaaaggttgtttaaaatcttgatttccagctaagtaaggctgatagtaagcattgatttacatcttttttaatgatataagaaattacataaatataaaatatggctataaaattcttcgtctataaagtgaagaatgtagactaggtgatattttaaaagctgcattcagttctcaaaaatttttactcttaaaccagctttaaagggcgtttctaaaaaaaagcaaaataaagcctcctttgaataaataaaatggaaacagaagatttgtagtgctcttttgcgtttttatttataaatttaaatttattttataaattactgtactctctccaattgctagtaatgttttttctttaagagtgaggcatgaaaaaatcatttggacccactcaaacacaatgagcaagcatctctagtacctagattgtgccatttatcactaaataaccaaaaccaaaaaaaacaaaaacaaaacaacttcttgaagaagtggctgattcctgattgtcgtttgttgcaggaaatatacaaaatgactgtggaacctcttataatatgatagagggcaaggaagctatcaaagactaccaaggtcttttcagaaagacttgggagccaaagatagaatagtttgaactttaatttttcttgataaaagtattccaatgataaatgaaaaggaaaattctttggggaagtattttgtgcatggatgggattggtgggttttattgtaagataatgggtcaggaacctagccatttgttgtaagcttcccagatggcaatatctgtagataaactttttaggggcatctattttttagggaagacttatccagtcttctggtgggatgggggtagtagataataaaacaggctgctctggtgtttggcaccaagggaactggggatgagatggggattttgtcatttaatgtgtagactttcatttaatccccggtttttgcctttttctactatctactgtatctggttgacttcttccagtgttctgttgggaggaattacttggttatctgggatgcaggaggcgtcctagggaactgacagcttcttttaagtgtttcttctgttacctactctgtcctgctttgttcagctctacaaatattgttcaatttttactcccaattgtaggttagcttttcatcccagaaaggtaacatttgatgagaagcgtaatgaagaaaccatgggcttggagttagattattaaaatgaccttgggaaaattatttaacttctgagttttttaaaacaattttccttccaccccccaagaaagcatttataagtccatattcccttcaaataaatactatgtgttctctaaatctcattatatgttcagttttaggcgtctaaagatttgacatgactagcagtagaaaccaaaacaaatgtgttttaacttgaactgttcaattctaaaattttctttttttagactttatttggtaatttttagtgatattcactattaatcacacaaatattgtaggtaaaattctatttgaaatttaggcaattataggcaatagtttttagggtttttttttttttttttttttttttttttttgagacagagtttcactctccttgcccaggctggagtgcagtggcgccatctcggctcactgcaacctccgcctcccgggttcaagtgattctcctgcctcagctaatttttgtattttaatagagatggggtttcgccctgttggctaggctggtcttgatgcacccacctggacctcccaaagtgctgggattataggcgtgagccaccactcccagccagagttttaaatgtataaaatgacccacttggccgggtgcggtgctcatgcttgtaatcgcagcactttgggaggctgaggcgggcagatcacgaggtcaagagatcaagaccatcctggccaacatggtgaaaccccgtctctacgaaaaatacaaaaattagctggctgttgtggcacgtgcctgtagtcccagccacttgggaggctgtggcaggagaatcacttgaacccaagaagcagaggttgcagtgagccgagatcacgccactgcatccagcgtggtgacagagtgagactccatctcaaaaaaaaaacaaaaacaaaaacccacttactaatctgcatttggcaaaaaacacttctaaagaattatagatattttcttaatcctgaaatcattaattagtttccgttaaagtcatcaggcctttaatcctgattaacaagtctgcaacagacgttatatataataaactatctttatcacaagttttaaattagcaattattaaaagcttaatgtgttctgtgccttgctaatgaaaactggtgacattagagaacctgaaatatttttggagtgctgttcataaaacagagcagagtgatttttgtcctctttttctttgtatatttgtttttacttattaatcattttcttctcttttgaaagtttttctttttacttctttctaaataaacagccctcctcccacaaacactctattaacacactgtagattcacagtccccattctaatatcagtagattaattattaataatgtacctcattcactcaaggtattttgttacctgtggtaaggagatggccaaaaaaaaaaaatctgtcttttgtggactcgtagtatatttagatttacaatctatttgagaatattaaacacatgaatatttaattgagacagacaatattggccgcacattcagtggctcacgcctgtaatcccagcactttgggaggctgaggtgggcggatcccttgagctcagaagttagagacccgcctgtgcaacatggcgaaactccatctctcaaaaaaaaaacaaagtacaaaatttagccaggcatggtggtacacgcatgtagtcctgcttcaaaaaaaagaggccagggccatggctcacccctgtaatccctgcactttgggaggctgaggtgggctgatcacttgaggttgcgaattccagaccaatctggccaatatgataaaaccccatctctactgaaaatataaaaattagcccggtgtggtggcgggctcctgtagtcctagctactcaggaggctgaggcaggagaattgcttgaacccaggaggtggaggttgcagtgagctgagatagtgctgctgcactccagcctgggtgacagagtgagactccatctcaaaaaaaaaaaaaaaaaaaaatatatatatatatatatacatacacacacacacacacacacacacaaacacacacatacacataaagagagagattgattgtggaaagcagtacaaaatttattatcaaatgaatataaataataactcacttcaggccgggcttggtggctcacgcctgtaatccctgtactttcagaggccaaggtgggtggatcacctgaggtcaggagttcaagaccagcctggccaacatggtgaaaccccatctctactaaaaatacaaaaattagccagtcgcagtggcatgtgtctgtaaccccagctactcgggaggctgaggcaggagaatcacttgaacctgggaggtggaagttgtggtgagtgaagatcacgtgccactgcactccagcctgggcgacagagtgagcctccatctcaaaaaatagtaataactcacttcaggaacaaagtgatcactctaggtaggtggctttaaggtagcatttgttgagcccctgctttgtgccaggtttgtattcaaagttcccatgctcatttaatttttaacagctttttaaaggagtgcaggattaatgataagaggtaggagcataattaaggcctagggtggaacataatcaaagcaaagaacaagccatgcttaggggctcagaagtagcctactgtcactggagtaaaaggttacggtatgtagtggaagacaaggtcaaaaagtagcacatatgaagatgagcatgctaggtgaaggaatcggaactttatccaggagagcagtgagaagccaaggaaagattttgactagaggagtcaaagaacagctgtgctttaggaaggttaatctggaaagaagaggaaggccttttaggcaaagatcaattaggaggtgcttatagcaatgaaggtataaatgataaagtctgaagtcggtgatagcaaaggaaagacaaaaggataaatataatgcattttaaaggtacatgacaaatctagtcacagaggacagccaaaaaaaaaaaaattgaagatacctggccataaggatgactatgaccatgatttattcagtaaaagttttttaattaatttaaatcaaaattttactcatctttattttgtacattgcaaactcccaggataaagtaaactgattagaaattacttaacttgttttaattttttacttttataccacagattatctcaagaacatgagttggcagttaccttcttggtttaaatatcaattttatgttgatttcacttccatttgtgaaacaaaaacagtagataaatccactcttgcttaaaaaaaaaaagactagaataagaaaatacagtcattcctgggtatccacgtgagattggtagatatccggcccttctataaataccaaaatccaaggattctcaaatctcacagtcagccctgtggaacctgatgacacataagtcagccctcgccctccatttctccaaaactgtgggttctgcatctcaggaatattgtattttctatctgcagatgtggaatgcatggatatgggaggccaatggtattgccattaataacatcaattaaagtcagttaatgttcaccgtgcagaccgtatgaacttagactacttagactactctctctgcctacctgagttgtgaacttcatataaaatttaagagaaaatagatacaacctttgtatgcaaagtaatatctgagctgaaatatgaaatcaaataaattttgatgtgaaggtattttgttactgaataaaagctaatatattttgtaatgttttgctgtctcactatcttttgagggtgtatttgttgttttagcaaaaagtatcaatatatgggttctgatagtatcctttgagttggaaagagtacataaattgtattaatgtcaaagaatatcttgatttcaggacgcccctaaatcgggtactagttgcagctctcgctgttcaagttccagacaggattctgagagtgcaaggccagaatctgaaacagaagatgtgttatgggaagacttgttacattgtgcagaatgccattcatcttgtaccagtgagacagatgtggaaaatcatcagattaatccatgtgtgaaaaaagaatatagagatgacccttttcatcaggttggtttatggttttggcttatgtggagctatgagtcaagctcctttgaatttatgttcaaatgttacagaggtgaagaaaaagcttacattcaagcttatatttctataattttttttctttttatgtgagctgtggtctggcttcatcaaaacatagaatctcagtacttatattgtggttatgtatgttcctgaaaagttattggtaactggagtttcgtaagtcaaatcgtgtgttaggtgcaatagtactttcttactgaacatactttgtggccagatgcatgtacaccttggtctaaactccacctataagattatattcacaaatctacatctcatgaatatcaaatttgtagctccaagtgcccatagtaatgctatccaatggaaatattatgagagtcagatgtataatttttaattttctggtagcctcattaaatattttttaaaggggaaattcaaatatgttttatttagaccattatattcataatatcactttaacatataactaatatgaaaaaattaatgaaatattttacatttttaatactaaatcttcaaaatctggtgtaaacacttagagcacatctcattttggactagccacatttttttttttttttttttttgagatggagtctgtccctcttgtcacccaggctggagtacaatggcacgatcttgactcactgcaaccttcgcctcccaggttccagcgattctcctgcctcagccttctgagtagtagggattacaggcgcccgccaccacacccggctaatttttatgttattagtagagacaggctttcaccatgttggccaggctggtctcgaactcctgacctcaagtgattctcccacctcagcctcccaaagtgctgggattacaggcataagccaccctgcccagtcggactagccacatttcaaatgctgaatagccacatgtgaggagggtactatattggacagcacgattttataggatatctttatttgaatgtcccaccaatacctcaaatttaaccagtcctccctcataaatctgtttttcttattccattcaaaattttggtgaatgacatctccattcatctactcactagtccagaaacttggtggtcatttaaaattcccctcttcttcaccttctctctcttatccaactccttatctaatcctgtcaaaccaagtaaagtcagaaaactcgagaaaaaaaagagaactttcaatctgataaaagggtgatgcatagctatcaaagaaccttctgctataacaatcccagaggctgggtggcttaaacaacaaacatttatttctcacagttctgaggcctggaagtccaagatcagggtgccagcatgattggttcttggtaaaggttctcttcctggtttacaacagctatcttatccttgtatccttacacggtggaaataagggagctctggtctctttacctctgtctggttttggttggagttaggctgatttaaagtccatattaaagagcaaaatatcaagaatagcaaaaacaattttgaagaacaacagggatctttccctactggatataaaaatttactttcaatttaatactcaagatagtatagtatagacatataaacatatataccgatggaacagaatagaaaactcagaaatagacatttgtttataatggatcactaatacatgacaataagtggcattacaagtcagtagaaaaagaacggactatatggttgtgagtcaaatgattatacacttgaaaatttattccaaatagtttctaaaggtgaaaagcgaaactttaaagcatttagaagaaaatacaggagaaaaatctttattacttcaggttagagaagaatttttaaaaacaagatataaaaagcacaaacaaaaatggagagataaatttgaatatcttaagatttaaaactttgggcgtgttaaaagatgagccacaggctgggagaagatatttccaatacattaactatcacagtgttactacatacaggacataaagaactcctacagatgaataagtaaaagacaaatgactcaatagaaaaataaaaggatgtgaacaggtcccctgatggctaataaaatataagtgaagatggtcagccttgctattagttagggaaatgtaaattagaacaattagatactacttaatattgatcaaattgtcaaaatttaaaacctgataaatttcaatgttggcaagaatgtgaagagagaactctttaatactgatgtttgtttgtacagctactttgaagagcagtttgtcattatatagtaaagttgaagttctatatattctaggaccctttcattccaatttagaatgaaactttagaagataggcactatcattgcattgtgcatgatagtgaaagttgaaaatataatagccaataatagtggaattaataaataatgttgtatgataaaacagtatacagcagtgaaattgaatgaactcggctgcatgtatcaacatgaataagtttttgaatataattttgaatgaaaaaggcaagctgcctttactttaaataaccctgtctctactgaaaatacaaaaattagccaggcgtggtgacaggcacctgtaatcccagctactctggaagctgaggcataagaatcacttgaacctgggaggcagggcttagcagtgagctgagatggcgctattgcactccagcctgagcgacagagcggactctgtctcaaaaataaaataaaaaataaaaaggatggctatgaatgtttagaaaaaacaaagtggtaattagggaaattgagctggagtgttttggtgttgactccctaatatatgagatatttgaaaacattgatatatacaggagaaaacaggtagggaagaatcaaagagatacggaagaaaatgttgactggtggaatgatttcttaggattctggaggggaatcataatcaggaagcttagcatttgacaggaagaggaaaacatcctctgctgagataggaggataaggatgagtgcatgcagcaagcaagatggtaagagagttattgcctgatgatcttttttccgtgaagtgcaagagtccaagggatctactggcaataagcgagatgatacaagaggaggcttttggatggtggtgaaggctttaagttaccatttgtggagaatggagaaaggggacagagagagggagagagagaaagaggaagagagagagagagaaagagagagagagagagagagtgtgtgtgtgtgtgtgtgtgtgtgtgtgtgtgtgttcaagccaatgaacacatcaaaacaatcatactgccttgccacattgttgagggtccagctggaatctgaaaccatgaatttgtagttgcctattctacacagctatgtgatgttttctggaatgtagttgttactatatctgacatttaataagcatttacttatgccacacactgtgcaaagtaatctagttgcattatctcatgtatttaacctttacaacctgtggtaatgtagtttattttcattttacattgctcagagttgagtaatgtgcccaaagtcacacagagtaagtgttcaataaatagttgccacgcctgtaatcccagcactttgggaggccgaggcgggtggatcacaaggttaggagatcgagatcatcctggctaacacggtgaaaccccatctctactaaaaatacaaaaaattagccgggcgtggtggcgggtgcctgtaatcccagttactcaggaggctgaggcaggagaatggcgtgaacccaggaggtagagcttgcagtgagccgagatggcaccactgcactccagcctgggcaacagagcgagactccgtctcaaaaaaataataataataaaataaataaataaatagttgctcttcaagggacaggagaggggatgattgaaatggtggatctggtggcagtctagtcattaaattgttagattgagaaggaaatgaaatcaggaagggactgataaatttaaggataggtgtgttcaagggaacaagtgtttcagaattgaagctttgagagaccaggtaagatgggaagttgtagtagattcctttcagaagtagagcagttccgtatggtgacaaggtctagggtgtggctgtgggagtagcgtccttgggattgaagaaatgaaaaagtgaacaatccatgaaagcatagggtgttgaatgagtcatctgcatattcatctaagtcactgagactaacaactggagttaagattgagggaaatgcctgtgagctattttcccagagataactataagcagcataaaagcagggaccatgtgttttttttttttttttttgctcagtgttgtatcacacagcgtgaggtacacagtaggtatttaataaatattgaatgcctgaaacaaaattaaattttttcaaaacatgccaattaggcctttcttaaatgatttaaaaaattgttttatgatgtctgtgcagagtaaattgctcctaagtctgtcacaccagtcggctacctttttggtaagataaaatttgttaatgctctactctgtatatctaattatggtatcctaggcttatattggttttgcttttagattaaagacttgatcttaaacagatttttaattctcaggtttcaaaaaataagctcatgcttttagttttactagtagctaagtaatggaaattagctcccttttactaaaaagctactagttttttttcttgtttaaccagtctgttaggtttggaagacctttttctgtctgctatacagatggaaaaatcccttctcatgaaaaaacactgagcatttgaattagtatgttctaatcagaatattcccaaatgtgtatctttatttcattgttttattttgtttgtaaatagtaattgaaacatttccacagaagaaaatttttctcctatagccctcctctatagctgaatatatactaaaatataaagctatattcagctgaaattcagtttttagtaagtgtaaagctttaaatggctgcattcccacagttggaaacacgagtatgtggttggcatggtgaatttatttgaaataaaacatgccaccatttaagcaataaggttttcaggtagttttgaatgaataaggagcaaagcagttgagattttaagtgaggataaagtataatcattttagaagttctaaatttttggatctgtgatgctgtcttcaaaggtaaaaaaaaattttaagttctaaattttagtttgaaaacatatatagcggccgggcatggtggctcacgcctctaatcccagcttgggaggccaaggcgggtggattacttgaggtcaggagttcgagaccagcctggcaacatggtgaaactccatctctattaaaaatacaaaaattagtcgggcatggtggtgggcacggtggcaggcacctgtaatcccagctgctcaggaggctgaggcatgagcattgcttgaacccgggaggcgaaggtttcagttagccaagaaccacactccagcctgggcagtggagcccaacacagtctcaaaaaaaaaaagaaaaaagaaaatgtatttagagtaacctatgtgataaaattataaaatgaaattatttgctctgatgttttccctgaaccttttaaaaaaaatttcatgtgatgctgttctccacactgcagacatgattcaacaagactgtttttcagtgtacattccccccccccacacacacacacagaggaatatagcagtcttttttatttattttttcaagtttctacacacaacattgaacatgtaatttacccttttttttttttttttttttttttttcagacggagtcccactctgtcgcccaggctggagtgcagtggcgcgatctcggctcacttcaagctctgcctcccgggttcacgccattctcttgcctcagcctccccagtacctgggactacaggcaccagccaccatgcctggctgatttctttttgtatttttagtagagacggggtttcaccgtgttagccaggatggctactatctcctgacctcgtgatccgcccacctcagcctcccaaagtgctgggattacaggcgtgagccaccgcgcccggcgtaattaactcttttaaaattcaccagtttctagttgctgtcttctcttttgccttttggcattctagaaataatgtaatatcagatgctggatagagtaattggcaaggtagctagatgtaaaaggagtgcttttgggaggacaatgagaatgtcctgatttcctatttctgtctctagatgggctttcttggtattgatattcctttcttcatgtaattaggaagaccttaattcactattccagactgagagtttaaaaatgtctgtaaatcagtggttgaaatctgttggctctcaagcttaaacttctttccttttagcttcttgcacttcctgtttctggctttttggtttccttacgcttaacaattgtaaaatttctagtgaaagtttgatacatattttggtacagattatttctttcccaaaacagaatattttgtttggagataaatgaggaaataacatttgagaaattaagttggtagttaataactagtatcttagcactcttcaggacctcaagtagtgaaatgtataccatgaaagttaaagtatattaaaatccttcatctctagaaaagataaaaatttcccacctctttttttttacattattgaattattattattcaactttagttgaaattaatcaatgcaactttactccccctagaggaaagtgttaaaagtttacaagaaacattttttttaccatattttaatcacatttttgtcctctaaagaataaatgtacctagagtagattcttctgttcattgttagaagttatatttaatgaaatattttataaaatttgaggttgctacgaatgccaaaactattgtttttagaaaatgtgggaagtggccagacaccgtggctcacgcctgtaatcccagcactttgggaggcttaggtgggcagatcacaagttcaggagttcgagaccaacctggtcaacatggtgaaaccccgtctctacaaaaatttaaagattagctgggcgtggtggtgggcgcctatagtcccagctacttgggaggctgaggcaggagaatcacttgaacctgggaggcggaggttgcagtgagctgagatcgcaccattgcactccagcctgagtaacagagcaagactccgtctcaaaaaacaaaatgtgggaagtatatgagtccttaaaaatacactagaaatactgcaatataaacaagcaaactgatctctatctgggtttaatcttttagtgttacttctcctcttgaagtctgattatataaaggtttagtgtttcattaattttgttgccatcattaactcaactgttctgttttggggctgggcgcagtggttcacacctgtaatcccagcactttgggaggtagaggccggtggatcacctgaggtcaggagttagagaccagcctggccaacatggtgaaaccccgtctctactaaaaataaaaaaattagccaggcatggtggcaggtgcctgtagtccgagctactcaggaggctgagtgcttcagttttgtaatatttgctttatctggaaaaaaaaaaaaagttaaatgggtcctttggagaaatgctggattaaaatatcagaaaagtaactaaatcagatattaaacgttaaatatgtaaggaagagtcttttttgggataagactagcactatatggtctttcaaagagattcaaatctcagctgtcatattcttttttaatgatcataagttggacaatgattactatgaacaagttgatatccatttgtcttttagcattagtatattgcagctgtgtagactgacaactaagtacttttgctgacatgttttagtatatttttgaacataggttgactaatacttgttacagaaagttctcaacttgtacagtttcataaccatgtaacttcttatgatatctgttcagtgtatatgctaactaattttaagatagaattttagtgtcttagagttgtgtgtataaatatattagctgtgcacagatctatatattccatttataaaacatgataaatatattcaccaatttttatttttagtgtcattaaaattgtgtgtgtatatagagatatatatacaactttatatacacacattttatttattaaatgtgatctatatatttactaattttttttttttttatagagtcatttgccctggctccatagttcccacccaggattagaaaaaataagtgctatagtatgggaaggtaatgattgtaagaaagcagacatgtctgtacttgaaatcagtggaatgataatgaacagagtgagtttttaaattttattcttgtagttcaagggtaagacttagtaattatatataagataattactggaatattatattagtaaccttctgacctcatttcttcaccctgaaaaaaaagttacatgtgtgtatttgtttctgtctgtaatttaaacagtgatttgtcaccaaaccactctcatcttctagtgttttcacttatctgaccaagaatagatgatacggtctataatttttctcttttatctttttctttcttttgaaattcaggagcttgttagatatatacaggtgttaataaagacttttctttggactagagattgttgttacaagaactttaaaaataaaaaaataattaaaaagacttatttttctgtatcattcttactggttcatttgtttaataggacttaagacatgaaaaaatcaaactagtaaatttgcattcatacttgcttacctacttaaatatatagaagtaatgcagatagtggtaaaagtcttgagtagttcaaagaagtctaattgaaatactgtggattaaaattttattttctattatttcttttttcagataattactgatttttaaaatgtgttgattggccgggcgcggtggctcacgcctgtaatcccagcactttgggaggctgaggcgggcggatcacaaggtcaggagatcgagaccatcctggctaacatggtgaaaccccgtctctactaaaaatacaaaaaaattagccaggcgtggtgaaaccctgtctctactaaaaatacaaaaaattagccgggcgtggtggcgggcgcctgtagtcccagctactcgggaggctgaggcaggagaatggcattaacctgggaggcggagcttgcagtgagccaagatcacgccactgcactccagcctgggcgacagagcgagactccgtctcaaaaaataaataaataaaaataaaataaaataaaatgtgttgatttctctggacttgtttttaacttgcaatttctaaatttctttggtgcattattgtgcttgaactcttctccacactttgtgtaagacaggaattataataactgggtctagaaattgataatactccctataacatatctcagtgtgagcaattaaaagcagttgacggggaagtctctggaatcttggatctagtttgtgctctgtaacttaattacctgtgaattggcagatcacttaacttacaatggtctcatttatctaatatatattataaaaagttggctacatgatagttaagatctcttttagttctgccagtctagcatactggaagcttttatattgtcccattatctaatttccttttttaaaataattccctcacctttttccctttctgtttaatttcttcttccttctatcatctctcttctaaaatgcttttagagtttaaggagacacttatttatatattggactattcaaagagaaatgtaagcggctgggtgtgttggcttatgcctgtaatctcaacactttgggagctagaggagggatgatcgcttgagcccaggagttaaagaccagcctgagcaacatagtgaaaccctgtctttacatctctacaaaacccaaaaaattagctgggggcggtggtgtatacctgtagtcccagctactaggaatgctgagttgggagggatcacttgagcccattattgtgccactgtactccagcctgggcaatagagtgagaccctgtctcaaaaaaaaaaaaaaaaaaagaaaacagaaagaaaacctcaagttacaaatgtacaaacgtatgaaataagtgtaatgctgagttttttcttcaatgaactgaatttcagtggatatgagatctcattctctttaatattgcagtatttatgaatatttctaacttgaaataatgaaatacataaatttttttcaagatctggatgacagtccttttgccatctacttagtaaattagcgatctgataattgtttttaagatctgaagaattaatgacattttatatgtagtaggctctcaaacttgaatgggattcaaattactcagaatgagtatattttaacaaatgatttcatattgctataaataattctactgtagataaaatttatggtataattttatttttcttttctctctcttcccctggctccctcaaggtgaacagccatataccaggaataggataccagatttttggaaatgcagtctctctcatactgggtttaactccatttgttttccgactttctcaagctacagacttggaacaactcacagcacattctgcttcagaactttatgtgattgcatttggttctaatgaagatgtcatagttctttctatggttataataagttttgtggttcgcgtgtctcttgtgtggattttcttttttttgctctgtgtagcagaaagaacttataaacaggtgggtataatgtagacttccgaataagaatattttatcgttttcataatattaaaagtattcctgaagtactttattatttcattatatcatttttacctaattattttttattttgcttttatagtacctaaccaaataaaatcttaacaattcatattttgttaattttgtttttctgtggtaatctacttgaaaattaatcctcatcttaatcttttttagcgattactttttgcaaaactctttggacatttaacatctgcaaggagggctcgaaaatctgaggttcctcatttccggttgaagaaagtacagaatataaaaatgtggctatctctccgttcctatcttaaggtagaatgggagtgataaaagtagctttaacatgctggccctttctgatagttccagtttctttatcaatatatatttgtctctagatgtatagtaaccagcttttactcattcaaaaactggattagggattttgtttctactagcctggttgtcacaagccagcagagggagcccactacttaaaaaagaatttaaaaaaaataaccaatgagtttcctcacagaagtgacctattactattttaaaatattagtttgcaattcagtgtcattcttttcatgtcattattttcctttaatcttttgagtaattttcctaattatggaagtatgatataaaaactctggagggaagagggaaacatctaaattggttttaggaaaacactttttttctgaggattacttcttgttattgcattaagtagcagtagaatgtcattatatatggagtaatcatgcaaattccaatgatatttattcacagcactgtctgtatcttagtaaagttgacctgaagaccaatcatcctctgacatacctagatctttaatgctttatattttgaaataataatcaaagaagccctaataataataatgccctatttctctactcttatatttaaaaaattcattgttctgtttattaatttaacttgttaaatttagcttacttagtgtcactgctgcaaattggcatggatatttttttcctatgacatatctgttgtatggagggatgaatctgatcgcttgaattcgtccaaaatttcctccattgtcaaccctaagcaggtgttacattcttttgtacattgattattttattccgtaaacacttatttatgttaaccatgtgccattcattgttgatgagatgaaagcccctaccctcatacgtaagcttatacttcagtgagggaatgtaagcccagacctaggaattatcctagtttaatctctagtctccaatttatcaccaattcctatcttttctgctcccaaaatatatcttgaatccatttgcttctctttgttccatttctgccaccctcattgaaaccatcaatcatcttctacctcatgctacttcagttacctcttacctggcattccagcattcacatttcttcttttcattcctttcttcagtctgccaccagtgatcatttaaaaatgtatatttggccctatattcttaaaactttttggaggttcttcatttctcttaagataaagcacaaaatcttaacaaggtttataatgccctttatgatctaagttctcccttattcacctgtcttttgtttcattttgaaacactctccttcctagtccactacattccaaccattttagactgcttccgttctttacatgagctgtgatctgtcctgctttatgttcttgcacatgcccttccttctacctagaacactgctgtgtgccatcatgcccctgcccctcccccttagtttggtgtaaatatcacttccttagggagatcttcacaggcccgcactcctaaccctcaaatctaaatgaagtctccctgccaagtatctcaaagcatcctatgtctttcccttttagcactcatcacaatttatcacatatatctgtgattattaacttgatgtctcactcccctcctagttcctgtgaaggtagagggaccatgtgttgttctctgttgtatttgtagcacccagcacagtatctagtgctaagcaggtgcttaagaaatatttgtcgaataaatgacttgtgtttgacaaaatgaagtatttgaaagttataccaataattttatgctatataaatatagatacccttttaactctgttgcaattcctcaggaaatcataacactatcattaaaatttgcctaacaaattaggtatattcaacattgtgggctgtgatcaactgatggtgatgagtcaacacctttattgaaaccatggaaattatctgctgattagtaaatatattttaaaatgtttccttttctcccttccacccacaccctgcagcgtcgaggtcctcagcgatcagttgatgtaatagtttcatctgctttcttattgactatctcagttgtatttatctgttgtgcccaggtgagttaactcgctccatgtagaaattaaccagatatataaatattaactttcagattaataaataatcaaataataatataagtaagcctagttagaaagtaagttttgaagttacctttttgcagtttttttggtagaataaataagtgcatcttatctctgtgccatgaacagtgagcatgtatgctcaaatgtctgttgaatgaacacagattaattaatttttgcctagaatccttctcattatctttacttcccaaaagaaacgtatgagttatgaaattgtcccatgaatatccaatttattcatgtttactattcttttctttctttctttctttcttttttttgagatggagtctcgctctgtcgcgcaggcggagtgcagtggcgcgatctcggctcactgcaacctccgcctcccgggttcacgccattctcctgcctcagcctcctgagtagctgggactacaggtgcccaccaccacacccggctaatttattttttgtattttttttagtagagacggggtttcaccgtgttagccaggatggtctcaatctcctgacctcgtgatctgcccgcctcggcctcccaaagtgctgggattacaggcgtgagccacagcgcccgacctattctttcattttttatacctgaattgttactgtgacttaactgctgcatactctgaaaaagaatttttagtgacccagcttagttagggagtacaaaagtatctcaggatatgcactgctataatgcaggggaacatgttctcagggtctcctgagggttgtgtcatgggccgtgtaatattaaaaaataagtttaaacgtattaaaattttaaaaacaaaaataataaaatatatgcaaacctccattccaagtagtatgatgtactagattatctgaaaattcttctactttaaaacatcaaacaggccgggcacagtggctcacacctgtaatcccagccctttgggaggccaaggagtgcggatcacctgaggtcaggagttcgagaccagcccgaccaacatggtaaaacctcgtctctattaaaaatacaaaaattagccgggcatggtggtaggcgcctgtaatcccagctattcaggaggctgaggcatgagaattgcttgaacccagaaggcggagattgcaccactgcactccagcctgggggatacagcaagactctgtctccaaaaacaaacaaataaaaaaaaaaatcaaacaatgctcgggggaaccctcagcttttgaatgtacatattgtgtacatatctgagttcataagataataaagggccaaaaatgaagacaaaactgaaaaccagagcatttaagaataagcattaatgctatggcagcatgagaataagagagtgaagtacattgccagtattagtattgtatcccagagacttgaaattttatgcccacgtaggacaggagatgaggccttgacctgtgtacctccctactcacaccatgaagtcaaaccctcaaagatctacagcctcagtgaaaagttggataagaaaaacagtctgctcaccagcactggacgacaagaaggaagcttatctgactctggatgacaaggacgggggaaaagtctcttctaagaatatataattataactcttcccttactacaggtttagggttcatattgacattatacatcttgtcctgtaaccctcatgtcaaaaagttaatataaaaagtggtcctaggcccctggatacctgacagaagcaaaaccaaggctgtttggaggcatgcgacttcagcctagacctcacgggaaccacagataaagctccttccggtatcaaaacataggaagaaacagtctaacatgaaggagtcaacagataaacccatagcaggattagatctccagctatttcagtttgatcaggtggaaactaagtttgtttacagtgatgaaagacatagataacactgtgaaaaaagaacagataagtttgaaaaagaacttcagacaaatgaaaaatacagttattgacttttgacttgttttttgcttttcactgctggaacaaagtcactgacttttaaaacacaatgaacagaataaatagcaaattaaagaaagctaaagacatagtgaactgggaggtgaaagaaatgactaaaatacaggacagagataaagagacagaaaatgcaaaatggatatttagacatcgtgggagatccaacataggtctaataagaattacaggaggaggctgggtgtggtggcccacgcctgtaatcccagcattttgggaggctgaggcagtcagagcacttgaggtcaggagttcgcaagcagcctggccaatatggtgaaacctctctctactgaaaatacaaaattaactgggcatggtggctcgcgcctgtaatcgcagctgctcgggaggatgaggcaggagaatcgcttgaacctgggaggcagaagttgcagtgagccaaggtcacgccactgtacttcagcctgggcaacagaaagagactgtctccaaaaggaaaaagaattccaggaagaaagaatgctgaaaaacaacatttggagaaataatggctaagaatttttctgaattgatgactttttttttcagatacaaggaagtttataaaactttcccatgtattaggcaataaagtaaaaactaataccaaatgtctgatactatacagaccacaatatctggctgtcgtatagtcaaagtagaaaagaatgatagcaacaaaaaaatcttatatatttggagatttaaaaccatacaaataatacattctttaaaagaaagagcacactattaaactgtaaacagtttaatactggcacaattgagaattttttttaagatactagtatgaagtgctttatgtcattaaagttgaaggcatcagtggccaattttatagaaatgcataatctattaaaacggactcaaaaagtaattgaaaacctgaagagatctgtaactgtaagtagtttaaaattttagtagtttaaaatatgccaccaacaaaaatcctccatacccgtatggttttacagatgaattttgtcaaatatttaaatagataatcctaaacttacacaaaagatctagtcaataggaaaaggggatattcttcaactcattttgtgaggctaatataaccttgatgccagtaccatagagctagtatgaaaatgggaaactgagctggtttcatttattagatacaaaattcctcaacaaaatactaagaagatgaagccagaaagtgaattacagtaaataggccatgactatgatagtttgtgcctggaatgcagatttcaactttagaaaatccattaatgcaatttaagctgattaaaggcagaaaacatgcaatcatatcaatagatgcagaaaacaatttgtaaattttcagtgggcattcatgatacaaggactaggaagtattgtccttaatctgataaagtatatcttttaaaatttggagcaagcattatacataatgatatcaccttaagagttatttactttaaaattgggaataagacagttatctgctttaccacttctagtcagcatttgatggagggtattaatcagcaaagatggaaaaaaaagtggtctaaagtttggggaaaaacaatcgtaaactatatgattgtttatatagaatatccaagcgactttacagacacattatttaaaatagatttgttatatgaagattaacaaaaatagatacaacaacattttaaaaattaattttgtttctataaaccagagatcagcaaacttcctctgtaaagggccagataaatattttagacttttgcctgacacatacaatctctgaaatacattctttttcttcttcctttgaagtaatataaaaatttcctttagctatggggcgagacagacagaggcctaaagctagatttggccagtggaccataatttgttgacatctgttatatacagaaatagataattgaaaactgtaaatactggccagggacagtgactcatggttataatcttagcactttggaaggccaaggtggatggatcccttgagcccaggagttcaagaccagcctgggcaacatggtgagacctggtctctacaaaaaaaaaaaaaaagccagacatggtgacacatgcctgtgatcccagctacttgggaagctgaggtgagaagatcacccgagccttgggaggtcaaggctgcagtaagccatgattgtgccactgcactccagcctggagtaacagagtgagaccctgtctttaaaaacaacaacaacaaacgcatatgttattttcaatagcaacaacaacaacaacaacaaaagattcccgagaataattctaacaaaagatatgtaggaccttatggagaaacaggataaaactttattgaaaattttaaaagaaggtacacaatgaggctgagcgcggtggctcacgcctataatcccagcactttgggaggcctacgtgggcggatcacctgaggtcaggagttcaagaccagcctggccaccatggcaaaaccctatctctactgaaaaatacaaaaattagcccgtcgcggtggtccatgcctgtaatcccagctacttgggaggctgaggcaggagaaccacttgaactcgggaggcagaggttgcggtgagccaagataacgccactgcactccagcctgggcgacagagtgagactcagtctcaaaaaaaattaaaaaaagaaggtatacaatgttagtcacaatgttaataggtgggaaggctcaatttcaatttcatattgattctcctgggggaattgttggaatcccttgtaattaaacagaatgctttgtttatttaaaaaaataagtaactcatcaagctccctaaaactcatctggaagcacagaaagacaagagtagtccagataattttgaagaacaagttgctgtaccagaaatatgaagatttattttcttttttcttttttctttcttttttttttttttttttgagacagagtctttgctctgtcggccaggctggagtgcagtggcacgatctcagctcactgtagcctctgcctccccggctcaagcaattctcctgcctcagcctcctgagtagctgggattacaggagtgtgccaccacgcccggctaatttttgtatttttagtagagacgggggtttcaccatgttggccaggctggtcttgaactcctgacctcaggtagtgcacctgccttggcctcccaaattgctgggattacaggcgtgagccactatgcctggcctaatttttctttttgtttttcttttttaaatttctcttagaaccttcagatgagagacttattttaaaattacagaaagactttatgatttttgcccaggtatagaatgaccaatgggatgaaatagagttgtaaatagccatatatatgtagaaacctaatatatgatcagatggcattatatatcaatgtgggaaggctttacataatggaaatatgaggtaaaaatggagcaaaaccaaatgacttcatgctatacataaaaataaattctaggtggattaaagatctaaatatgaaaaaatttttaatatgatcacaaatgaaaattaaaattttgtgtcctgcaaagacaccataaacaacaaaccagaatctgggaaagatagtggcaaaatgacttaaataggattgttagtcacattatagaactaagttctacaaatcaataggaaaaacgaacaacatactagaaaaaaagtggatgtagaatataaaaagataactcacaggaggaaattcaattaccaataagcatatgaaacatactgatcctccctaaatatcaggaaaagtaaaattaaggcaatgagagaacacgtcacgcccattagattagcaggtattaggaagttagataataacaagtatgaatgaaaatgatggcaaagggaactctgatacactgctgagagtataaattggtgcaactatttcagagactaacttacaatatctaatatagttgaagatgtaatatccaagaacccagtgatttggctcccagatattaacttctggagaaagttttgcatgtgcgtacaaggaaacacatacaagaatgtgtattgcagcattgcttgtaataatggaaattggcaacaaaatattaatgatagggttgaccaataagttgtggttgattgttttactggccaataaattgtggctgatttttttactttaacataggagttagaatgaataaatttagagctaaatctatcatcatgaatcaaccttgaaaacaacattcagtggaataaaaagaaattaaagaatgatgtagataatgtaacatttatataaactttttcctttttttttccaactcccaagtgcttagaaaataaattttaaaatatacaaaaaattatatagttcaaggatgtatatgtagctaaactataaaaaccattatggaaaagataaacataaaattcattacttctggggtgggaaggggaagaaaaatgagatggcaaagtttaaagtgatttcaactgaatctgtaatattattttttaatctgaaagagatgttgcaaaatattaagatttgacaaaactgggtagaggccccatggatattaattaccttatactctatacttttgatatgcttaaaatatttcataattaatgtagaatgtttctaaaatgtaatactaaatttatgaacaatctatgtttatttcttttgaaaagaaattgtttgaatcacattgctgctttatgttacctttttcatacttttagctacttcatgtacacgagatcttccttgattgtcactacaattgggaattggtaatctggtgcatctcgttaacactttttctcctaagatttgttacccttggatcagaaacaagtaaaaaatatagtaatacctcaatattacttactgaacaggtgagtgtgcctacttattatgctacaaattaatgtctataagttaaaatgttttcatttcctttatgtttttcaagaatgtgttctatttgattaaggtcatttgtgctataaagcaaaatgtaaaatttaataggacacaagcctttcttcagtgttcctgccttgactcatatttcaaatccaatctgcttttttaatgtcccatttttatttgacaagaaggaagtaccatttgttaaattaatgtattttaaactatgaatgggacatgtttgctttgcagtgtagcagagccgcatttgagtaagtatacatttttactcagtagaaagaataaagtataattggttaattttattttgtatgaatttgttaaatattttcctcccgccactttataggaattttgtaaagaaacttattctcatgaatattttagttagggatagtttgattttaaacaatcaataaacctgtcaaatgagctcaaacaggagagtaacccacaaagataaagatccctgagaaagtatacttgagcccgccaggcacggtggctcatacctgtaatctcagcactttgggagggtaaggcaggtggattacttgaggtcaggagttcaagaccagcctggccaacaaggtgaaaccccatccctacaaaaaatacaaaaattagccaggtatggtggtgcgtgcctgtaatcccagctacttgttaggctgaggcaggagaatcgtttgaaccccggaggttgcagtgagctgagattgtgccactgcactccagcctaggcaacagagtgagactccaactcaaaaaaaagtatacttgagccttatgaaattggacaaaatcaaccacttcctccaactcgctctgaggctaatggtttctcatttccacccttctaatcacctttctttctgtggcctttctgtagacttgttaccctatgattttggtttacacacggttttggtttggcttagcacgagttctggcttagacttttactaacttttcagttcatgttcctacaatatctgatagatatatcatgttagtctcaccagtcagtatattgactagctttggtttgggtgtacattccagcctaatcagcgatggctgccagattgggggtaaaggtgagatcaaatggggataagcacagttgcctaggcttgcttcttccactggcttggggttagagcatttttcaaagaaaggaactgtggataccccaaaattatctattatagagtggataataaaaatacacaaatatttttgagtgactttcaaataaatcataaaacaacaaggcattgtgactgcctataatcccaacactttgggaggctgagatgagaggatcacttgaatccaggatttcaataccagcctgggcaacatagcaagaccccatctctagtaaaaaagaaagaaagaaaaattataaactattggtttagtttattctaattattatttattttttaggttgatttggctccgataataaagtgtctcaccttttaaataatgccatccagtcttttttattttggcttttgattacatttcaaaagtgtttgagaaacagttattattttcctattataaaataagtataggaaatttggaatatatagtataaagactattaaaatcacctataatctcaataaccagatacttgagtgaatatctttcaagtcctttaaaaatgtgtatttattataatttgaagcatttctattctttttataaaagataaacctctacttgaaaatggagaaaaaacctaacaaaaaggaggaactgacactagtgaataatgttttaaaactggctactaaactgctaaaggtaagaatagaactgaaaatggttataatgtcaaatatgctgttctgacataattttatttttttgtttatagatattactttgtatgtggttttcatgattatccaagttgtttccaaattatacttgtgcacatacatacaatttatattttacttctcattgcaaaagtgcttgaactaatccaaataatttctttggaaattgtatattaataataatatgtctggagtattgtagaggttggcatctttggaaatgtatgcctcctacaccttaaaatagatatcaaaaaagaaaatttgttgtttacttgggaagttttttattttgtatttctcagagaagtcttctggttggcctgagttagcttaaaaagtaataatacataattatcataataaatatgtgtcataaataaacatttaatttttgataacaaaaaggaatacaattttgatgtattttatctcatagtaactctttgggggtaatttaataaaacattttttatcactgcttacaatattcattatgtttttagttcttaaaaggaaaatattttttaaaatttcaacttctataaccaattgaatataattgttagagttatttatgttttcagagaatggtatgaaattagttgtgtttcagtgttatagttaattcttcagtcaactaaacagtgtgaattgggtatagactatgcaccacatagtattgaagggttcagaagaagtgggtggggggataataaaaagcaattacagattgctttctttttcaaatccctttaattatcctgaggaagatgatgacatttaaataacaagcaagataatagaggcaaactccatttttgaccaaaatgctcaatgggaaaaaaatatcttgaattaatagttttgtgtttgcttgacacatgtatattgcctatcttcagagtgtaggcactgtgtaggaaggggctacaaaggtgagactcaatgagcagccacaatctcagagcaaagtataaaaatgactagaataacaaagcataatagtatgattctttttgatcatacatagtctcctagtcagaaatctgggacttaacatagatcgtaccttctttctctctctctttacagccaagaaattctcaagtccgctgattcagtcttttaaatatcttccaattcatcctcttctctattagtacggccctatgtgagatccttgtctctcacttatgcttttgatacactgaactccttacagatattcttgcttctgatctcattgctccctagtctttcttctacattgctggcccaatgatctttcttccttgtacttgggccctaacaatgctgagcaacctgtagcaattcagatgtgtcatgttctcatgtgtcttttagaatatttactccccaccatccacaaagtttcaggagcaccttcctctatggccccattatttgctttttatatgtacctttgaaatgggactttcatattttaattatttgttgcatgtctactaaactgtaaggtccttcagttcagggactgaatcttaacttcccagagcctagcacagggcttggcatatgatagaactttaaatgtttgaattaaccaattaattaatacatgtatttgaaaatgaattgactcaaagaggagtttttacatgttataatcttgtcagaaaatttggccaatttctaattgttctaccgaaaggtattgttctctttcggtttctagtctagttcttatattaaaaaatgttctctagcctctttataatagcttaagggacagaaattggagttacatatttagtcacagagttcttttaaaggaagttcctttttcctttaaaaccattaaaactattattgaaatttacttctttcaagtttaaccaagtttatcctttctaaaagcatccataattggtaacttttttgaaagtgttttttaattctcattgtatattgttctgaattagcttagtaattctttttgaatctgggactgacttttttttctcttctgctaggagttggacagtccttttagattatatgggcttacaatgaatccgctgctttataacatcacccaggttgttatcctgtcagctgtttctggtgttatcagtgacttgcttggatttaatttaaaggtaagaggttgcaagtactttttatttcttagtttcctgttgcatttttgttgcgcccattttaccctcacatgcacagtaatgcggtcattttggtaagattgcaattattgaacatttcacatttaatttcaaagaattatatgtatttatgttttataatactgcaggaatttctaacttggaacagtatttattataaatagaagtcttgtgtaggataagtagaagtatttggttttttttattttttattttgagatggagtctgctctgttgcccaggctggtgtgcagttgcgcgaccttggctcactgcaacctctgcctcccgggttcaaggatttctcctgcctcagcctcccaagtagctgggactacaggtgtgcaccaccacgcctggccaatttttgtatttttagtagagacagtgtttcaccatgttagccaggctggtctcgaactcctgacctcaagtgatacacccaccttggcctcccagagtgctgggattgcaggtgtgagccaccgcgcctagcaagaagtatttatttttactaataaagctttaatttaggtgataaaaaagaaaaaagccttatttctatttttggccaaaagttgtattatttatctgtatagcaatgcatacatcttccaatatatgcacaactaactgttaggaaggtgtaagataatcatattaaacaagtactgtgtatatatatatatatatatatatatatatatatagccacttctcaagagaaagcaatagaaatctgattttcacatttttgtttgtgtttaaggtgagttcttcttaaaaggataaaggagttaaaatattagaaactgcacttgtttgtgaatgaaatttgaatttaaaaatggtgttatatgatataatttaagctttgatattaaaactggcttgtcaccacttctatttttttttttctagctatggaagattaagtcatgacaattcaaagaaaagaagatgtagcctcttttccagaataagagtactgactaagctgcctgaaagcttgtcactgattctttgcttcaggagtctcagctagggagttgaagtgtttacatcagactgtcttgtgcaattcttatatttattttactggttcacttttttttacatttattttagtctttatatttttatttttaagcattgatgtacttagttgttgaaagggtgatgaaactgatatccagatacttgagatcctggtaattggtcataaataattggcaaaataacaaattgtgaaaatagaagccattgctcagcaccgtttctccatcaatgccgtgaacttgccttacttgaggaaaaattctttaactttggaatattgcattgaactcagctatacacataaaacattttctttggtaaatcaagatccagtcagggtttctcttgaattattttggaacaatgccaggatccaaactgattaagttacagtttaagcacccttcagtattaatatatacggtattatataacaggtcaacaagtgctctttgatgataaaacttgtaatagagcaataattgtaaatggttaccatactgtaagatattttgataaaaattaactagtaatacttgtatttatttgaaacactgggctgtttgcacagctccaactgtgcatgctcaaaatgtgcactttttaaaattgttacttttaatgcgtatctttatatgggatctgttatagtatactagggcatgatatggtatccttttgagtgaggtatatactcatctcacaagtgaagtgcctactgatattactaaagtacattatgtttactcaagtaaataattttctccccatggtacactctagtgtaggctattcataccacactgaaatgaacaactgaagaataaggctaagaaccaataaaatatttctctaattgctagttgtaaaactgtatccaaattttcagaaaagacagcttcagcttgcaaattctatcctctaaacttatctggtgcattctccccaccccacccccattatataagggctattttagatgcttttaacctccccaacaaataatttgccaagtgtccaatgagaacttatcatgttggtgtgttaggtaaatcgggcaaatatgatagtgtcttacattgggccttgattttaagttgttatatttgtacaatcgagtattttagaaattacatgaaacatgaaacagtttttgcaattttttttaaactgggcatctggtttctaaaaatttatttgaaacaatctagaattttcttggtgcaaagtgtatcatgtggaatatcctcatatttttaccatattttaagaactttaagacgattaattgtaaataatttatttgattggtgcagttctaatccctaaatcataatcttaaaatcaggaatgtgtggagaacagagccatgtcatatcactttgctcttaccattccttttgatcagcctcaattcagcctcattgtgtagtatgttttttctttctatgaaaaacaacagaaagcatttcattttatttgcctatgttcaaatatgtttaataatgaccaaagtgcattctgagttttttcaaggaatgtaatactggagctttaagaacatacttagtttctcatgtgaaaacttaggctttgtctgatgtttttccttcctctattgtctaatgttgaggttgtttttaggaattatgttttataaactttttcaatataaggtacatgcctatacagaacttaacattttgcacagaatatatcaaatatattttgagaaaaaaagtacggcatgagttctgttaggaataaaagatgaaactattgtatctcacaaaaaatcttatttcagaatggaaatatttttgagaaaagtagctgagtatactggtttaagaaaatgcttgttttagattgaggttaacttagagttgggagttgatttattaagtacagtatacctctcaacagtttataaataatatgttgaattatgtcagtgtgggcagcagtagaatactaaaaggaaaatgtcatgttaagcaatttcagaacattaactgaactattttcaaagcagaaaaattgacattgctgcctttaagaataccatgaatgtaagaaattgaaagaaattgtaaaatatcacataatatagaaatggcagttcaaagagaattgtggcagatgttgtgtgtgaactgttgtttctttgccacatgtgttgtatttgaaagttttacagtaagtttaaaataaaacattctgtgac

SEQ ID NO: 80 - DNA, 8408 bp, Homo sapiens
ggctggactcagggcggtttgaaagatcggcgcgcaccgcaggagcaacggttggtcctgcggctgtgatgtcggtgttgaggcccctggacaagctgcccggcctgaacacggccaccatcttggtaggtgcaggcggccctgcttcccccgccggtttttcctcctgggcggtgcttcagccactaggtcaactgagctctctgaggcgccaagccagcgcgcgctaccgtggcgggggcggggaataggcggagagccatgctctgaaccaattggagtagccgctctctgaggttgagggacgcacccaccaataggtgctcggcggaccctttcccagcttctgattggcgagttcccgcgcctggaattggttttcccgcgtctgggggtctggcctcctggagaggccggcggtgggagcgagggtcgggtagtagagagtgcggtgcccacaggcctgcagcgggtccaaacctcaggcccccagcccgtgccgcttcgcggggtccacttctcgggaaatgtcctccgagccgcctgctggcggtgtcccgatccccccgggagtgggtcgaagggccaggccctccccagggggtgctgtgcctagggctcgactgtccgctctctctccctgcgcagctggtgggcacggaggatgctcttctgcagcagctggcggactcgatgctcaaagaggactgcgcctccgagctgaaggtgtaagtagccgcggctgtggcctgggcccacgtgtctctcactccagagggattcggtcctagctgctaaactccgaagcccagcgccccctcctctgaggctggtccttctcccagcatgcagcgtagctggctagtcccatgccgtcttatatcccaacctccccttgccgaggtggtgactaaacagagcccgtttctggcagagggaatcagacaggagtaatctgaataggaccggacctgtcctgcctctgtgctggcccaaggagtcgtggccacaagagcctcgggtggctaggatgaggtggggagcccttgacggcctctttccacatgaagggcagcatttaaacggtcgctatgaggggggtacggatatcttgagtcctgcaatttcctgtttttcagccacttggcaaagtccctccctttgccctccagtgtgaatcggccccgaattgacctgatcgtgtttgtggttaatcttcacagcaaatacaggtgagagccagaggaaggggcagtcagggctcaggcaggcctggctcaggactgtgctgagacggtgacctaacttgtgatgggaagtggtgaggatgggagaggctggctgaggtcaatctgtaaggtgaggagagaggagccagtggtcagtgcacaatgtttaaaatacacaacggccgggcacaatggctcacacctgtaatcccagcactttgggaggccaaggtgggcagattgcccgagaccagcctgggcaacatggtgaaaccccgtctctactaaaatacaaaaattagccaggcgtggtggcatgtacctgtagtcccagctactcgggaggctgaggcaggagaatcatttgaacccaggaggcagaggttgcagtgagccaagatcgcgctactgcactccagcctgggcaacaaagtgaaactccatctaaaaaaaaaaaaaaaaaaaaaattaaaggacaaatatttctccagagaaagtcaccctcttgtcattctctggcctctaggatcagagaagcaaggacttctgctttctccgttgtaaagttttgttctctggtttgttttctcaccctggcctggccaccccagtctccagaacacagaggagtccctgcgccatgtggatgccagcttcttcttggggaaggtgtgtttcctcgccacaggtggtaagtacgttcctcgcctgttactgcccacccccagccaagggaaagctggggcggccgtaggcttcttgctgaggcaccctgggtgatggaaagagcatgtattttacacacactggggcctatcggagggtggagggcaggaagaaggagaagatctggaaaaataactaatgggtactaggcttaatacctgggtgacaatgatctgtacaacaaaccccatgacacaagttttaactacataacaaatctgcacatgtacccctgaacttaaaataaaagttaaatttaaaaaccgaaagaacacatatacacatactttggaatctgacctgttgtcagcctttctaagagtgaatatgagcagataactctgccattacttggagttgcctagtggttgcctgtggctttcggtaaaatccaaactctaaagacataaaacactttgcagtttggcctctgccttctgagctagtctcatctccggtgactctccttctctgggtcagcttatcgttctctgaaaaagtcctgctgttcctgagactttgtaatattaacagtgaaaataataatggctgacatcttttgagctgtcactgtgaggcagacacggtaattgctttgttttcatattcctattggaggtaggtgttattacctctgttttacagtcatgaggttaagttgccccaggcccctagatgaaaagtggtagagccaaggtttacacctaggtaagtcctgttacagggcccgtcccttttttttttttttttttttgagacggagtctcgctcagccgcccaggctggagtgctatggcgtgatctcagctcaccgcaaccaccgtctccctggttcaagcaattctcccatctcagcctcccgagtagctgggattacaggcacccgccatcatgcccagctaatttttgtattttagtagagatggggtttcaccatgttggccaggctggtcttgaactcctgacctcaggtatccgcctgcctcagatagtgctgggattacaggcctgagccaccgcacccggccgtcctctttttgtttactctaggcttctgtcaaatacatttcctcttctttgtcttgctaacccctacaaatacctcaaaactcagccccagtgtcactccggcatgcatgaggtgtctgacctgtctgccttcccagctgaactgttagctccttgagcagagtgcctggcacagataattctcaagaagcattggtgagcaaatgcaggccaagtaatttctagatgtcaactcactgactctagagtgactcagtggggtaggagctattattatcttcattgtctaatttgatattcttgactacctagaaaagaaagtagaataggactgtcaccctcgcgactagaaagaaactgagccccagagtggggaagtgagtgactctgcccagcacttcctgaattccagccaggaaggtagagattgcagctatagcactcatggcttctttccagctgggcgggagagccactgcagcattcaccggcacaccgtggtgaagctggcccacacctatcaaagccccctgctctactgtgacctggaggtgagcatgctgatcacagagaccaacactatactcgggtgcggggaaagggtggtcagcacacagtgggcacattgggaatgcttatcgaaggacttagtatccgagcgaggcagctcctgaaggggagggagacacaggatcctggtttgagtggcttttctactcactggctatgacctgggcaggtcaccctgagccttggggtacacaggtgtgaagtgaggatgatgtgctttcatctggagtgcatcttatatgccaggctctagcacgtgctgccctgcttttgcttttgctgagtttctgcatactcagttataactaagtcttatgtgtatgtatttgtgagtccactctcctgctggggtgtaagtgattgtgaggccaagcgtatgtccgtctctttaactggtgcatccttgtgtcctctgggagtcagaatgcctgatttccccttaactctctgatttcagatcttgtctcgtcccaccccaagctagggtacccagcaggcaatagggatgtttgttgggtaggtgggtagatggttggatgcatatgtagggaattctgccccaactggatcctgttggtgtttctcacaaggtgaaactaaccacgaggggtaggaaagtagcctttttgttgttgttgttgttgtcgttattgttttagataaggtcttgctctgttgcccaggctggattgcagtggtgtactcatggctcactgcagacttgagctcctgggctcaagtgaacctcccacctcagcctactgagtaactaggactacaagcatgcaccaccgcacctagctaagtatttatttatttatttactttttttttttttttgagatggagtcttgctctgttgtccaggctggaatgcagtggcgcgatctcggctcactgcaagctctgcctcccgagttcacgccattctcctgcctcagcctcccaagtagctgggactaccggcacccaccaccacgcccagctaattttttgtattttttagtagagacggggtttcaccgtgttagccaggatggtctcaatctcctgacctcgtgatccgcccgcctcggcttcccaaagtgctgggattacaggcatgagccactgcacccggccactgtttatttactttttaatatagcgatgaggtcttgctgtgttccccacactggttttgaactcctggcctcaagcgatcctcccactttagcctcccaaagtgctgggattacaggagcgagccacggagcctggcctttagccgctttttatgcaggataaatcctgatgactttttgctaaagaggcctcagcaggagttgatgtgctccccgcgatgggtctactgaggggtcccagggcccgcactgccacacccatgtgccaggcctgctccattcctttggaaacctgtttattggttttgagatacatttcgaagagttgtgtttctgctctgttctgggtcttgtgcctgttaccgaaagcaaagtgatgaaatgcagggagaaccgagtcagcacatgatctgtgaccaccaatccatcaccactgtctagaccagggtcccttatcctggtgtcagggcactcctctggtctaagggcagaattcagaggatagcagtctgtggctgtcgccagtagaaatggggatgttttcatatcacattaggattgggcaggtctcatcactgtctcatgtggcagcagccattaggcctgccccttgctcgatgcatcgatcatgatacacacttgactctatcacgcatttgatttcctagttgatgactactttttgagcccctgaccagatcagcactctgatctcacagatgggaccctgaggcctgggcacacctgaagtgcctgccccgccaggctttcctcccagagagaacaggcgacttgctcagggtcagacagctcgtgagtgaggggtagagccagctgttctgctgtcctagcctgctgaccgtgtgactttgaataggtcactttgtctgccacgaagcatctctaaaggggagtcacgatctttgctccatagttcaggtgctggtgggggacagtggtgcctactcaccctgtgacaagtggtgtaattctgtctgtggccatgaggtggcaggccaggccaggtcctgggttctctcttggcctgggcaggaagcaggaggtcccagcctggttcccgccgcagcaggagctgcagaaatgcctgctcaggacataggcctgcatccctcagatggagcacccagggtttgaactggcctccttcttcatgctggtgttgtcctcttcagaacactcttctgcataattgagtttaagccccaccatatatcttgaggcctttgcgtggcaggaattaccggccccgttccattgatgaggaaacacaggaaggtatgtgattggcccagtgaaataattgcctaggtctgctggtagggctctgtgctgggccctgggaacacaaatgagtcagatattggccctgccctctcagaatctcatgaaataagcagacatgtaacataagcaacagcagaaggatttgctgagctctgggagcctggtggtagaattaggtcatttcttcttggatgtcatgagcaaagtcatgattgtggtcagacctgggcatttgggtcacgtctctggagtgatgtggattggaggaagcctggccagaggcaggaggctgggtcgaggctgctgcaggaggcaggttgtggaacccaagcctcagcagcctagagatagatttcaggaacaaaggccaccaaacttagaggacttattaaaaaaatacttcctgagtttctgtggtaccgaccactgttctaggctccagggacacagcacagaacaaaagagtcaaaaaccccagcttcctgctgggcacggtagctcacacctgtaatcctagggaggccgaggtggaaggatcacctgaggtcaggagtttgagaccagcctggccaacatggtgaaacccagtctttactaaaaatacagaaattagctgggcatggtggcacacacctgtaatcccagctactcagggggctgaagcacaagaatcgcttgaacctgggaggcagagattgcagtgagccaagatggtgccactgcactccagcctgggtgacaaagcgagactctgtctcaaaacaaaacaaaaaaagccccagctttgttctagtcaaggaaacaaatggggtaaatgacgtgctggaaagtggaggcgtggcgtgtcaggtggtggtaaacaggcaagagttaggcagggtaaccagggaacgcccctgcaaacaggacttctaaataaataaagacctgaaggaagtaggcaggcaggccacggagatacctcgtggaaggaggaacagcaagtgcatgggccgagtgtgggacttgcctggtgtgctcaaggtctggcaggcaggcctgggtggctgcagcacaatagcaaagggcgggttggggtggagaaatcaggaatggtggggctggatcagtggagcctggtggggagctgctggagggcttggggccagggagggatgtggcctgacttgggttttaaatggacccctctggctgccgggaggagagtggactgaagggaaactagggcagaaatagagagacaggtctggaggctctttctttctttctttctttctttctttttctttctttctttctttctttctttctttctttctttttctttctttctttctttctttttctttctttttctttctttttctttctttttctttcttttttgagacagacactgggcagcatcgtgttcttccagcggacgtgtctagaacatctgtgcccgggcctagagcagtcttgtccctctctggccccacagctcccctgggcccattcctttttgatggcaccttcttatctgtggtgagggccacccgctgcccctccctccttcctatccctgtatcttctgctccctggtcttgagcatctggggcccgagctgcctgggcattggttggaagtagccctgattcagagctcagctctggagtcactagctgggtgaccctagacagtttgttcgacctagccagccttgttaagccttcatttcctcttgagcaggaggtcaggctctggatgtctccggaggttgtttgaaggattgggcaagctgaggcagttggaagctactctgaggtgtggcatgaatgagggcgtggctgtggtgggcagtggtgacctgagctacccccaagtatccgcccccagccctgctctggcagcccctgcagctgctctgggtaagggagcagggccagcattctatctcactgctgttctctgctctccccgcaggtggaaggctttagggccaccatggcgcagcgcctggtgcgcgtgctgcagatctgtgctggccacgtgcccggtgtctcagctctgaacctgctgtccctgctgagaagctctgagggcccctccctggaggacctgtgagggtggctggcccctgggctgccccttctcatggcttcgtgctgactccataaacattctctgttgaggatgtccagtcagggcttgacaggcccaggctcagcccgccgtggctgggaaggttccctgcagtgccagtgctgcagcagggagagctgggcagaagcagcgagggggcccagctggcgagactgtagccccctcccactcccacactcactcttgcagagcctgtgtctttaagcagctggcgtgttacatctccatttaaggtttcctttgaacaaaaggtctgtggctaaaaaaagtttaaaaatca

SEQ ID NO: 81 - DNA, 7891 bp, Homo sapiens
caaggcgcagccaatgggaagggtcggaggcatggcacagccaatgggaagggccggggcaccaaagccaatgggaagggccgggagcgcgcggcgcgggagatttaaaggctgctggagtgaggggtcgcccgtgcaccctgtcccagccgtcctgtcctggctgctcgctctgcttcgctgcgcctccactatgctctccctccgtgtcccgctcgcgcccatcacggacccgcagcagctgcagctctcgccgctgaaggggctcagcttggtcgacaaggagaacacggtgagcccgcggggagggcgctgcgggcaggggagggaggcagggaaagcgaagccgctcctcactcacacgcgtctccccgcagccgccggccctgagcgggacccgcgtcctggccagcaagaccgcgaggaggatcttccaggagcccacggagccggtgagtggcgggcgtggggcagaggggccagggacggccttgggcgtcttggcgccaaagccgcattgtttcctcagctgttcacactcccgccccggctcctttcccgcctaggcggcccctccccagggctgcctcccgcgcccctcggcccatttcccggttcgggcgtgcgctcctctgctgcgacccacggagtgcgacgggacagccacgttttcacatcgggccccgtgaaattgccgccaatggaaaggacttggtccagaaaaacgttagtttcatatggttcgcccggtacttaaatgttttattttctcccccaacagaaaactaaagcagctgcccccggcgtggaggatgagccgctgctgagagaaaacccccgccgctttgtcatcttccccatcgagtaccatgatatctggcagatgtataagaaggcagaggcttccttttggaccgccgaggaggtaatcggaggaccccagaagacccctgcaggggtgaccgtcacgcctcagacataaatgcacttggaggttcccgttggcaaggggggctaactgtggggcatagtaagtggtgccagcatacttaaagtttgagtgctcagtgtgagtcctgtaggctttactctcttccttttatgctaaaattgtgacttccgaacctcaggtggacctctccaaggacattcagcactgggaatccctgaaacccgaggagagatattttatatcccatgttctggctttctttgcagcaagcgatggcatagtaaatgaaaacttggtgagtttccaaaacatctttcattcatttgacgttgacgatctgaggtcgaactagttcgctttcctcgtcttgtatgtttttccatgctgagtgcatctgtgtgtgtaagctgggttttatattacatggcatttcctgttttgtaacactttgcagttctttcttatggtattttcccgactctagagaagctgagacaatattaagtggtagcaatgtgatgactctttgtggccaccacatctgccccctctttttttttttttttttgagacagagtctcactctggcccaggctggagtgcagtggtgtgatcttggctcactgcaacctccgcctcctgggttcaagcgattccccaacctcagcctcatgagtacctgggattacagacgtgcgccaccatgcctagctaatatctgtatttttagtagagacagggttttaccatgttggccaggctggtctcgaactgctgacctcaggtgatccacccaccttggcctcccaaagtgttgggattacaggcgtgagccaccacgcccggctctgctccctcctttttgtggctttgctgttttaataataatttggttgtatctcttattgcgaatggatctttcttgacataaattaattaggaaatcgagcgctcacaaatcctattttatatgtatctatttcctgatatgtaagttgagcatatgacataaaatatcaaagaattgtgacaaattggatgaaatatatatagaaataaaccttataatggtacaaagagtgcgatgctgccagtatccgttgacagttgctgctgttggttttttctcaagcttaactttgatgtgttttgccactaggtggagcgatttagccaagaagttcagattacagaagcccgctgtttctatggcttccaaattgccatggaaaacatacattctgaaatgtatagtcttcttattgacacttacataaaagatcccaaagaaaggtgagtattcaagtggtatgccaagatttttaggactcactaattgttgatttattacacatttttagttcacctagggataaaaatgactccagaatgactaagacagtcataggcattcccagcacccgtggtcatgtctgctcttagcaaggggcctaaatgcactttattattcacttagagttgtgaaggtactccttttaaagttggatgtctaccaatgtaaaaccttcttttgaaaaaattcctagatgttgggtaagacaaactaaaacctatgtctgaccatctttgctcatttggtaaagttgttgagaagctagaatgtggggctgcagtgggatggacggggaggacttgcctcctaagaagcctgcagtatagtataggcaaataagacttagtaggagttacataaggcagaggcagcagtgaaccctgagactgatttaggcatgcaggagtttggctgaataaaggtagcttaaggtctgttttgttttggagattggaggtggggggattagaaatgggctgctggagtagtctagatacaaaggtcagctttagggtggcgcgcggtggttctcgcctgtaatcccagcactttgggaggctgaagcgggcggacaatgaggtcaggagatcgagaccatcctggctaacacggtgaaaccccgtctctactaaaaataaaaaaagtggtggcgggcgcctgtagtcccagctgcttgggaggctgagacaggagaatggcgtgaacccgggaggcggagcttgcgctccagcctgggtgacagagcaagactccgtctcaaaaagcaaaaccaagcaaaaaaaacaaaggtcagctttggggaccagaaccttgtatggagtggaagtggtgaagctgcaacctaaagtagccgttgtagactttgaagtacatgaagaggaaaagtggtaacttgaaaggactgaggaaacattgggagtaaagagatttgaacatgtttataggtggaaattgagaaaagaaggcaaagattaggggtacgatcgggggcaaatgcccagaaggggaacaggaaggtctgctggggaagcctcaaaaacaagggagaggcagacccaggtctcagagagagggacagtgagatggaaagaatgaacgacagctgggcatggtagtctgagctagtagtcccagctacttggcaggctgaggcagaaggatggcttgagccctggagtttggttttaccgtgagctgtgatcatctcgctgcactctagcctgggcaacagagtgagaccctcatctctttaaaaaaaaaaaaaaaaaaaaaaaaaaaaaagctgcccaatgtctggtgcccttggcttcagaacacaaagtcatctgggtaggaacagtctgggaaatgagtagcctctcaaggtgggcaccagaataaagggaggcagaggagggtggtaagggagatccagttaactgtagtacccatggatttgctttcctgacctgggatcgacagtgtagcacagagtcctagtaggaagcaatcttagtttattggtttaattattttatgatataggtgtggcaactgaggccaaataatgcacctaatcatagtctgataatagcacagcagttaggattttatggttcttcaaatttaaattctatgattcttcaaattgaacaatgatctggacttgaaataattttaaaggcaacaaatgtccctgctgtactggactatgttttactgtctgtagaccctgaagctcaatatgaactacagaatacccaaacttgtattaatgtaaatcaagtgttgaggtttttaaaagaacactggagggaaaaactgaccagtaaaaataaaacatttcggtgtgagttcttcctttaggaagaggattggcaaatacttgaatttggcctttgtcccagagctcttatctagcagttggtaatcggaggtcttttactgtaatgcttcaattgctgataccgtatgtgcctactagggaatttctcttcaatgccattgaaacgatgccttgtgtcaagaagaaggcagactgggccttgcgctggattggggacaaagaggctacctatggtaaggagacccttgcccctacttaaacctgagcttcattttccaagtaatgttactggatttttggcccttgaataccaactcactagaatcatgttggtgttaactcctaaataggtgaacgtgttgtagcctttgctgcagtggaaggcattttcttttccggttcttttgcgtcgatattctggctcaagaaacgaggactgatgcctggcctcacattttctaatgaacttattagcagagatgaggtgagtctaagtcaaataatagggtgacctaaaccccaaacacaactcgggcatgctcttgtgttcactgacggggacctgagatgctagatggcatatatccacatttaatgtgtgagttcaaccatacacatacttgacaaaagaaggaaatactttcatttactgaaactgttttacttgcattctcaatatattgtaatacatttgtacatatgtattcccctataggctttgaatgcataaaactacaagttctttgttttttgaggtgacggaatcttgctctgtcgttccaggctggagtgcaatggcgtgatcttggctcactgcaacctctgcctcctaggttcaagtgattctcccgcctcagcctcccaagtagctgggattgtaggtgcctgccaccatgcccagctaattttcgtctttttatacagacggggtttcaccatgtttgccagactggggttgaactcctgacctcaggtgatcaggtgatccacccgcctcggcctcccagagtgctgggattataggcatgagccaccatgcccagccaaaactacaagttattgatgggattgggattttaagggatgttttattatttttgcctggtattaatatgttatccctttttccgtaaaaatgttcatagtagagccaggagcggtggctcatgcctgtaatcccagcactttggtaggccgaggcgggtggatcatgaggtcaggagattgagaccatcctggctaacacggtgaaaccccatctctactaaaaatacaaaaaattagccgggtatggtggacgtgcctattgtcccagctacttgagaggctgaggtaggagaatcgcctgaacctgggaggtggaggttgcagtgagtcaagatcacaccactgcactccagcctgggtgacagtccccccgaaaaagaatgttcatagtagccattatgtttctcctgtttgatctagaaattgcccctctacttcaatattaataagcatttcaatgaaatgagtatacattttggtctagtgtatgtctttgattaagtcacatttgaaaagccaggagcatgaactccatcttacttggagcccagtgggcaaatcaaatatggttaccttgtaggagggccttccttactggattgggagataagctgtgaagcttgatgtttaatgcagtaacttgcaaacttgatttacttgaaattgcatacaaatttcctgagcatctaaaaactagccttattactgagctttgcctttcctgctgggagtagtggcaaaattagcactcatggctgtagaaagatcactgagtgaagctctgactcctcctttgccaacacacagcagagcaagaaatacaccttgcctgtcttcatctaggtggcaactttgagggtcttgaatgggactgagcttgccttggtagtgacatcagcagagaagtcagtagttgaagtcatcttccctttgagagttcaagtgctctcagtatggctgagcatgttggataaggagaatgcagaaaaggacaaagtaatttcatattccatgttaatgacagaagtcttctggctttagtgatcttgaacttttttttctagggtttacactgtgattttgcttgcctgatgttcaaacacctggtacacaaaccatcggaggagagagtaagagaaataattatcaatgctgttcggatagaacaggtaaagtgggtgatgaaatgggtcactcaagcttgctagaaaatgcctgtgctttagttgtattcagaagctgtattttggttcctaggagttcctcactgaggccttgcctgtgaagctcattgggatgaattgcactctaatgaagcaatacattgagtttgtggcagacagacttatgctggaactgggttttagcaaggtaaagtattgtttacatagccttttgcttgttttgaagctggtgctctgtatttatatcttgatgtgaaccttttcaggttttcagagtagagaacccatttgactttatggagaatatttcactggaaggaaagactaacttctttgagaagagagtaggcgagtatcagaggatgggagtgatgtcaagtccaacagagaattcttttaccttggatgctgacttctaaatgaactgaagatgtgcccttacttggctgattttttttttccatctcataagaaaaatcagctgaagtgttaccaactagccacaccatgaattgtccgtaatgttcattaacagcatctttaaaactgtgtagctacctcacaaccagtcctgtctgtttatagtgctggtagtatcaccttttgccagaaggcctggctggctgtgacttaccatagcagtgacaatggcagtcttggctttaaagtgaggggtgaccctttagtgagcttagcacagcgggattaaacagtcctttaaccagcacagccagttaaaagatgcagcctcactgcttcaacgcagattttaatgtttacttaaatataaacctggcactttacaaacaaataaacattgtttgtactcacaaggcgataatagcttgatttatttggtttctacaccaaatacattctcctgaccactaatgggagccaattcacaattcactaagtgactaaagtaagttaaacttgtgtagactaagcatgtaatttttaagttttattttaatgaattaaaatatttgttaaccaactttaaagtcagtcctgtgtatacctagatattagtcagttggtgccagatagaagacaggttgtgtttttatcctgtggcttgtgtagtgtcctgggattctctgccccctctgagtagagtgttgtgggataaaggaatctctcagggcaaggagcttcttaagttaaatcactagaaatttaggggtgatctgggccttcatatgtgtgagaagccgtttcattttatttctcactgtattttcctcaacgtctggttgatgagaaaaaattcttgaagagttttcatatgtgggagctaaggtagtattgtaaaatttcaagtcatccttaaacaaaatgatccacctaagatcttgcccctgttaagtggtgaaatcaactagaggtggttcctacaagttgttcattctagttttgtttggtgtaagtaggttgtgtgagttaattcatttatatttactatgtctgttaaatcagaaattttttattatctatgttcttctagattttacctgtagttcata

SEQ ID NO: 82 - DNA, 17120 bp, Homo sapiens
ggaggccggctatttgaaggcggcgcgcggactaggtgcgcacttcagttctcggagagaagaggcgggagtggacctggtcagccctaccccactgaccccaccggacccaggcgcggcctccgccacagccacagcccctgcccctgctgcggcgcggcgaggcgaggcgatggccaaggtgtcggtgctgaacgtggcggtcctggagaacccgagccctttccacagccccttccggttcgagatcagcttcgagtgcagtgaagccctggcggacggtgaggctgggcctgtgcggggacccccacccccgggccgaccccggcctcccctcagagaaccgctcccatggccaacttgatctcccccatgaaacccctcgtcccccttccgccaaccccgatctcccccagcccgccagtcaaccggatctcccggtggagaccccccgccaccagccaacacggacctccccgtgacctcctcccccactgcccgccttgacctcccgggtggagaccccccgccagctaactcggacctcccagtggcctcttcccccactgcccgccccgacctccccatagagattaaccccctccaagccccatttcccgcgtggggaacctcatccatcttttttctctggagctcttcctaggtacccgttttcatggggagaccttctcggcctccatttcttaacccacggagatcttcagccaccgtggtttccctgtggcaagacccccgcttcaaccacccacccatttttgcccacttattccctctttcctgtagtgagatactcacacctcccattttccctctggagacccccaatatccagccccttcccattttccccgggggaaatcccagccatctcctattttccctatggagacctctcacccaagctcctctctccttgccgtgaagaccctcccctccagtaacctttttttcctgtgaaaacccctcaaccccttttcaggacctctctcaaccccatcttcccatttgtgtcccaccagtcccctccccaacctgccaatatttcaataaccccacgcccaccagttgctgccgcttttctgccccaatgcacataccctggaacctggtttctctccttcgttggggcccaacccccctatgcttgagctctccctgggaaaggatgctaccgtctttgaggggaactttgtctccccagctccccttccccacctttctctgtgggcttggataaacacactgagatccgaggggtggcatagccaggcaggcattagctagttctccaggtttgcccacccgtttccagctgagttactgcagcaatttttctgtcactttttctttcttcttcttcctcttcttttttttttttttttttttgagacagtctcactctgttgcccaggctggagtgcaatggcacgatctcggctcactgcaacctccacctcccgagttcaagcgattcttctgcctcagcctcccgagtagctgggactacaggcgcctgtcaccacgcccagctaattttagtatttttagtggaggcagcgtttcaccatgttagccaggttggtctcgaactcctgacctcaagtgatccacccgccttggcctcccaaagtgctgggattacaggcgtgagccaccgtgccccgtcttcttcttttttttttttaatatagctggataatcagtgccaagctcccgttgcttttgatggtctgacctagtctggggggtgggtggattgggctgagctgtgacgggctccagcttcaaacagtcggctggagcttggaggtcacagcctcctgtacatcttttccaaggtgcttccgtagatgtacttattaatctgtgtgacttaaaggtgggcatggctctcatctcacagatgagaagacaggagccacaaaacgcaaaagacctttcaagtcaaggcctgtacaaatccaaaatctaaggtcacctagggagccttggcaccactaacaggcaagtcctgctttcaggaagaagtactccattaggccatttttctacttggtggttgaaagagaaaaggcagcagccgaggaggtggtgatctgggggcctgtgaagccaggatatgctaactagtgcctctcgggggcaggtaggtgttttgccctcaaagctggtcgcctggactagcttggagctgatagagtgagatgtggatgtgctttgggtaggccagtgggtctgtctctccccggtctctctcgctcctttttaaattaaggagtctacttgtggctaactatagaatatgccgagttaaatcctttctggaacaaggcagcgggtaaataaataaataaagtgtagaatgacgctgtggaataagatttaatttaaaagccaggaggagatggaaggaagtaataggttgagggattcccagctccccgacggcaggagatcaggtttcaatcagcctgtttgtgttccttgcatttaaaaatggttgtggccgagcgcggtggctcacgcctgtaatcccagcactttgggaggccgaggcgggcggatcacgaggtcaggagatcgagaccatcctggctaacacggtgaaaccccgtctctactaaaaaacacaaaaaattagccgggcgtggtggcgggcgcctgtagtcccagctacgcgggaggctgaggcaggagaatggcgtgaacccgggaggcggagcttgcagtgagccgagatcgcgccactgcactccagcctgggcgacagagcgagactccgtctcaaaaaaaaaaaaaaaaaaaaaaaatggttgtgcggtcattatctggtacttctactcctaggaagcccctgccctgtgactttactaacttatttatagaattagagccggaagggctaaattcaacctgctggtcctttttttgtttttttggagatgaagtcttgctcttgtcccccaggctggagtgcaatggcgcgatcttggctcactgcaacctccacctcccagattcaagcgattctcctgcctcagcctcccgagcagctgggattacaggtgcctgctatgacgcctggctaatttttgtatttttagtagagacggggtttcaccatcttggccaggctggtcttgaactcctgacctcaggtgatccgcccgcctcagcctcccaaagtgctgggattacaggcgtgagccactgcgtccagcctctgctgatcattttttaatagaaatggagtgacttcaccagagtcacacagccagtttgtagaagtattggcactgaagttttgaatctaaattctttatctttgctccaatccagggaaagaaaggaaggattccctgtttcaggggtggagcatagataggaatgaccacagaatttattgcctaatcaggacactcaaaatgcagtgaagggaagtgctattattattatttatttatttatttatttatttatttatttttgagatggagtctcgctgtgtcacccaggctggagtgcagtggcgtgatcatggctcattgcaagctccgcctcccgggttcacgccattctcctgcctcaatctcccaagtagctgggactacaggcgcccgaaaccatgcccagctaactttttggatttttagtagagacggggtttcactgtgttacccaggatggtctcgatttcctgaccttgtgatccgcccgcctcggcctgggattacaggcgtgagccaccgtgcccgtcgtatgattatgatgatgatgatgattattattagaaatggaatctcactatgtcacccaggctacagtgcagtggtgcaatctcagctcactgcaatctccacctctcgagttcaagcgattctccggcctcagtatcccaagtagttgggattacaagcttgagccaccatgcccggctaatttttgtgtctttagtagagacgaggtttcaccatgttggccaggctggtctcaaacctgatcgcaagtgatatgcccacttcagcctcccaaagtgctgggattacactttgaatcctaagcgcctggccagagaatgctattgttaattgtacctggatgataaagcttttcctttgagtaactcaagtgagaaatcctggctcttccagtcctagggctctctgtgactgatctgccagcttgctttctgcctccttctggactcctctccatgaaaaagggagaatctgcctcactctcagcagcgtcaactgaaaatctgacaaaacccccaacccagctgtgtgaggtggctcatgcctgtaattccagcactttgggaggctaaggaaggaggatctcttgagcccaggaatttgggccagcctgggtaacatagcaaaaccttgtctctacagaaacatcaaaaaattaacgggacttggtggcacgtgtctgtggtcccagctactcaggaggctgaagtgggaggattgcatgagcccaggaggtcagggctgcagtgagccatgattgcaccactgcactccaacctgggtgagagagcaagacccccatctcaaaaaaaaaaaaaaaaaaaaccaccctaacccctaagccccagttgggtgacccctatttctcaggggccccaagccccctttgcacttttatcttccacatctggaaatagattcttccacatttagctgagaaattcaacagacactggttgaataagtcatagaagccagatgttctgacccagaaataacgaagttgttatggcagcagagctcatctttgattatgaacaaaggcaaaaagcaaacaaacaaaggaggcctggcatggtggctcacgcctgtaatcccagcactttgggagaccaaggcgggcagattacctgaggtcagaagttcgagaccagcctggccaacatggtgaaaccccgtctctactaaaaatacaaaaaattagccgggtgtggtggcgggcgcctgtagtcccagctactcgggaggctgaggcaggagaatggcgtgaacccaggaggcagagcttgcagcgagccgagattgcaccactgcaccccaacctgggcaacaaagcaagactccatctcaaaaaaaaaaaaaaagaaaaagccaggtgtggtggctcacacctgtaatcccagcactttgggaggccgaggcggatggatcacaaggtcaggagttcgagaccagcctaaccgacgtggtgaaaccccggctctactaaatacaaaaattagccaggcatggtggcacgcagctataatcccagctactcaggaggctgaggcagaagaatcgctagaacccgggaggcagaggttgcagtgagctgagattgtgccactgcactccaacctgggtgacagagcgagactctgtttcaaaaaaaaaaaaagaaaaaaaaaatggccaggcacagtggcttacccctgtaatcccagcattttgggagaccaaggcaggtggatcatctgaggtcaggagtttgagaccagcctggccaatgtggtgaaaccctgtctctactaaaaatacaaaagttagccaggcttggtggcaggtgcctgtagtcccagctatttgggaggctgaggcaggagaagcgcttgaacccgggagatggaaattgcagtgagcccagattgcgccattgcactccagcctgggcgacagagcaagactgtctcaaaaaaacaacaacaaaaaagcaggaagcagactttttagctagttcagctatactaattgtgtacatgtctttagtcttatcatttatatatatatatatatatatatacacacaaacacacagtggaggtatgtcttgcacagggactagcttgtgaagttagcgcagagagataacatgggacacagttgagttgccttgacattgctcagaaggttaggtacacacgtcatgtgtacagctgtgtcctgtactcatagctatgagttcctgctgtattggtgatttgtgtcccatgtataattctaaagaaagattatatttagagatgaaatcatacacgtatgtctctacttataacactgcagccagatttttttttttttttttaaagagatagggtgtcactatgttgcccagactggacttgaactcctgggcttaagcagtcctcccacctcagcttcctaagtagctggaaccacaggtgcacatcaccatgcctgggcacttcagcaaatttaagatgattctcgactgggcatagtggctcatgcctgtaatcccagcactttgggaggccaaggcaggcggatcacaaggtcaggagatcgagaccatcttggctaacacagtgaaaccccgtctctactaaaaatagaaaaaaaaattagccgggcgtggtggggggtgcctgtagtcccagctgattaggaggctgaggcacaagaatggcatgaacccgggaggcggagcttgcagtgagccgagatcgtgccactgcactctagtctgggcaacagagtgagactccatgtcaaaataaaataaaataaattagaattacaggtgcacaccaccacgcccagctaattttttatatttttagtagagatggagtctcactctgtcacccaggctggagtgcagaggcacgatctcagttcactgcaacctcagcctcccgagtagctgagactacaggggcatgccaccacgcctggctaattttttgtattttttgtatcaccatgttgcccaggctgatctcgaacttctgagctcaagcaatccacccgcctcagcctcccaaagtgctaggattacagccatgatccaatgatccacctcacctggccctatacctataactctttttttcttcctttctttccttctttcttcttttttttttttttttttttttttttttttttgacggaggctggctctgttgcccaggctggagtgcagtggcaaaatctcggctcactgcaatctctgctgcctcccaggttcaagcagttcttatgcctcagactcctgagtagctggaattacaggtgcacaccatcatgcccagctaaatttttatatttttagtagagatggggtttcaccatgttgcccaggttggtctcgaactcgtgagctcaggcaatctgcctgcctcggcctcccaaagtgctaggattacaggtgtgagctgccgtgcccaaccagcttctgtaactcttgagtcagtatttctctacagccgttagttaattctccagtttctttccagccctggttgaaagagccatttcagcccctgtgcctgacagtcaacacagtacattttttctttttcttttttttcctttgagatagggtctctgtcgtccaggctggaatgcagtggctcgatcatggctcactgcagccctgaactcctaggctcaagcgatcctccaaccttagcctcccgcatagctgggaccaccggcacgcgccaccacacccaattaattttgttgatttttaatagagtcgagtctgcctatgttgcaggggcccatttatttcggtgagtttccacatgctctttgtttaggttttgccgattagtattgacctcagctggacaacatcaggtgctcgtgggtacactttagtcttttttgtctaccttcccaggacatgaattaaatgcacccgtacaggattctaccggctatgagaggaaagggctcaaggatatacaccaaaatgatacaactgctttagaaaggagagagcagggctggctggcttttctgtcttcccccaaaacttgattccagttgtgtcactacttgtaacaaaaataaatcaacaggctggacatgatggctcagacaaattccagcactttgggaggccaaggcgggaggattgcttgagaccaggctgggcaaccaagcaagacctcatctctaaaaacaatttaaaaattccctgggcgtgtggcacaagcctgtggtcccagctacttgggaggctaaggcaagagaatcacttgagcgcaggaatttgtggctgtagtgagctatgattatgccactgcactgcagcctgggtgacggaccgagaccccatctccagtgaaaaaagtcaacttcctccctgcaaatagtaagaggctagttcgaccaaacacctgtgagttcaatggtcacccgtatcctacagacctgctatagggttcctgagtgaaaccacaaagggacaggcagccagtgcatcaaagaagggcatggggctcaggtgacaagcctctgtagtcatgacctggcagcagcatgcttccaaagttggatgctcttgtgggacactggaccaaggaacagggcagcttctgagagagtttgcttcctgtgaaaatcacagcttgtgaaacttcccccagctgctagagctgaagggttgtgtaatttctaaagagccaaaaataagtttcaagcctcttgccaagcctccctgtaccagcatgaccttgcccctgatacacttggacctcctgcaagaggccatgttgaccggaatttcctgtgattgacagccagaggttccataagcactttcctttcatctcaatggagcatattcaggggagggggccctcctgctggatggggtgcaagagttagggtttgaggctgggcacggtggctcacacctgtaatcccagcactttgggaggcggaggcggatggatgacctgaggtcaggagttcgagaccaacctggccaacatggtgaaaccccatctctactaaaaatacaaaacattagccggctgtggtggcgggcgcctataatcccagctactcaggaggctgaggcaggagaatcacttgaacccgggaggcagaggttgcagtgagccgagatctcaccattgcactctagcctggacaacaagagtgaaactgtcaaaaaaaaaaagtgtttggaggatcaccccgggatgccacatttgttgactgagttgcccaaatgtctctaagtaggcatgacttggtgccagatctggaagaccagggtggctggctccctgagcaacctcaccttccccctcctgcaggctggctctcctgccggattggaatctgccaccctgccccagttgtcgagggatccacttcgttgagtggcaccggtccctgtgtgtgaaagaggatgctgcttcctatcccagcacccagtgggcagggccctgaaatgacccaactccctgccgttcccttctcagcacgtctgtgtcacgtggctcttaattcagcctctgccatacagttcacgctcaggccttgagaggcccaggtttccccagaggtatagtcaaggtcacctgtcatagctaggcttacaagacagaattccctaatggaggtagagctttgtgcccacctcagcattcaagactgcagtgcctggcactaagtgtctgacagatggaataatagtcttttaacatattaaggatctgtctaaaattaccacaaggctgggcacagcagcccacacctgtgatcccaacatggtgggagtccgaggcaggaggatcgcttgagcccaggaggttgaggctacagtgagccatgaacatcccgctgcacaccagcctaggcaacagagggagactgtctcaaaaaataagtaaataaaaataaaatagaagatgtggccgggcgcagtggctcacacctgtaatcccaccagtttggaaggctgaggcgggcagatcacttgaagtcaggagttggataccagcttggccaacatggtgaaaccccatctctactaaaaatacaaaaacaggccaggtacagtggctcacacctgtcatcccagcactttgggaggccaaggcgggtggatcacctgaggtcaggagttctaaaccagcctgatcaacatggtgaaaccctgtctctactaaaaataaaaaaattagccagccatgatggcaggtgcctgtaattccagctactcagtaggctgagacaggagaatcgcttgaacctgggaggcagagattgcagtgagccaagatcacaccattgtactccaacctgggtgacaagagtgaaactccatctcaaaaaagaaaaaaaaaattagctaggcgtggcagcgggcacctataatcccagccactcgggaggctgaggtatgagaatcactggaacctgggaggcggaagttgcagtgagctgagatcgcatcactgtattctaacctgtgtgacagaacgagactccatctcaaaaaaaaaaaaaaatacaagagcctatccctgccttcttgctgttgagctatttcaattagttaaccctcctatatctttgcagacctggagtggaagatcatttatgttggctcggctgagagtgaggaatttgatcagatcctagactcggtgctggtgggccctgtgccagcagggagacacatgtttgtctttcaggtaagaaagatgaggccttaggccttagcccttgattcctagaaacatcctcttttacctgaaatcccacagagtgcttcaggaatcaaaagttcaagttcagctgggcacgggctcacgcctatagacccagctactccagggactgaggtgagaggattgcttgagcccgggagtctgaggctgcagtgagccactgcactccagcctaggcaacacagtgagaccctgtctctaaaaaagaaaaaaacaagtattaaaaacatagaggccgggcacagttgctcacacctgtaatcccagcactttgggaggccgaggtgggaggattgcttgaggccaggagtttgagaccagctggggcaatatagtgagaccgcatctctacaaaaaatgtaaaaatcagcagagcatggtggtgtgcgcctgtagtctcagatacttgggaggctgaaatgggaggatcacttgagcctgggagatggaagctacaatgagccaagaccacaccactgcactccagcctgggcaacagtaagacccagtctcaatcaatcaattaaaacaatttaaaagttcaggttcaaatcctagttctactgtcaggaactatctgacctctcagaggccgtcaggccctcccttcccccacctctgtgtcaaagctgccactgatttacaggcaattcccattatttacaagagttacgttctataaagttgccgcgaacactgaattagtgaatactgaaccattgccccaggggaaatacagggttagattcttggaagtcacattttcgtcagctggttaatacgtaaacttgtatgtgtgtttatgttgaaaagacaccaggacggctatgatggctcaaacctgtaatcccagcactttgggaggctgaggtgggtggatcgcctgaggtcaggagttcaagaccagcctggccaatgtgatgaaaccccgtctctactaaaaatacaaaaatcagccaggtgtggtggcgcatgcctgtaatcccagctactcgggaggctgcggcgggagaatcgcttgaacctgggagatggagattgcagtgagctgagatcgcaccagtgcactctagcctgggtgatacagcgatactctgtctcagaaaaaaaggaaagataccttatttaatatatacagtggttcatttatgttgaattcacagccaacagcactataactctcctgaatgaaacttctctaatacgcatattttccataaagcctttcttgtatcctacactgcacttcagcactaccgttgggtgccatcatagacagcaaactcaccaacaaaaagcacaaaacatggaaaaaagcactaagtaggctgaggaaaggacgctcattcacagtgagagctgagaccagaagacagagtgttgccttgtttgacctcaggtgggaacaggcgtggtaggtaactctaggtgggaacaggcatggtaggtaactccagtttttccctgctctgtgcatgtctgcaagtgactgtgaaagcaagcaggtgttcatcttggggttacaaataaacttagcaggtaggtgaacttgcacatatggaacccatgaataatgaggatggactgtaactcctaaatggctctcatgcagcaccccacctgggttgtcaaatgtagattctggccgggtgtggtggcttccagcactttgggaggcagaggcgggaggactgcttaaggccaggagttccagactagcctgggccacatagcgagacccccatctctacaaaaaatagaaaaattagccgggtgtggtggcttgcacctgtcgtcccagctacttgggaggctgaagcaggaggcttgcttgagcctgagagtttgaggctacagcgagctatgattgcacctctgcactgcattctgggtgacagcgagacctgtctctacaaaaaaaacattaaccaggcatagtgatgcaggcctgtagtgccagctactagggaggctgaagcagaagactcacttgaggccaggtgccatggctcacacctgtaatctcaacactttgggaggctggggcaggcagatcacttggggtcaggagttaaagactagcctggccaacatggtgaaaccctgtctctactaaaaaatacaaaaattagctggatgtggtggtgcacatttgttatcctagctactcgggaggctgaggcacgagaattatttgaatccagggggcggaagttacagtgagctgagattgcgccactgcactcgagcctgggcaacagagtgagaccctgtctctaaaaaaaaaaaaaaaaaaaaataggctcgcttgagcccaggagttccaggagtttacagtgatctgtgattgcaccactgcactccagtctggatgacagagggaaaagctatctctttaaaaaaagaaggccggtgcagtggctcacgcctgtaatcccagcactttggaaggccaaggtgggcggatcacaaggtcaggagattgagaccatcttggctaacatggtgaagccccatctctactaaaaaatacaagaaattagccaggcctggtggcgggcacctgtagtctcagctactcaggaggctgaggcaggagaatggcgtgaacctgggaggcggagcttgcagtgagccgagatcacgccactgcactccagcctgggtgacagtgagactccatctcaaaaaaaaaaaaaaaaaaaaagaagaaagaaaaaacaaatggagattctgagttctccaggtgatttttcaggatcctctgctcggatacactcccttacctccatcactgctgttaccgccctaatccaagctaccacatcctatctaaccccttcagccaccactactaaatccactgacaggccctatctactcaacagtcaggactggcctcctgggtgtgcaacccaggcagctgcacaggaccccacacttggtgcgatactctgctgtcaccgtctgaaacctaatagcttttctggaggggcgtggtgttttcattttgcattggttttattttgcaccaattacgtggctggtcttgtttgcagtagtacaccctgaatctgttctttactgcctggtctaagccaagtccactgcctctccaggatgactggtgtaagccttctgctccactacagtctcctgtcacggctccacactttgccagaggcttcttttcagatcacaagagtgatgtggcacttaacctcctgcttactctcttgccctttcccaatcccttagctggcccccgggtggcctgataccacctgcctcacctgttcagcttcatgccactgtcccccggctcaccacactcctccagagtaccacgcacctctccctgccacagtcaacgttttgtagtcatttgtgggattgattctgtgtttccatcagttgacaactcctggctgggcacagtgactcacacctgtaatcccagccctttgggaggctgaggtgagaggatcgcttgagcccaggagtttgagaccagcctgggcaacatggagaaaccctgtctctacaaaaaataattggctagacatgttggcacacaccgttgtcccagctatttgggaggctgaagcaggaggattgcttgagcccaggagttcaaggatgcagtgagccatgatggcgccattgcactccagcctgggtaacagagggaggccagaccctgtgtaaaaaaaaaaaaagtccaggcgcaatggctcacacctgtaatcccaacactttgggaggccgaggtgggcagatcacctgaagtcaggagtttaagaccagcctggccaacatggtgaaatcccgtctgtactaaaaatacaaaaaaaaggctgggcgcagtggctcacacctgtaatcccaacactttaggagtccaagacgggtggatcacctgaggtcaggagttcgagaccagcctggccaacatggcgaaaccccatctctactaaaaatacaaaaattagccgggcatggtggtgggcacctgtaatcccagctactcgggaggctgaggcaggagaatcgcttgaacccgtgaggcggaggttgcagtgagccgagatcgcaccattgcacttcagcctgggcaacagagcaaaactccattaaaaaaaaataccaaaaaaaaaaaaaagttagccgggtgtggtggtgtgtgcctgtagtcccagctgcctgggatgctgaggcagaattgtttgaacccgagaggcagaagtaaaaaaaagaaaactgagggcagagagcatactttttgctcagtaaatacatgatgcttgggaatctttgtactaatgacatcgaggcatggctgtggcactgctaaggcctaggatgtgtctcccctaggccgacgcccccaacccatccctcatcccagagactgatgccgtgggtgtgactgtggtcctcatcacctgcacctaccatggacaggagttcatccgagtgggctactacgtcaacaacgagtacctcaaccctgagctgcgtgagaacccgcccatgaagccagatttctcccaggtggggcctgtttccacttcctgcttcccacaaggccgttctttatacttggggggagttcagccattcaaattgagagtcaaggtcacttcttaaggttttcaagtaatattcagttcttacagtactgtgttagaagaggagaaaaagacctttgtctctcaaaggcatgtcttagagaattaagattaggccagcctgggcaacatagtgagaccctgtccctaacccccgcaaaaaaaaaaaaaaaaaaaaatgagccagacatgggtggtgtgctctactctggaggctgaggtgggaggatcgcttgagcccaggagtttgaggctgcagtgagctcagatcgtgccactgcattccagcctgaccaacagagtgagactgtcccttaaaaaaaaaaagtcctgggccaggcacagtggctcacgcgttgtaatcccagcactttgggaggccgaggctgtaggatcacctgaggtcaggagtttgagaccagcctggccaacatggtgaaagcccgtctctactaaaaatacgaaaatgagccaggtatggtgccttgcacctgtagtcccagctacacaggaggctgaggcaagagaatcgcttgaacccggaaggcagaggttgcagtgagacgagatcacagcattgcactccagcctgggcaacaaaagcaaaactccgtctcaaaaaataaataaataaataaataaataaggtcctggccacaggtgttttctggagttccatatgtaggttgctcttgctgggcttgagatgggtgattgggggtgtcctggctctatgggaccaaggagagggcgtacctacaagggttgacgttcctcttcctgccccagctccagcggaacatcttggcctcgaacccccgggtgacccgcttccatatcaactgggacaacaacatggacaggctggaggccatagagacccaggacccctccctgggctgcggcctcccactcaactgcactcctatcaagggcttggggctccctggctgcatccctggcctcctccctgagaactccatggactgcatctaactgcaggaacccagagtgtcccagcacgccgggaggggcaaccaggcctcccagcgagtcctgcagggcccatctagaggactttgggggccatcagctgcaatccaggtctgtcaaactcagcccctaggaaagaacaggccttgggtctcccctagtcctggccagaaggatgatctcgcttttcctctacaggcctataagaagcaggtacttcagttctaaattctgacttgtgttcttttcgtcttcataaattctaactaaggccactgtgccactgtgcacccttgagtaccattgatccaaagctttcccacagacctccctggcccacctagaggctttcttggtcagtgcctgtcaaggctccagtcctgctgagccaaaggctttgtcattcctttctcttcctgtacatctgagcagacccactccagctttctggtgtcacaggcgggaatgttagttagtaggtagacttagatcccatttctgtcctgctcccaggaagattcttaggtcctcttcaatccagcagcccctcccagaggtgtgatcagcaggatgctgaggaaccatgttgcctttcctgtcaatcacagccaccttcctgttatctcctaaatggatctggcttttcctggaggctgccatggttggaagatggtatcagagggcctgcctgggcagtctgtctccgggccagggtcagggaccctctgcctctggcagccttaacctgtcctctgctaggaccagggtgatttcaagccagggaagcaactgggaccctgaaaactgtccctccccagcccgctccccctctctgtgccctggtccccttgctgccatgtggatgctgttgtgattgctgtttgtatattatcaaaatgtttttatattaaaaatgtttggtctgaaaattaaaagcacttcatttagaatga

SEQ ID NO: 83 - DNA, 15501 bp, Homo sapiens
ggggcttaccgcgagggcctcgctccggaagccgcaccctccgcggcgtcccaccgtcgaggattaacaaaacgccaaacaagattttaacagtcggcagcgaaagcgcgcactcgagcgccaatgagagcggaaggaggggcaccgcgcctgaggaacactccgtatgtcgaacaatgattggctggagcccacctttcttcttttttgctattagatgggcttgctgctcccgcccatctaattggctttggtctaggtacttctgattggcttcccccgggcggtgggaggcgcggttttggggattgttcatcatggattggtgaatttgggctccttctcgaggtggtggcccatcccgtctgctctctgtcccgtctcccgacccgtacgcttttccctcaactcgcgcgcacgaatggttaaaaaaagggtgtgaggctcgagcccgccagccaggccgctagcacctcgcgcgcgccctcagcgaggacccgcacgagctgcccggctctgtgcctgcgttgtttgaaactgtggaacccgttaggcttttggggaactacagtcccagctggctccggagcccgtgcgtgccaggggcgagtggccgtcgcgagacggctcctgcctttcgtgtctctgcagcgtggagactggaaccggcaatttcaaaggacgccacgttcaatcgcagcgctggcgcgggcggaggctaaaacacgggggtcctgagactgaggaaaacgcgccaagttcccctcggtggcggagtgctaaagaccctagcggttcaggcgttcggcgagcggggccgctgcttgttgcgctcctggctctcccggggcgggcgcagatgggcgccgctcccgggatgtagttggtgttggtgcaagacgggagcgagcggcggtcggggttcccgctcttgggagcggatggtcactcccccgcggggagggcgagccgaccagattttcctggggccggggacccggcgggctcggggcagggactcacctgtcgcacccacactcattcgggttggacttgccggcgtcaccgccgcggacttcgctttgggccatgaccaggtaaggagggcctgggaggaggggccggctcccgggcgcgggggcaagttcggccggcgcgggagaggagctgccggggagaccccgggaccgtgttggcctcgcaccctggtcgacctgccagggggagccgtgtgtgcctcgggcgtggcgcctgtcttgccgccgccgggacgcgagaaggcaggtgcgggctgggcgtaaataggccaactccgcggcgagggcgcccggcgcgggggtgtgggccgaggacgccgccgccagcctcccccgaccgggcagcctggtcgctgctcgtccttccagctttctttccgttcccgagagcggtgaaggatggggagaaagaaacgtttccacgcaggttgccctgtgtcggtaattgcgaaattttaccgcgcattttctttcacttacactttttcaagaagtgtttagaacgccgcgtgtcttaaaccttggcgaagatgtccttgtagatttttgttgaaaaatcggaatcgagtcgtgtcatcttataaagaatttaaaactattgggactgagtgttcacgctgtcaacagataatggtcgattcgtcgtgctttctgcgaaagttgatttagttacaggagaaatattttggatgtaacagccccccagttacaaggaaagccaggagcaagaaatagcaaggaagatactgcacctggcaaaatgttacattctcggtgtgagctttgctttgaggggctaggaggtttggttttttgattaagctgacgatccgctatttcacctgcctaatcattcttcccttctgtgtagtctggttactctgtcggtttgagatccagtttctgtcatccattaaattggctctcgagaaaaaccttttatcagaatcattaatgcttggcgatccctgagaacttagcgcaggttggtttatcattcagaagacagcgcttcctcagaagcattaggtagacaggagagtaagtgaagttggagacagaatggagagatggatcagctttccagtgcttcctgatttgggtctcagaaatggtttcagtgtgctgagttcagtatgaattcctagatcagtgtcagccatgtgaaatgcttattaaggatgaaatttgagtgagtcttgtgtagttcattttattactctgcattttaaatttgaaactcgttgctgaagttttgggctttaagtaattttatggtaatactctagtcagataatttttcctcccatgtcctgaaaaataggcctgatgtagaaaatattaactcctacactcctacaaatgttgccattttttttcacgtgcaagttttactttaaaacagggtgggaaagttgcaaatggcaaaccaaatcatctttttttcctactcaaagcactatttttaaaatccaaagttttttaaaaagtttggaaaacgagtattgtggtttctagtgcattaagaattggatttacacaaagtgcatcgaacagttttttttatcacggtctcaactttgcttgtgttttatctttcacttacggttttaggtataacttaacaccatctctatgccttgaatgcaaattattctttaataagctttttaggtactttattttcatatatccatgttaataactagaaaaggcattggaagagaggactcatcgtccagcactactttgattttccattcatcctttcctaccttgtacttgagaattagaggtggtagtgctcagtcaatattttctgaatgaatcattataatgaaatattaagttgttttttttttgagactaagtcttgctctatggcccaggctggagtgcaatggcacgatctcggctcactgcagcctccgcctcccggattcaagggattctcctgtctcagcctcctgagtagctgggattacaggcgcccgccagcacgcccggctaatttttgtatttttagtagagatggggtttcaccatgttggtcaggctggtctcgaactcctgacctcgtgatccactcgcttcggcctcccaaagtgctgggattacaggcgtgagctatcgcttccggcccttgaaataataagtttttactacttatactattttactgtaggtctactaaataggatattttgtaatgcgacccttaatccatagcaggctgattttaaaaattcagtagcttctgttttttgttctttaagaacagtgtggtatgcttcttcatttaagcaataaatattgagtgcttattggcaggcattaggttttcaaatgttaatttctaatttgtaccattcccttggtaaatttgttttcaaaattgatgattttgttgccaaaactgataaccaaaaactaatgaaactttctctgtgattaacagatataattggtgattacaactttcctctataaattaactcttgacactccttgggatttgaagaaaaaaatgcctggtgtcatacctagtgaaagtaatggactttcaagaggtagcccttcaaagaaaaacagactttccttaaagttttttcagaaaaaggaaactaagagagctttggatttcacagattctcaagaaaatgaagaaaaagcttctgaatatagagcatctgaaatgtatgtatcttacatttctgtactttaaaaattctacagtaaagcagcagtgaacttggttgacaactccagtctgacttgatagtctgtagcggcacaaaaaagtacgcttcagtgtacttcttagtcaaatctagcagtttatagtaggaacagcaaaactggtggttccccgtaggaatcacatcgataatgtttaactcatgttaacactgtgctcagccatttagactaacttggagaaatatttgttgactaaaattgtctttctgagtttaaatttgattatttgtagtgcaaaacatctgtgtaggggtaaaaggttttatatatatatatatatatatttgtttggttcagaagacttgacagttataagacattttaaactctagtcatgtaactagtcatacctgttggaggcatatgattgcaaattataaaaataaactttaagtaatgcttttgatgcaaataaattatttagctacagaaaataaatcagaacaaagtggaatactttattccaccaccagcagctctagctggagtctgtactactccctgtttaacatataggcactctgctgggtgactaaggtggatttggtcccatgtgttaatttcctaatagctatcaataaccagttgaggagatttgtgagagtgaagcttttgtttatcagcattcatacttctgaatactttgaggtgctagagtaataatagctagcaatcgtaaaataaatgaaaatattggaaggacctagtggtttttttgttgttgttgttaaagaagtaaaagaatagtaaacttaaagcatttgtgttttgagatggggtctccttgtgttgcccaggctggtcttgaattcctgggctcgagcagtcctcccaagtagctggaattacatgtcaatgcccccacacccacattctgaacattttatttttaagtgagggatagctacatattttttttttttttaccagcaggaagtcatatataattctcttcacagactttctttcctctgaattcttattaatagaatcttacttagtgcagcctctcccaaatattgtcatggttagtttattcccaggtttctgttcagttaaactatttgattaaaatgtcaaagtagatgaaacaaatcatagtctctcagttcctcaattttctactctgtaaaataggattaacatccttttaagggaattgttctgtggcttgttatgtgtaataatgtttttaaatgcttttaaaacttttattctgggcatatagcaatttttgagcctgtatttcttaaaatgtcatctgaacaagattcacatacttttcagattatacaacttttgggaaaagactaaatctacagaagtaatattttcaccttgtttctttaagataactacttatcgttctcccttctatatttcatagtgatcaagttgttcctgcagcacagtcttcacctataaactgtgagaagagagaaaacttgttaccatttgtgggactgaataatctcggcaatacttgctatcttaatagtatacttcaggtaaattgacaattttgctatatcataaagctttagtaggcaaagattgatgtagcatttaatgtttttgagttattggaggactttaatgtccatactgtctttgcctttgattgttaataaaccagaataggctaaaataataagttacatgttattaaacttcctttggggtaagagaaaatgatagactaaataaaggtgggatagcaaaattgagtagaccttaagtggaaggtcaaacctttaatttctttctctgattcctggtgctacagtgtgatatatgtcttatcccttggaagtaacgttggcattgtgttgtgtgtccgttggcgctgtgttgtgtgtccttgtaaccttaaagtcttagcaatatctgcccaggtgcagtgctttgtgctaatgagggaagacactgggctactactgatgaagtggagaacaaattttgacacaaaacttaatctcagaattttagggtaatacatgttaaaagtgctctatagaaagcatgatgttgttttaatgattttacgtgtattgtttgttcagtaaacacttaagacaatctcactttttataggtattatatttttgtcccggttttaaatctggagtaaagcacttatttaatattatttcaaggaagaaagaagctctaaaggatgaagccaatcaaaaagacaaggtaagaaaaataaagaacagaaaataatgtaaaaagcaaaagtaaattaatggaaatttacttgcctggaaatgaagaggactgggggggtggatgacaaagattatttctctgttagcgagctattgtcaggcaattatttttcattctttcaaggtggctaactagataattcccttttacaatgtttgctcctgtaatctgtgtatcaaacttttgttacttgtatactatatattactgtatactataatcacaatatgttatacccatgtacaacttatttacccattgtgttttcaaattgagttaaaatttaaatacagtgtatttaaagaaatctttaacttccataattaaaaaaccattgtaattcacataaatagtaattcataattcctcttaaaattacaaaaaagaccagacgtggtggctcatgcctgtaatcccagcagtttgggaggtcaaggtgggtggtggattgcttgagcgcaagagtttgagaccagcctgggtaacatggcaagaccctgtctttactaaaaatacaaaaactagtagggcgtcatggtgtgagcctgtagttccagctaattgggaggctgaggtggaggattgcttgagcccaggaggttgaggctccagtgagccgcgatcaagccactgcactccagcctgggcgacagagaccctgtctcaaaataaaaaaataaaaaataaggcttatttgtacatcccttaaaattagtgctattatgcaacttagaaaatctagtattcttaagtgagacaaagacaaagggggaaggtacttaatttgttcataaaattattggtttgtgtgtttctttcttgacagggaaattgcaaagaagattctttggcaagttatgaattgatatgcagtttacagtccttaatcatttcggttgaacagctccaggctagttttctcttaaatccagagaaatatactgatgaacttgccactcagccaaggcgactgcttaacacactgaggtatagcctataatataattttagggtttcaatttagctacttgtttatatccttggaggagaatgacatgcgaagaaacaggaataaagggcaaggaaagtagaaactctaggtccacagtcctttatatcccagagactctgaatactggaaatttttttcataaatttggtgctaaattcgttagatctgaacatattatatgaggctttttatagtcattcatatttatctctaacgtgaatattcatacatgcttctatagaagtagtaatgtgtttagttatagagtactcccatatcaagtcggtgataaatattttacttatatgccatataatcattgaatctgaaaatgtctgaatttctaaatgcgtggtcctaaggatttcacattaagaattataggactatattcaaaatatgtgtaagaactgtaaattccaaatattctatttttatatgtgattagaggagaactgttggctaactggattagattgctttttggtattttcttaaaaatgaaactttacatataaaatagccttattcaaatacaattatagggcaagtctttaaaacaatcacttaagcatttagtttaaaaatagaactaggtgcaatatattgctataccttagttaagaggtattgtaggccggtcacagctcacacttgtaatcccagcactttgggaggtgaaggtaggtgggtcatttgaggtcaggagttcaagaccagtgtggccaacatggtgaaaccctgcccctactaaaaatacaaaaattagctgggtgtggtggtttgcacctgtagtcccacctactcgggagactgaggcaggagaatcgcttgaacccgggaggcggcggttgcagtgagccaagattgcgccattgcagtccagtctgggcaacagatcaagacccttgtctccaaaaaaaaaaaaaaaaaaaaggccattgtagcgtggtggccaagagcgggtttgaatactggcttttcatcctaagtagttctgtgaccttgggcaagttatttaacctgtctgtgccttagtgcttgtatctgtcagtaatggtgataatagtacctcatagggttattgtgaagataatgtatacataggagataaaaaacattttgactaaaacctggtgtatggtaagcattatctaagtattagttattaatatatttagaagaggatcaaagtattataatgaaaatagggtacaatttactcttacttttagttacagataagaaattccaaattagtgctgaataaatgtcttgacatttaaaaaatgaaataatttatgattttccttacatgaattaatttctatataggctttatgtactgtatcttcaaaactagaatagatgaaatggaaatttttatttatagggaactcaaccctatgtatgaaggatatctacagcatgatgcacaggaagtattacaatgtattttgggaaacattcaagaaacatgccaactcctaaaaaaagaagaagtaaaaaatgtggcagaattacctactaaggtagaagaaatacctcatccgaaagaggaaatgaatggtattaacagcatagagatggacagtatgaggcattctgaagactttaaagagaaactcccaaaaggaaatgggaaaagaaaaagtgacactgaatttggtaacatgaagaaaaaagttaaattatccaaggaacaccagtcattggaagagaaccagagacaaactagatcaaaaagaaaagctacaagtgatacattagagagtcctcctaaaataattcccaagtatatttctgaaaatgagagtccaagaccctcacaaaagaaatcaagagttaaaataaattggttaaagtctgcaactaagcaacccagcattctttctaaattttgtagtctgggaaaaataacaacaaaccaaggagtcaaaggacaatctaaagaaaatgaatgtgatcctgaagaggacttggggaagtgtgaaagtgataacacaactaatggttgtggacttgaatctccaggaaatactgttacacctgtaaatgttaatgaagttaaacccataaacaaaggttagtataattcttagactttgataggtagaagcattagcagctacagaattagaattttctcttcctagatacatgtacaatataatctctggctaaaattgtttcaagagaaggaaatttaacactgaatgtgaactatggtgttttaagtgctatgcttagattagtgtgtgtgtatatattgtatgcatatatatgtgtgtgtgtgtgtgtgtaatgtcattaaagtaattttaatttatagcttataaagtagggaagttcggccaggtatgttagctcgcacctgcaatcccagtactttgggaggcctaggcgggcagatcacctgcggtcaggagttcaagagcagcctggtcaacatggtgaaaccccgtctctactaaaaatgcaaaaattagccaggcatggtggcgcacgcctgtagtcccagctacttgagaggctgaggcaggagaatcgcctgaacccgggaggtggaggttgcagtgagccaatattatgccactgcactccagcctggggcgacagagcaagactccgtctcaaaaaaaaacaaataataataaagtagggaagttcagtatattttaatgtacatttaagagtacatttccctttatgcagtgtttgacataaactgatgaaggacattgcatttagtgaaattttaaaagtaaagactaagtacagtcatgtgttgcttaacaacagggatatgttctgagaaatgtgctgtttcattgtgtgaatttcacggtgtacttacacaactagatgctagagcgtactacacaactagcctatatggtatagaccagggtatctaatcttttggcttccttgggccacactggaagaagtgtcttgggccacaccacacagaatacactaatgatagctgatgagccaaaaaaaaaaaaatcaaaaaagtctcataatgttttaagaaagtttatgaatttgttacgggctacaggcaagctttgcatggcctattgctcctaggcaacaaacctgtatagcatataactactgaatactgtaggcaactgtagcacaatggtatttgtgtatctaagacgtatctaagcatagatatgtaaacataggtacagtaaaaataatcatagactactgtcacatgcggtccattgttaaataattgaaacgttggtaggtggtgcataactgtaagttacacgatacttgaactagatttttacctagttttgtccagatctacagatatcagggaaaatgtgtaatattgatatagtgaatagttttaccaaaaatgtcatccttattctgggtttattctatggggaggtgtctgtaggaagggagttacaatacaactgacttttttttattttttattttttttatttttttggagacagagttttgctcttgttgcccaggctagagtgcaatggcatgatcttggctcactgcaacctccacctcccgggttcaagcgatcctcctgcctcagcctcccgagtagctgtgattacaggcatgcaccaccacacccggctaattttgtatttttactggagacagggtttctccatgttggtcaggctggtcttgaactccgacctcaggtgatctgcccgcctcagcctcccaaagtcttgggattacaggcttaagccactgtgcccggcctacaactgacttcttttaaagacagtaatttcatagtcagttttatctttacagggaccttaaatttcattaatagggtacctctaataagctaataatgctaataagctgatctatgaaaatggaactgttattcatgatatactttatttaaatggaaaattggttatttggactataatgagaaactaatctgtatagacttacattttcctattttcattttaggtgaagaacaaattggttttgagctagtggagaaattatttcaaggtcagctggtattaaggacgcgttgcttggaatgtgaaagtttaacagaaagaagagaagattttcaagacatcagtgtgccagtacaagaagatgagctttccaaagtagaggagagttctgaaagtaagcaaaattggagtcttgtgtggaccatgatggaatatttataattctttaacaacacaaagtttaatagtagctggtgtaattagggaggggaaaaaagctagcttttagtgtctaatgtaacctttctgcttatctggcttcacttataaatggttagcatttgggaaattgtgacatcttgattttgatgtagagtgtgttagaatggaaaactgaaatgctttaataagtgtacttttgggaacctgagtctttcagagctactgagggttttttttaatttttttgagatggagtcttgctcggttgcccaggctggagtgcagtggcgtgatctcggctcactgcaagctccgccttctgggttcatgccattctcctgcctcagcctcctgagtagctgggactgcaggtgcccaccaccacgcccggctaattttttgtatttttagtagagacggggtttcaccatgttagccaggatggtctcaatctcctgacctcgtgatccgcccgccttggcctcccaaagtgctgggattacaggcgtgagccaccgcgcctggcctactgaggttgtttttaacacaataattgagccactgttgtgtctagagcataccacaaaatatggaaataccataggaaataatcatgagacaggtttacctatcacatattgaaagttggcaattaaatgtaaacagactaggcttattttgtttttgctgtctatcatattttttggccgatcaaatatatttaaaaggtatgtatactgttgaggatgcacttatgaaagtagtttctgaaagtaaaaatctctttagttatttaggaatgggtcggtcaattgaaattaaatgctaattttgaacctgaaactttgtggtttattttttgaatgcctgagagaagtatttgagtgaaaggattctcttttttagtttctccagagccaaaaacagaaatgaagaccctgagatgggcaatttcacaatttgcttcagtagaaaggattgtaggagaagataaatatttctgtgaaaactgccatcattatactgaagctgaacgaagtcttttgtttgacaaaatgcctgaagttataactattcatttgaagtgctttgctgctagtggtttggagtaagtattgtaaataagaactatatgaagaaaatgagctgctgtagaagataagtcttgttcaaaatgctgtaatagtaggaatataaagtactgaaatgaagtagattgtaaagattgcttcagtaaagttttgttcttattaacagtttccctgtaaaaatgaaacaacttaaatccttttgatatgaatacatattctattaagtatgatttcttctccttttttttttgaaacagggtctcattccagttgtccaggctggagtgtagtggcacagcctcagctcactgcagtcttgacctcccaggctcaggtggttctcccacctcagccttctgagtagctgggactacaggtgcatgccaccatgcccagctaattttttgtatttttagtagagacaggatttcaccatgttgcccagtctgatcttgaacttctggactcaagcaatccacctgccttagcctcacaaagtgctgggattacaggcgtgagccaccatgcccggccagtttctttattcatcttttcatattcattccctcttagatgttagtagcagaattcagtagaactgactaaagcagggaacaaattttgtatacatcaagatttttttgaaggggcgggaaaggctaaattcttcctagttttaaggtaagccaggaaatcaaactagtctttcaacagtttgaaaaaaaatgctgattgttttggatagtctgtttttttctgacatgtgtaatgtcattgtatgtgtgactcctttgtacattagttgcttgtttgaaattaccacgagggcttcacagtagctctctcacacttgattatgtcaaaagataacatatagccccttattcagtggaccttccctttgctaatagtataaaatactattttatttactttcccaaattttggtagagaaaaacttcacactaaaaatgactaaaatgggctgggcgtgggtggctcacacctgtaatcctagcactttgggaggctgagatggatggcttgcacccaggagttcaagaccagcctgggcaacatgacaaaaccctatctctacaaaaaatacacaaactagtttggcgtggtggcgggcacttgtggtcccaactactcaggaggctgaggaggaggagcctgaggtgggaggatcacttgagtccagaaggagccatgattgcaccactgcagtcagcctgggtgacagaccctgccttaaaaaaaaaaaaacccaaaacgtaacatttttggttccggttcagtctatttaaaataccatttattttcttaactgcacaaaattaggaaaataaaggaaaaaatacaattatttcttccacagaaatgcctgaatattagcagttatttatttttttgtttctgcatatattataaatattattcaaagttggggtcttgttttgattctgcttttctgatatatgaacactggatattaagggttcattcagatttttacttggtttcagattggggtataacattttgaatttaaaatagaactgcaggaaaccttttctttttttcctcccaaaggtttgattgttatggtggtggactttccaagatcaacactcctttattgacacctcttaaattgtcactagaagaatggagcacaaagccaactaacgacagctatggattatttgcggttgtgatgcatagtggcattacaattagtagtgggcattacactgcttctgttaaagtcactgaccttaacagtttagaactagataaaggaaattttgtggttgaccaaatgtgtgaaataggtaagccagaaccattgaatgaggaggaagcaaggggtgtggttgagaattataatgatgaagaagtgtcaattagagttggtggaaatacacagccaagtaaagttttgaacaaaaaaaatgtagaagctattggacttcttggaggacaaaagagcaaagcagattatgagctatacaacaaagcctctaatcctgataaggttgctagtacagcgtttgctgaaaatagaaattctgagactagtgatactactgggacccatgaatctgatagaaacaaggaatccagtgaccaaacaggcattaatattagtggatttgagaacaaaatttcatacgtagtgcaaagcttaaaggagtatgaggggaagtggttgctttttgatgattctgaagtcaaagttactgaagagaaggactttctgaattctctttccccttctacatctcctacttctactccttacttgctattttataagaaattatagagtgagtgtattttccttgtgtatatattaaacacacccatacaaacattggtaaagttgattacatcaaagaatctttagcttatcttttgaagctactggatattattggtctctctaggtttttatataaatagtgaaatttgaattactgaaaaccatgttaatttttagaactcattttcctcagtagagactagtgatgcattagcttctgggaacaaacttgtatcggttcttaattaaattatccaaaacggaggcatttaaacacttggatttacaccagtcttttgtgtttgctttttaaaataaagtgctcgtatttgtattctccatattttggagtaattatctacatgatgtttatagttcctgtggtttttcacccaagaagcagaatctcattcagtacatttagttttataagagtcatgaagctaaatccttgggctatgtcagaggcacaaagtctagaatgtgtgtattcacaatggtgtatgtacattttgtgccttgattcacttagaagtgtctcagaaaacctggacagttcgcttctacacaagaattttatatgtatttatgaagatgattctgtaccctagtatatctttttgggcatggactaatttgtatctgtttaactcatattctgcacgatctgtatatagtacatcaaacttagaggtgtgaccttaaatttaactttttttaaaaactgggaggtcaataaaatttaaactgcttaactatgtatatgaatatttgaattttttacttgtatatttttataaatacagctgagttttcttaaagcgaa

SEQ ID NO: 84 - DNA, 98006 bp, Homo sapiens
cttgcgcggtgtggcggccgatgccgctataaaggcttgttttgctgcagggctcatgctcgggagcgtggttgagcggctggcgcggttgtcctggagcaggggcgcaggtaggtgatggctgctgccgcacccctgccctccagctcggttgtcacggggatcacccctttgcatttcctcggggcgtggcgggatgtggccagggctgcgagcagttcgggggacactggagacttggggaacggcgtatggcctccccctggtctcctgccgccgcctcctaggcctgtgagcccggggtctggtgacggggtcgtgtgctggaagacaggcaggtaggatcgggatgagcgggcagggacgcgggctacgtccctggccgcggccgccagggggcgctgcgcccgcgggccgtgggtgtgggtcgcgctcgcctgggcaggccggagcgggctgtgggaacgccctagggcccgggcatcccaggcgaagcgggtctgagagaaacgcccacctgggaggctgtgcagcgggtggctcggggcaccctgctcaacccgcagcggagccgccagcgaccttcgaagtaagtcatccccttcgtttttgcaagcgggtaaatggaggtacgtgacataagcacgcgcagcaaagccgtggctgtgccgggaacgcagcccagatctctccacggtcatccagtgctcttttcgcttctgccacacagagccgcgggtggctttgtgtttatcacacaggggccatttggtttctgcacagacggagaggctggaggcaggtgggcacaggaacgacggggaaagtttcaggaggtcttggaggaggagatggctaggttttactgtggtccgcagcgtgtatgaaaggtgaggctgcttggagacgcaacaagtggattacagtgggtgtggtaaatacgtatccctttagcgtggtgtcttcctcgtgcagcttgagggcctggaggtgatggaaacctactcatgagtgttgggatgactgcagcttgcacacaccagtctggtaatcccgtgcaactctcctcctgccatgcagttgaatcagtatcattgtgcagggagagtgtctacacttttatcagtggaaagagaatcttggtaaaaaagggcagctgactaagtggcctcaaccctattgggcacttctttggggttctcccacgttgattattctgcttctacccttgtacatgtctggacaacaggtttgttttttacaaacaaaaatcccttctctttcttcctctcttgatagctgaggcaagtgagcatttaaaaaagatattccaacaactttaaaggaggacacgagaagatagggaaatataaatagtatcagtaaaatggctggcctggggatccatccttgcttgcttgcttgcttcagactggggctttgtttctttccaaacctgtcaggattcccagctcttcgccggcctccacgtggggtgccctcttttatgttccagatacacagacgatggtgtccttatgttcaaggccacagacagtaactttgtgcctactttgggcctgcctgctctcctgattgtgcctctttttccaggaaagtagagatgagtgtgttagagataatggaacactgttccccacacccttcatacatagaataacttagtcccttaggatagtttagcagtgtctaccacagcagtcactgtaggcacaaaacagtcattatttgtgtcataacagggaagtcgttttgtccctgcctctctctgctcctgtgctccactgattctacttcatcctttgaaataaaagtggttgaaagaatctttggttatcatgggtgcttagataattaagattatgttcgtgttcttcttgatgtggcatttcatattgtggatgagttccagtgacctcctctgtttcaaactgctcaccgccccaacccccaccttttaaaaaggtagtactaatcttttcctcttccagataatcagctaagctagggaacccttgaaggggaaggttagaatttcgtgattcccgtaagaaggttactctgatctacagctacagctcaacactggggacactggcagatgccaggtctgtttatagtttagccttaatgaggtctcaatgacgtgattgctgcactctggcttggtgagccgctgttctttatggtgtagtttgtcattggacaaggtgactttttttttttttttaaagataagtaacagctatatcaacttagggtacttgaaccagaattctgaaaggcaagaaatcaagctttctttggactggaaacctgtctttgcataggagatttagtcctttttattcagaggattagtaagtgttctctttttatctgacactttaaaaattgcattataatggttagaattttgtgctgcagaagtagtagttttaagtcacagcgatagccagggatttatggaatccagaaggcgacacggctacacgtctttaatttccgttggaggctagtatgaaaggtgttttctcagcttgtctctgggaggctgtgacccttcttagaggggggaaacattttggagaagtatgtatgtgttttttgtttttaagtgacctgagttgatacagcatattgattagacttagccaggcaagcagtggtttagaatagagtttcaggtaaaaactaggtaagacttagtaatacagggtggagaatttgtttttgttattgttttttactaacagctttgttgccataggatttatatgacatgaaattcactcttttaaagtataaattcagtgtgttttttttcaatgtattcactgcattgtgcaaccattaccactatctagttttagaacattttcagtacccagggaatttgtgtttgaagttaagttataacattgttttaactggataacttcatggagctttaaaataacaccagctaacccattagttaattataaaaaggcagagatggaatatatcattggtagaataagtgtttggtaagtttttatttagtaaaatttagtagaagaaatgatgtccactttaaaattgtggagtttttaatacttgggacaaactgaaattgtttctagaaagtctttaaaaaaaaaaccaacctttctattgtatacactggatttgagcttagttgaagagaatgggtgtctctttactagtgtgtttactgtttctaattttttttcccttagagttgggagaaggtaatttttcttgattctcttatactgaatctttttctttaaaaaaatgaaatcaaaatctttgaactttttttgaaaattaatttttgtagctataacagtagaaagctttagtacttttgccttttttttttttttcctatttttaaggcacttgagcttatggttaagtactgtttaggaaataatctatttcttgatgaatttttaatttcaggaattctgatgtgaaactaacagtctgtgagccctggaacctccactcagagaagatgaaggatatcgacataggaaaagagtatatcatccccagtcctgggtatagaagtgtgagggagagaaccagcacttctgggacgcacagagaccgtgaagattccaagttcaggagaactcgaccggtcagtttcctttcctaagagtctcttacctgcttgttgtactaaaacacatcttttttcgtataatgggtaatttagaaacttattttttggccgggcgcggtggctcacgcctataaacccagcactttgggaggctgaggcgggtggatcatctgaggtcaggagttcgagaccagcctgaccaacatggtgaaaacctgtctctactaaaagtacaaaaattagccaggcgtggtggcgggcgcctataatcccagatacttgcgaggctgaggcacgagaatcgcttgaacccaagaggcggaggttgcagtgagctgggatcatgccactgcactccagcctgggcgatagagcgagactcagtctcaaaaaaaaatgtgtttttctttattggctttaggttactgttaagaatttatggttattgataagtctctggtccatagtaagcactcaataagtggaagagaggctggctgtcaccctctcacccggtctgttctgagcattctcctctttttcacttttattctatgttggtgccttctgaaaaggctatacttaacagaagacaacttattgagggggagggggtcatggggtcaatgacagggaatataaagccaattaagcttcattcatgtacctaaacaaaattggtgttttcttctactttctgtcatgtgtgtttaaaatgtgaacctggccaggcacagtggctcatgcttgtaatcccagcactttgggaggttgaggtgggtgggtcacttgaggtcaggagtttgagaccagcctggccaacacggtgaaaccctgtctctgctaaaaatacaaaaattagtgaggtgtggtggtgggcacctgtactcccagctactcaggagggaggcaggagaattgcttgaatccaggaggcagaggttgcagtgagccaagatcacgccactgcactccagcctgggcaacagagtgagactccgtctccaaaaaaataaaaaataaaataaaatgtgaatcctttggagagactcagatttcagaacaattctagatagttgtgggattatcagtatgtttttcaagcgaattcataagttaagcagtctttagataataatctaatttcctccaagggaaataatgaagatgcgtttttacctcgagaaaatattctttttcctgaggaaaaaaagcattataccttttcttacaaaagtacctaataaggcagaatggactaggtttaggaagttgaggtttttgttggtgtatttgttatgtgaaaatttgagaaagataatggactttgcagctgacactggcctttccttagcctgatactacctttccctctttggttgtgttaaagccattgctttattaatgaacattttcttgctaatgagtcttttctgtaccctactgtgtattatagaatgcttttccattcaggtttaacttcagagaaacaggcttaatgtaatcagtgtcaaatgcttctcgtggtgccagttttataacttcctcatgtccttttgtctagaccttatgttgattaaacatctatccattacatctgagtgctagacacatttagtgtaacagttaagtctggaaaaagtcagaaggtaacattggggcagggccttaaagggtgattaggtggggaggctttttaggcggtacaagtacagacccaaaggtatggaaagagcgtgtgacatattgggactttggataagctacttacgtcatttgtatataaaatggggttgacagtagtacctgactcatgggatcactgaggagtaaatgagataatacatataaaatatttaaaatggtacctggcacatggccagtgctcaataaatgttagctcttagaactagttgttcagggcataggatgtgtaaagagattataggtcgggtgaaattctgcatgccatgctaagaaatatttcactgtgggcattagggaactattggaagttaatgagattaaaaaaaaaaacctttttattttgagctaactgtagatttacatgcaattataaaaaataatatagagatcctatatattcttcatccagtttcccccagtggtaacatcttgcataactatagtccagtatcacaacaggataatgattgacattgatacaatccattgactttaggatttcaccagttttatatgcactcatttgtgtgtgtgtgtgtgtgtgtgtgtgtgtgtgttgtgttctatgcattttttaaaggtgtaaatttgtgtgaccgcttccacagtcaggatgcaaaggttccatcacaaggatctctcgttacccttttatagccacagtcatgtcccctcaaccccagtctctggcaactgctaatcttttctccatttctgtaattttgtcattttaagaatgctatatacattgaatcatatagtatataacctttcgagattgcttttttcactcagctgaactcccttgatagccatctaattttgttgtgtgcatcaatagttctttcctttgtattgctgagtagcattccgtgttatagatgtaccatagcttctttaaccattcatttgttaaaggacatatgggtcatttccagttaatggcaattatacataaaggtgctctgaaccttcagttacaggattttgtgtgaacataagcttttatttctctggattaatgcccaggactgcgcttgctgggtcatatggtaagtgcatatttagtttgtaagaaactgcagtactctttcccagagtgtctgtgccattttacattcccaccagcaatgatccagtttttccacattgttgccagtactcaatgttataatgtttattttagccattcctatagatgtgcctggtatctgattgtggttttaatttgcagttccctaatggctacgatgtttgagagtagatttttatcttagattagtcttgaagcaatgcagaaaaaaacctgtacaggagaaagagaccaaatataaagagcattcaggaagcggctctgcctatccatgtcagagaggccagggttctgttgtaaagcacagaagtgaggatggaggaaaggcgtttctagaagatagggaggcattggggtgtctgggattgatggtaaggatttaaacctattcgtggacataagaaaaggagattggggagatattaagaatgagtttgggccgggcacggtggctcacgcccgtaatcctagcactttgggaggccgaggctggtggattgcctgagctcaggagtttgagaccagcctgggcaacacagtgaaaccccatctacttgggaggttgaggcaggagaatcgcttgaacctgagaggcggaagttgcagtgaaccaagatcgcgccattgcactccagcctgggcaacagagtgagactccatctccaaaaaaaaaaaaaaaagaagaagaatgattttgattttgaagatgttgaatttgaagtgcatatgggtaaaattatcagtaggtagagcatagacaagaagtagtgtaggaaaaaacatttagagcctttagtgtgtccacataggtgaagctgtgagagtgagcaggcttacccaaggatggcttgcagagcaggagaaggtggaggctgtggagctggtgtgtggtcctgtgaaatttctggggatagggtccccagcttgtgagagtagagttgacatcagggtttgcagtggcagcagcgagcttttcctctacgaagtggagaagaacagcaggtaggcaccgctgggctttgagtaccctaaaggatatggagtcagccaccactgtagcaggttttcaacatgccactgaagccttatctcagagaaatatgaaggctaataccacttttataaaatttcaggaatccacatgaattttatgaattttatttttattattctttcatgtttcctaaactttttttttttttttttttttttgagacgaagtctccttctgtcacccaggctggagtgcagtggtgcaatctcagctcactgcaacctccacctcccgggctcaagcaattctcctgcctcagcctcctaaacagcaggtgcctacctgctgttctctgttaccacattggccaggctggtcttgaactcctgagctcaagtgatccgcctgccttggcctcccaaagtactgggattacaggcgtcagccaccacatctggccatgaacttttattttttattaaattttttttgtttgtttttttgtagaggcactctcactgttggccaggctgttgttgaactcccagcttcaagcaagcctcccgcctcagcctcccaaagtgctgggattacaggcatgtggcaccacaccctgcccctaaactttgaaatttgagtactgttttcctgatttttactgtatccttgtaatctctgaacttttttaaaagatttcttttattctactctctttctgttacttagtctagacctagcaaaacaacaacaataagcccataggtttattcaagctatttttgtatatacattaaaatgaatgcatcgctactaagtatttttgtaagttcagacaccatctagaatctgcttgaccgttacctgtcaaaaaacaaaatttctcagatgtatttatctttaacttgtcttcatgttacaagtttgctgacagaagcaaccagcaagatgacaagaaattttgtggtctgagaaaattgtataaatggtataaaatggataatgtaagtagttgggaagcagaattcctgtataagcatatagtttttctttttttaaagtaagcagttaattgggcagagattgcaatttcatgtcacatcatcattaccatcatttttatatttgttagagaggaaatctgggacaggatctcccaggatgccaggtatgcctactatctgtcaaaaatttaaaacaaacaacaaaaaagcctctaagtaacaaaagataaggatacatctatggctcttatgtggaaagcaaggtttcattcagcactattagcctttaacacgtggaattaaccgagaagcaggagacctgtgctgctggtgcctcacgcctgtagtcccagcactgtgggaggccgagggaggaggctcgcttgagcctgggagtgcaagaccaacctgggcatcatggtgagacctgtctctacaaaaaaataaaaataaaaataaattagctgggcacaggggtttgtgcctgtagtcccagctacttgggaggctgaggtgggaggatcacttgagcccaggaggtccaggctacagtaagctgtgattgtgccactgcactccaccctgcgtgacagagcgagaccctgtctcaccaaaaaaaaataaagaaagaaagaaaagaaatggtgtcaaacagaagtcagaagcaaagcaccaaagaataagttctgactttgagcaggccagtgcttttcttcttcaaggtgtaagtgaagatgcagattacatggtttgcccatttctcagtattgtgaccaaatcattcttttggaatatgacttggaaaaattgctctattagtcacatcttcaaatatttataatttctcacgtatgcttagaaataattagggttgaaataaagcattcgcacatctacccactttcttcgggactgtaatgttaatgcttgtggccacacacaatttgaggcttagcaggcatcctttaatcctgaagtgttaataaagtggtggtttctgttgctgttagttctttgagcctgagtactaactttggctggcattaggctggcgttacttcagctaacatgaagttttatacctaggctgctcctaaacactgttcctttgcctgaggcatgattattcaggcatggttcctttttttaatcctatttatatatgcacatgtagatcatatgactccacgagccctgatttttttttaagatgcagtcagtgtttattcatttttttaaatttagcaaatatttgaacactcttcaagatgcatgcacagcactgaaccgagtggtctggtgcagataaagataaattggtgctgggcctgcttgtccaccaatagaagcttaaactcacaacacgtactctacatagatgactgtaatttagatgctgtgggaattagtaaaaggagaaagtgcttctctctcagggaactctttaggaggaggtatcatttggctggaaacttgaggaatggatagaatttggagaaatgaagaacttgccaggcaaaagaaagagttgtgggatagggatacctagtccttgttggtattgagcatcaaatgtgtgaagtcttagctatagtgcaatacctcagtgaatttcacattatgtgtggggtttttttgttttttgttttttgtttttgaggtagagtctcactctgtagcccaggctagagggcagtggtgcgatcttggctcactgcaacctccgcctcccaagttcaagcgattctcctctctcagtctcccaagtagctgggattacaggcacatgcaaccacacccagctaattgtttgtatttttagtagagatggggtttcaccatgttagccaggctggtcttgaactcctgacctcaggtgatccctccgcctcagcctctcaaagtgctgggattacaggtgtgagccactgcgcctgggcatgtgtgttcttgaataataagccaaggagtttggattttaattgctttaaattaatatttaagcaaaagcaagacaaagcttgtcagatgcttttatgagctttattttattgtggtggtggtttgttttcttagtgctctcaggcaaaggtaagggtgccttgtttttcattagcatgtctaatctgggaaagaaggaagaatggaaaaataagcagaagtgggccgggcgtggtggctcacgcctgtaatctcagcactttgggaggccgaggcgggcagatcacaaggtcaggagattgagaccatcctggctaacatggtgaaaccctgcctctactaaaaatacaaaaaattagctgggcatggtggcatgcacctgtagtcccagctactcgggagactgaggcaggagaatcgcttgaacccgggagccagagtttgcagtgagccgagatcgcaccactgcactccagcctggggaacagcaagactctgtctcaaaaaaaaaaaaaaaaaaaaaaaagcagaagtaaactaaagttcatgtaccattattactggcacatgaactttagttattttttccccttctctcaaaagtgtgtcattggtgggattttcttcctaccaaattagaatatcctgtgtctaggaaaggtaacaaagcaagtattcataaaatccagggctcttacttagtatttccttagttctgtggtaggctgaccctttaatcttggttggagttttcataattaatgctttgaaatattttggtgagctcaagttgtatcttagggatcaaagatgtgggtctaatctcttaccagaaatgattcgaagatgtattgttaggaaagaaatatgggctcattatagaaaatgtacaaagtgtgtaaagttgtagaaaaaaagtaaccacccttaattcctctacccagagacagccattgttttcataaaatagttttgtctagtacattgtacttttagagtttgctcctgaaagcttttctttacagactaaggacgtgtgaatttgtctatgcccttgtgttttccaagtcaagagtattacctgtgagtcggcttgctgttaggaaggagagcaggaggaaggagattagcattttgcagctctgcattatttttctcttgattgatactcggtgactcagcagattttctggacagggttaagataagtaagaatacctgcctttttttttttttttttttcttctctccctgtaggcatccataaagctttatgaggcacagtagtctcttaggcgctgctgggtgtgacaccgtatctggtctggtgccaggtgttggtctccaatagcagcccagagatctccggctgaggtaacaacagtgtgcgattggtgtggagcccaggtggctctcatgcttggtaactgcattgacagctcgctggggctcttgaggttgggctgctgccgggatcatcagctctcttatgccgtttgctgcaagactgccgcggctttcctaggaagtgctgcttaagggaaataaatatagcctgttggcatgagttaaaggaactttctgtcaaaggggaagaaaagtgttggaattagcttcctgttttttttttttttaagtacctaaatctttatttggttaagataacttggaagttacaaatggttaatgaaaactttttcaatgaaatattgtttccacagttaggtgggtttccgttaatgctttcttttttttagttattattatactttaagttctagggtacatgtacacaacgtgcaggtttgttacatatgtatacgtgtgccatggtggtgggctgcacccattaactcgtcatttacattaggtatatctcctaatgctatccctcccccctccctgttcatgctttttttaatgtcttaccgtttttccctctcttttagtcaaaaataaaaaggtcaacgcaaagaaacagggactccagaaggctttgcaatggttaaacctgtcattattaaactcacagactaatgtgaagttaatttggtgcactgaagtccactaatgagcagaattaaatttatccttttcctccctgccccccttttaaggagttagcctatttagataattagatgttatatatgttttaactatttaagattattttatgaattagctgttcaaagaatcaattgttactagatatcagatgagaacttccacttaccaaagcctgctcatggaggtagaaagcaagactgacatgtgtactttaaaagatggatggaacctcaaaggccgtcttgcccagtccccatttagcctcacctctctgtaggtgaggcccaggagagacacttactaggcagactatgctggggctgggtgagcttcccaaggatgttctttctggaattcggtggctcagaatacagcacttggctcctctttgaagcatgatggctctgttgcctgtctctggcccagtgtgctgggctgctgaaaagagcatggaaccacccaggagacgccacgacactgacagctgtacctgacctgagggttcaggatatgttttcaaaagcaaatctcgctaaaaaggatttgtatgttattatgaaatctatatttatgtggtggaaatagacacactcaggcttttagagataaactacacagaatgggttacaataaatgcttataattgtttggcttttttaagaatcctgttaacttgacaaccttctgtttacttttctttggtattatgcaggtatgatattgagcagtcacttagttttcttaaatgttgtgtctcacagtagaaaaatagccaaaccactcagcccctgacctttgtgtttgcttctcacggtgatcagcagttctggtctgctctgcagtatggtggtcacatgatggaacccagaaagccttgtactaagcatttaacacacattgtgttaggcactggaggaagtttcatttacaaattatattttggcctttttttttttttttttttttgagacggagtctctgtcacccaggctggagtgcagtggcatggtcttggctcactgcaacctctgccttctaggttcaagcaattctcctgccctcagtctcccaagtacctgggattacaggtgtgcaccaccatgcctggctaatttttgcatttttagtagagacaggatttcaccatgttggccaggctggtctcgagtcctgacctcaagtgatccacctgcctgggcctcccaaagtgctgggattataggtgtgagccactgtacctggcctttttttttttttttagctaaagcctgaaaatcttgttgaagggattttgtcaaatgcaaaagaccaatattcacaactctctaaatcagtggttttcaggccaggctgaatgttaaaatcacttgaagaatgttcaacaaataccagtgttggggtcctattccagaccaattaaatcagtctctgggatagaacccagacattggtattgttttaaaactcctctggtgattctagtaggtaggcagtgctgggaatctctagatctcatggaataaagtctgttctctcccctcactcaatggctccaagtgtttcctgtaaatcccgttttacccctgtgattcattttcagtttaatcctttgaaaccttaccatgctattaacaaagttaatcttagacccaacataacaggaactttgaataagttccttggaatttagcttatgaaacaactgaaagccctcaaattcctggtgattatggagtaatgctagattatcaactgcagacaaatacctgttttactgtggtggtggagatatgtttgtgaattgtattgctagctgatcatcggcttgagagtaacatagcacagctacagataagtgagctgatgctcaagttaattcttttctcagtgtagtatagctgttgagtgataggactgagtttagcagcttccctgacttggaataatagctctttcttttgtattctgcttcttccccatataggttgggttctagaattttgctgatcctcttgactgaaatggctactatttggaagttcttaagggaagagcttaagatggtcagggttgtgataacaacccactggggagtaaggatgtggtgggaattgcagaggaaacgtgcttggtaggtttctttaacttgttggagattaggaagggcgggaaggcctgaagtcagccggtcttgggaggacatcagtttttgatctttttaaatttaaaagtgaattttaattcacttttaaatttaatttctaatattctgagtcccttaagaagtatatctagtggcacaacagttccccttaaaagtttgtctttctagatgtttgtcataaaggctgcgtgggcctgggacatctgtagaaatggttttcttggccagaaggatgtatttgaagaggcgcccattgtcttgtttgtcttaaggtcttgtgaatgaggagaggagaggaagacagtgttgtgagatctgaggcctgttgattccgattgtgccccagataccgctttatttgaggggtgtgccagacaggagcaggcagcctttaacccccttggaaaccgaggtacctctctgttgccagttgacacctgcagtctctgccttcaggaacaacttggttgaatcctcagcccgaggcttattaggcaggctaccctgctgttgtccggcctccaggaagggattggattgttcagacggggaacgatttctggcccctggtatctgtcccagaggcctccgtgcaggggaaaagcccttggttgccctgtcagcaggcatttgctctggcagcctgttaaaatgagatgggacagctggagaagtggtggccatggggtgtgataggtgcgctgattatctgaggcctgaggatggcgttagcgcccgcagaagcgtcttttgcaagagcagatctgtctgcttatgaatcgaatgttacctgtttttcataccagaggtgtctatgaatgtgtgtttccctgatctttgtttgaaccttgacagaatctgaattgctttttgttattgttgtttttgtttttctcttttttttttttttgagacggagtctggctctgttgcccaggctggcgtgcagtggtgcgatcttggctcactgcaccctctgcctccttggttcaagcaattctcctgcctcagcctcctgagtagctgggatgacaggcatgcatcaccatacccggcttatttttgtatttttagtagagaccgggatttcaccatgttggccaggctggtctcgaactcccaaccttaggtgatcctcccaccttggcctcccaaaatgctgggattacaagcataagccaccccacccggcagaatctgaacttcattgtccctctttagcttccctgtgaccttactcctgccccattgccattaccttggtaggaaaaatgctgagtatcctagtcacatagtcatggggaagatataaatggcagtcatacttcctcgtttgatatttttctcagctcctggatctgccagtatttttccctttaagacaaagcagctgctgtgggtgcctttctgtgtggctgggtcgtctggccactgacagcctttcagtgtgctgtgctccttaagagaaatgggtcccctcatcttgtttcaggggaaactttaaaaagttacttgtaaaagggattgaaagcatcataacaaaaaacaaatggcctcataaaatacattcctctaggtcagcctatatcagtactaactgtgttagctcttcagctatctagggttaccttagtacgattgacattttgggccacataattctttgttgtgggggctatcctgtgcattgtaggatgttcagcagcatccctggactttacctgctagagctagtagcacccctcaaacatttccagatattgccacatgtcctctgggcaagcaaaacaccctcacttgtgaactcctgggctgcaccgtgcgacacagtactattgtggctattaagcatttgacctgtggccagtctgaactgagatgtgctgtaagcataaaatacctgatttcagagacttagtacgaaaaaagaaatacctcgtttgtaaaatacctaataatttttcacattgattatatgttaaaaaagataatactttgcattgggttaaatgaaatatattatttaaattaatttaccttttactttttatttttagagtcagagtctcactctgtcacccagactgtagtgcggtggcatgaccatggctcactgcagcgtcaaacacctgggctcctgtgatcctcctgcctcagcctcctgagtagctaggactacaatctcgtgccaccatgcctggctaacttttaaattttttatagtgatggggttttggagggttacacagactagtctcaaactcctggcctgaggccatcctcccacctcagcctcccaaagtgttgtgatgacaggcataagccactgtacactgcctactttttactttttaaatgtggctactagaaaaatttaaattacattatgtggcttacatttgcagcttgcattatatttctattggacagtgctgaactagagtgttgatctactgtaggttagccattgattttgtattaggcatttagatccctgtaagctgttgggtttaatgattttttcctttggaagattttcctttatgcagtaaaattatggagacacagagtatgtagtattacatattaccagtttgctctcctgaatccctgctggtagcatattaaaaatcagtttaatgttcagaccgtgtatgtttgtctatatttctctcctttccatattgcattttcttttccatattagattttatctcttttaaggcttatgtggttgtatcttaaatttaatttgtatttctcgattggtgacattgggtctgtgtgttctctcctgtatctagaacagtgcctggcacatagtaggccctcagtaaggactagttgaatgaatggatgaaaaaatactgtattttactttttcagtacaagtccactactcgaaatatattattatgttagctacttggttacttcttatttttatttatttatttatttatttagagacagggtctcactctgtcacccaggctggagtgcagtggcatgatcttggctcacttcagcccgatggtcctggctcaagcgatcctcccacctcagcttcctgagtagctggggctaacggtgtcccttttttgtatttttttgtacaggcggggtttcatcatgttgcccaggctggtctcaagctcctaggctcaagcgatctgcccgcttgagcctcccagagtgctgggattgtaggtgtgagccgccgcgcccagccacttggtcacttctttagctttatcttcccttctcttaatgctaatttccttacgcaaaaaagtttccttttcatgtttgaacctctcttccctttgatacatttctgcttgttgggtgtaaatggaggctgtcccccatcatagctggactaagtatgctatataatttatgtcatcatttttaatgtaatttttgggaggttaattccagatggattaatgtatgatatgaaacctggatatcaattaattcatctccaatctggttagttggtaggaaggtaggtagtaggtaggatgtgagtgactgtctctgtcacccaggctggggtgcagaggtgcaatcatggctcactgtaccctcgacttaccaggatcaagcgatcctcctgccttagcctctcaggtagctggaccacaggtgtgcaccaccatgcccggctagttttaaaaaatgctgtatatagatgggttctcactttgttgcccaggctggtcttgaactcctgggctcaagcgatcctcccactttggcctcccagtgctgagattacaggtgtgagccagtgcacctggcccaatctggtatttatttgtcccaacaatattcactgactcatgattccctaccttgttatattatttatgcttttgtatagtaagcccttatagcttgaatatattaagtcttttctcttggttcattgccatttttaatccattcaaccttagaatgttgataactcactttatggaatgttaactgtggtagaaaatatttatttttaccttcaaatagacatacttttttttttttcctggcatgcttggccatgtgagcttttttaggaagcctagagaggaagagaagttagacatccaagcatatagttagtttcaagtgggagacatctgtgcagttactggcaggttagtataaagatgctgttattttatgtttctttttttttttcttttttttttttgagacagagtctccctctgtcacacaggctgcggttcagtggcgcgatctcagctcactgcaacctgcacctcccaggttcaagcaattcttctgcctcaccctcccgagtagctgggactataggcatgtgccaccatgcccgcctaatttttgtatttttagtagagatgaggttgcaccatattggccaggctggtctcgaactcttgacctcaggtgatccacccgcctcagccttctaaaatgctgggattacaggcgtgagccactacgcctggccctgagtcattgtttatcttaatctggtattcaccctggggaagagagaagagccatttatgaggtacacctgggatcattttgtacagttatggtttatttgcttggttttgttttttgtttttttgttttttttgacaggcccatagcatagtgatcaagacccttagctcaaggctggattgaaatccctgctgtgacctaacatcggtgtgcctcagtttccttagctgtaaaacagggatactagtacctacctcaaagggttgttatgaggattaaattagttagtatctgtaaaccatttaaaacagtgtctggcacatagtacatgctatgttggtttgttataaatttgtataaattttcttaattacctttaagtgaaaagcttgcctttataaatgcatactagtcgtgagatttggctgtacacaaggaagattgctatagcttcctttatttcttgctaatgtcaagacaacctgaggtccacaaaatagaagtgaaagtactaaagttaatagcaattctcttttgcaataatactggagcacatatcctgtaataaagttaattggggcaaactgggtagaagtctaattgctaggagctacatttttttaatcctgtaaccccagggatagaatttatcctaaataatctagaaggagaaaaataaaactataattgtatattatactattaataataagcaaaagctgggtgtggagactcatacctgtaatcccagcactttccgaagccaagaatggaggattgattgcttgagcccaggagctcaagaccagccttggcaacatagtaagaacccgtctctacaaaaaataaaaaaattagccagacatggtggtagtgcatgcctgtagtcccagctactctggaggctgaggtgggagattgcttgagccagggaggtcaaagctgcagtgagctatgattgtgccactgcattccagcctgggtgacagagcaaaatcctgtctcagacaaaaataataataagcaaaacagctagagaatctaaacagaagtggaatgggtaagatcgcctcagtggtatatcatgtagcattaattgatgatatgtagaatgtaagggaaagaaggtattttgaaggtgttttcattgacgtttgaatactgggtgccaaactctctactatgccagaggccagggatataaacaagaggaagacagcttgccctctaggagctcttaccagaagcattgggctgtggtggtataggtacagggaagacataggaggaaggaagtaagttccccgaccttgaaagagtcagggaaaactaaaggaaagaagaaatcgttgagacagaccctaagatttattggctaagtaaattgggataatatagctaacatgtattgaatgtttattatatacccaatattttgctaagcacttttaattatcccattaattcctctcatccctatgtggtagatgcatgtatcattgtaaaaatgagtaaactgaaacttaaatctgtatctatcttctaaaattcatgtttgaaatcactgtatttactatggcttccagctgtgggaaaattctgcctgtggagatcttcatactttaaggccataagaaaaaatagttttgttggagtaagagaattattttctcttgtttttattttttatttatttatttttcatgttaacatttgaaagttcttgccaacagctgaatatctgttgcttattgttttgagagacctgtctctgaaggaggtaggtgcaaatatggagtaggacagtggttccttcaaaggagaagatcctgtatcatatcctgtatttccatcagatatttcattttcctgacttgggcaatgtgtaaagatatgacaacaagattgacaatttgggaaaacgtttaggaaagaataacagggacaggatgtgacttggaaagttcgttgcttagagtagcaaggtttgattctttttgatcaacaatatagacttttccatcctcttactgtgagaatttctactccatgctttgttacatgagaattctgagattagtgctatttcaaccacttttatgggggtttgttaggataaaattgcactgagtgcctgttctaaaaccaaaggcagcaggagagccctgagtctctgccatcagtagtgccactgcagtactcacgagaaacctggggaatgaagacttgcctggcagctttcatttgaatctttttaaaaagagcctttgattttgatgttttccaatataggaagtaacttactacctaggaggtggtgaaacatgacatagttatatatagtaaaaagaacaaaaaccatgcaatcagaggattttaaaaatattaagtccatttagttttctatgaataggttttagtgaaaactgtcactaggcattttagaaatgaagaaaatgaaatcagtgtgttatacacataggaactggcatttttttggttcccaccatctggaatagtcttacagatcggaggcactcggtaagttatttgtggaaagaatggatgaaagctgtgaagattctggtttcctattaatgctaatatgccatgctcatgtaaacatactgatggattgcttgccaagttttcctcttctgatgcttctcaaacatcaaagatgtttatagaacccttctggccggacacggtggcttacacctgtaatcccaacactttgggaggccgaggcaggcggatcatgaggtcaggagatcgagaccagcctggccaacacggtgaaaccccatctctactaaaaatacaaaaaattagccgggcgtggtggcgggtgcctgtaatcccagctactcgggaggctgaggcaggagaatggagtgaacccgggaggcggagcttgcagtgagcttaggtcgcaccactgcactccagcctgggcgacagagtgagactctgtcttaaaaaaaaacaacaacaagaaaaccccttctaactcttgaacttggttcacctggaaaagcaaaagaactagaatagctaaaacaattttgaaaaggaaggataaagttgaaggcatcacactatccaattttaagacttagtttgtagctacagtaatcaagtcagtagtatcaatgtaggggtagacaaatagatcaatgaaatagagtctagaaatagactcacacaggcatggccaacttttcgacataagtgcagcacacctcactggagaaatggtaatcttttcaacacatggtactggaacaaccggacatctgtaggcaaaaaagtgaacctttgccgaaaccttacactttatacaaaaattaactcaaaatgaaccatagatttaaatataaaatgtaaaactataaagcttttaagagagcacataggagaaaatcttcatgacctgggggttggaagaagagttcttaggcatgacactaaaagcacaattgtaaaagaaaaaaattggtaaattagacttcaaaattacaaacttttgctgcatgaatggccctaattaggaggatgaaacatggccataaaatgggagaaaatatttgcaaatcatatgacaaagaactttaatccagaatatataaggaacttgctaaactcaataataaaaaaaaaaattcacttagaaaataagctgtaatttcagcactttgggaggtcaaggtgggaggatcgcttgagcccaggagttcaagaccggcctgggcaacatagtgctgtctccacaaaataaaaataattagctgggtgtggtagcacgtgcccgtagtcccagctacttgggaggtgggaggatcacttgagcctgggagttcaaggctgcaatgagccgtgatcatgccattgcactcccagcctgggcaacagagcaagaccttgtcttaaaaaaaaaaaaaaaaaaacatagaaaatgggcaaaagacttgaacagatacttcagcaaaaagaatgtaggggtgacatataagtacacatagatgttaaacattattcgttcaccattagggtagtgcaaattaaaaccacaataagataccataccacacctattagaatggctaaaataaaatataatgccaatactggccaggtgcggtggctcacgcctgtaatcccagcactttgggagcccaaggcaggcggatcactaggttaggagttcgagaccagcctgaccaacatggtgaaaccccgtctctactaaaaatagaaaaattagccaggcgtggtggtgggcatctgtaatcccagcaactcaggaggctgaggcaggagaattgcttgaaccctggaggcggaggttgcagtgacccgagattgcaccactgcacaccagtctgggcgacagatcaagactccgtcttgggggtaaaaaaaaaaatgccaataccaagcactggtgaggatgtggggaaactagatttctcatccattgctagtgggaatgtaaaatggtactgtggtcaagtaatttcaatgacaactaatatttgaatcataaataatgtcaagctgctttatatacttcttgtgctatcaaaagttaaacaagaagtgagatctccacttgaagtcaggagtttgagactagcctgggcaaaatggcatctctactaaaaatacaaaaattagacgggttggtggtgggcatttgtaatcccagctacttgggaggctgaggcaagtgaattgctggaacccgggaagcggagattgcagtgagccaagattgcgccactgcactccatcctgggtgacagagcgagatgctgtctcaaaaaaaaaaaaaaaaaaaagtgagatctccattccagtacaaatttgtagtggatatatttttcaaactgaaattacagttctagtagtgatttttagacctcgatgatgtatgaggcaaatttccatatttcaagatccgtgtattttggaaatagtggcaatggttgtatagtattgtgaatataattaatgcctctgaattctatacacttaaaatggctaaaatggcaaattttatgttatatatattttgccacatagaaataatccatttaactgtggcatttagttgcttccacataactttccattgaaagtgattaatctgcagtggggtgcatgcatgtaatgatatgataaaggtaaatgtcaagagaggaatctaatagaattctataatgtcttccatgagataaaaggctcaattaaaaatgtgtattcctggatttagctcagtatttggaagttcctgtctttttttttttttttttttttgagacagggtcttgctctgtcacccaggctggagtgcagtggcacaatcttaactcattgcaatctctgcctccctggttcaagagatcctcctacctcagcctcctgagtatctgggactataggtgtgtgccaccacgccctgctaatttttgtatttttggtagagatggggattcaccatgttgaccaggctggtttcagactcctgacctaaggagtctgcctgcctttgcctcccaaagtgctgggcttacaggtgtgagccactgcgcccagcccggcagtaccttcacgaagacatttgcaaaagtggaattgtagactctcattgcaaatcagcattcatagatgaagatttgcaatcaattttgatgaaagggaaaactattttaaaccccagttaagtgaaatgttattcccccataaaagaatttcattcttctcatcagtagacctgcattacaaaaaattgtactcaattattataatctgaattgtgtcaacattttgtggagatttgttttctcttgtaataggagtacctacttaatatctttgattttgcctcttagcccacaaaactgaaaatatttacctctggccttttacagaaaatgtttgtcaacccctagcttaaagcattgatttttctctttttcttcttttatttttttattttttattttttttttgagacggagtctcgctctttcgctcaggccggagtgcagtggcgctatcttggctcactgcaagctccgcctcccaggttcacaccgttctcctgcttcagcctcccgagtagctgggactataggtgcctgccatggcgcccagctaattttttgtatttttttttagtagagacggggtttcaccgtgttagccaggatggtctcgatctcctgacctcgtgatccgcccaccttggcctcccaaagtgctaggattacaggcgtatatgctttgaaagcgatgaaaatctcaccttattctctgttttagctgcatcccagagatgttgatgtattgcagtttcatactgtttagcacagaatatgttctggtttccatttaatgccttctttttatttattaatttaaagagatagagtcttgttctgttgcccagtctggagtgtagtggtgagatcaaagttcactgcagcctcaaactcctgagctcaagcaatcctcccacctcagcctcctgagtagttgagattatataggtacaaattgtcatgcccgtttgatgttttctttcacttacattacttagaagtatattgcataatttctgaacattcagatattttaaaaatctttgttactgaactctaattaaatcctaaagtggtcagagtgcatgtatacatgatgtcagtcttgagatttgttgaggtttgctttatagcccaatgtatagtccattttggcaatgtatttgaagtgacatttttcagatcttttgtcatcttctgaagctttggatatccaaataaggctggtccctgtaacattctgtacctactctgtacagattcccagtttctactcacttaaagtaggtgtgcttgtatttttagtgtatctttctctctcaatccaggaggttttttccttccccttgtgattatatgcagctcataggtaagaaaaacctttgtaatgtacttaaatctcagcagtcctcagctcattatcaagtgccgtagtccctaaccactaaattaagtgttgaccttatacataaggacttcatttaagagcgagttcgttcttgttgttgactcctgtcatgttgtaccattattctcttgaaactggtctgacttgcctttgacaaaaggaaaggagtgtgctttgcagggctatgtgctttcctaataccagaagttatctaaagatacttaactgtgctgtgaactaaagctattgtgtttgatctgcccaggcatccagctgactcctgtatacaaaattctacccgttcagttctgttaatgtttaagttcccgctgttctttggtgggaaaggaggtgatgtataaaaatcaactgctttgtataaggcttggtgtgttaggtgctaaaccacttaactttttcttgatttggggatctattctccttgtttttttgtttgtttgtttgttttttgttttttttttccttcttttagagacagagtcttgctctgtcacccaggctggagtgcagtggtacgatcatagctcattgcagcctccaactcctgggctgaagtcatcctcctgcctccatctcccaagtagctggtactgcaggcacgcatcaccatgcctggctgattttttttttttactttttgtagagatggtgtgttgctgtgttgcccagggtggtcttgaactcctgagctcaaccgatccttccaaagtgtcaggattacaggcgcgagccaccatgcccagctgagatctgttttttactgtttcacaataattgctggaaatatttgtaataatgtgactttcactgctaagacagaaaaggaagataaggaaattgaggaaaatgaagcttctgcttctacaacaggaaagcataaacgtttgagttacttttagagtaaacgggggataagtgtgtctagattcttgacccaccctcttctgccacagtcagacttagaatgcacttttgcatgcacttttgttaatctaatgaacgaacatttatacactttctagttagtaaatacgtgtaactttatatttcagctcatgagatcctttgctgcgtgctgcagggaagtgtagagctcttcagctgtgcagccaggataagaactcacgttctgttctccctgctgctgctgtgacaggggaggcacgtgtacatccaggctctttctgtgtggcagggctgtttaattggggctgatggaaatttttgtcataggaaatgggcaatcagattttcagttagtagtgaaataattgactctcaatccatattgggaaacagaagataaaacatttggtaataaaaatgtaaattttagaacatagaacacaaagagtggtccataagctgggcgcggcagctcacacctataatcccaacactttgggaggctgaggtgggcggatcacgaggtcaagagatcaagaccatcctggccaacatggtgaaaccccgtgtctactaaaaatacaaaaattagctgggcatggtggtgcacgcctgtaacccccctactcggaggctgagacatgagaattgcttgaaccggggaggctgagattgcagtgatccaagatcatgccactgcactccggcctgggcaacagagcgagactccatctcaaaaataaaataaaataaaaacagggccgggcgcggtggctcatgcctgtaatcccagcactttgggaggccaaggcaggtggatcatgaggtcaggagttcgaaaccagcctgaccaacatggtgaaaccccacctctactaaaaatacaaaaattagccaggcatggtggcacatccctgtaatcccagctactcaggaggctgaggcaggagaattgcttgaacccgggaggtggaggttgcaatgagccgagattgcgccactgcactccagcctgggtgacagagggagactctatctcaaaaaaacccaaaaaaacaaagagcggaccctaatgtaacctatggacttcagttaataatgaatctgtattggctcatcaattgtaacaaaggtaccacactaatggaagatgttaataataggaaaaacagatgaggaggacgggagaggtacagaggtatatgggagcattctgtactatctgattagtttttctgtaaaacctaaagatgctaaaaaaaaaaaaaagaaaactgtttaaaatttttaaatatctagcttaatgttccccaatgggttcaaatcatacaaagttagtgtttaacctcctgacccttgcttggaatttctcagttaagatgagtccagtttgcagtttgagctgtttcatcagttccgtttgcctctcgcctgtgtattaactgtgctcttgcctttctccctatctgctggaacagttggaatgccaagatgccttggaaacagcagcccgagccgagggcctctctcttgatgcctccatgcattctcagctcagaatcctggatgaggagcatcccaagggaaagtaccatcatggcttgagtgctctgaagcccatccggactacttccaagtaagatgccgtgctgagtgatgacagtgaagcatcaaaggcctttttttttttttttttttttttttgagatggagtcttgctctgtcgccagtggcatgatctcggctcactgcaacctccgcctcctgggttcaagtgattctcctgcctctcagcctcctgagtagctgggactacaggcgtgcaccaccaccaagcccagctaatttttttgtatttttagtagagacggggttacaccatattggccaggatagtctcaatctcctgacctcatgatctgcccgcctcggcctcccaaagtgctgggattacaggtgtgagccaccgcgcccggcccatcaaagccgttttagaacattcaggctaagattagatcatctggggagactggtctttagctaagagctgtgttcactaaacagtgtccattaaacacgggctgccctctccgtgcgtgttgatagctttgtgatttcggttttctctccttagacaccagcacccagtggacaatgctgggcttttttcctgtatgactttttcgtggctttcttctctggcccgtgtggcccacaagaagggggagctctcaatggaagacgtgtggtctctgtccaagcacgagtcttctgacgtgaactgcagaaggtaggcgcctctggtccaccctcatctcccccatgccgggtgggcagggcctgagctaggagtgtgaagtccacagctctgtgtctttaaagagccgagctgtccagtggagggcgggcggcctggggatgactttctctttgctcttttgctttatctcctatttcacctttgatcctgttttaaccacgggctttctctctctctctcagccccgcttctcttcctgagtctgcagggagattatgttgctgccttgtgacagaatacatttttgtggtagctgattgtcatgattaaaatgtagtttacaactttacattttaccacaggaaccttcagaaagggttgggggcccctgaaaaagaaagttcttattcacaaattgcattcagggatcattttcctgggtggaaagaaaggcttttgctctcatcattttctgtatcctgggaggctccttatacagggtaaatgtgtagttccctaggaagggtattttttcccagaaggtgaagactatgtacataattttaaaggagagacttgtgtgagtggtggcaaaacctggagacaaaaagtggtggcaggcggggagctaggtgtgcctttcccccgaggagatgtgtaacgaggacgtgtgcccttgttaagactagagagactgtggcaagaagagctgaatgaagttgggccagacgctgcttccctgcgaagggttgtgtggatcttctgccgcaccaggctcatcctgtccatcgtgtgcctgatgatcacgcagctggctggcttcagtggaccagtaagttctaaccatcctttccgacagtctccaggggcccggccacggccagctctaacactcttattctgttgcagaggttgtgctcagctttgggctaggtagcagtcttagagatgccttcaggtctgttgaaaggggtcgatggattttggcaacagctggaaggatgaaagggcagtgttgccagagaagaaatggaactggcttgatttctgggtgggggtgaaatggaactgactccagttctgcacaggactgtgcttctcggttgtgtgttaacatgaactgacagtcggtgcaggcagatgtgtcttgcagtgctatgagtgggtgagagcacgttgtgtggcccgggctggtgagccagcaccgggaacataccaagtgcctggaggcagttatcacatgtttggcaggtctgtggcaaataagccctgagaaaactagaggactgtcgaggattttagagtctgacctggagtccgtttaagtttggcttatagtgtgactgtgtggcaagtgttggggtggcagccgtggttttccccagtctgtactgatgcagagtagacaagagagcctttgacgttcactctgtttcctgggcacctgtttcttacacctgctgtgctgccttacacttgagaccttgattaaatctattctctacacatttgccttgaggcatcggagcagtagtactgcttgtactgtgcgttttccatatgtgggtaagctggaggttcatggttttggtaagtatgtgcctaagatgcatggcaattaggtaaaactaatttgcagttttgtttttgtttttatttttttaacgtttgatgcctcttgttaaagttttgatctcttttctgaagcagagaacactacttttctggtattgggtttctatattattaataattgaccaactaacatactttatataaaagttttaagtaagaaggaccatgtaactgaaatgttgtgttatgtaatttaccaaaatggcaaacattttcatagagccagcttcccccaagaagagcttctgtcattgtttcactacagggctggtggctgctctgatctcatagaattcattcctctgggtagcaccatatgcaggctttgcgaataaagtgatcatgggctttcttgattccatttggccaatgcaagaacttcattggctcccctctaaaaaaaattccatggattgctgggatttttattttttattttttgaaaaaaatggtacctatccgtattcagcttggtggcttcacagtccctcccctgaacatccgtatattccttattctctcatttatggtgcagaacactggggtactaacctctaggaaactgttctagctgccagggaaagctaagagccctcctttaacaggaaagcagcagcatgctttttcttctctctgccgtttcagggaagagcaccttaaggccagtgttatttcatgggattctgccctagagctgagaaagtaatggactcatccataatctcttttatagatttgaaagtgtaaacaatacacacttccttttttggaactccaattctaatatgtttctttttcattggaaattgaaaaaccaggctggttttgagattagtactagcagtgagtaaacctcctgtctgtggacttaaatccttttgaggaacatttcgttttagatttttacaagttttctaatctggcacgactttcaaactagcttaatctgttcttacagaaacctgtgtaaggacagactgcccacatacgggctccccaaataaaatggcatttttatttcttgtccctgctcgggtttcaccgaaccttggtagccataatcagaacaaatgaaacacagtcaagttgttgtgttctgtttgtttttacctgccagccagctgatgctgacatttatacaccaagatgatccaaggttttggtgacgccggtggggactgccgctatatgtgcagggtgcccgggggtcatagtaatgttaatggagtaccagaatctctaacagtgtggtcctgtgtagccacattgctacacttacagagatgctttggggcctttttggattaagacagttctaaaagaccaggcctcacctatgatctgtgtataaagaattagcatcgcactgtagatctgcaagagaaggccgcctcctgcagtgctctctcttggtgaatgctaactctgctcgagggccttttggggaaaggacagtgtaaaacccttagagaggtaagtttcccacccttccaacctctctccacctgcagcttgcttggtgctgtcaggatctggatttggggggagtctctctgtagtggaaccagtgacagaagctgttctttagaattttcaggatggctgtattctgcggtcagaatgagagagtcaagctgggcagaatctctcgccaagagttcaggtaaggtaatgtttattcactgggaatgctttccacagccagacagctatgctaacagtctcaagttttcttccagtttgtttagatttaaatgatacatttgtaactttttaaaaactaaattttggttggatttttcatgaaaacctcttttttctttatcccctaaaaaatggtttgaaatgtcattgttatttaaaaacccgatgtgttggaacttctttaatctgctgtttcctctttttccccccctttgaaagtttcgcatagtgtaaacattcactatgtcttttaccttccctgctcctcccatctgggaggcgctgatgctattacccagtgctgaaaaatggcactctaaaggtatgggaaggaaggagcccaaggcaaccacctgctgtcctttcagccttcctttggagactgctccatcagtgccgaggtgtgtgggaacaggcttcactgcaccgccatcttactgagttgcttcacgtgaggaaaagggggctttggccctgtgactcagttccacattttggattgcatactggaaaagaagccaatcttcttgctagtaaaccagcaacccggctgtatacagtggtgacccaagcaatggatataaacctaaaaatctgagggaggggagaggtggaatacagtagttcttggaatctgaagtctcctatttgatcaggttatttcctgggacttggcaaaaatctgattggtggggatctcctaggacctagtggacatctggtattaatttaatctcaggaaaaacaagaaattaacccagagagagtctgggttttggaattcagcgtagctacctccagaccgtggtgtctggcctccatttttgtctgtcattcagctctgacttacagctgcagtcacctttgctataaggcacctgggtagaagggtggatgggcttcacatcaatttttttcttcctttagggtgggggattggtttggctttcttttgttgtggttttttgttttatttttgtcaagattgatttttagatgcaaggacttgaaaagacccagaaggatgccaccagtttttccttgaggcctaggattttttattctgtcccgagcagaggtaattcctcacaacttagtgcaccagtagcaccagccattttgagcagagtacctctttggggagcttttcgttttgttttgtttttaattctctttccttagcagcaaggtcttttttcctagagaatctactccgttgcagaatcattgcaacctcaggagccctcactgattgagtgctgtcagcctgatatactactttggactctggaaacagatatgggttctattctctatttctactgtgtgtcgttaaacaaccgtcggagaccagatgacctgttagatggctagtcctgtataactcgactctgtatgtttcaatgtatgttactgcaatgcttcacctgctgtacagtgtttgtgagatgctctttgaagatggtacttttatattttttcattttcaataaaagtacattccttcccacttcctggtatttaatactgttgctgaatgtgccttgtgtgagtgtgtgctccggcgttgcaggacctcagctggaggtggcactcggtggttcttgggggctggccgccttccctctgcaggtggtgttagacatatgctacctgaggtaacatgttttcatttttgggagggagtcgggagtggggcgggcccatgggagggtctctggatttttgatagcctgctttgtttgctctcttctgtactattaaactgctgatgtttattttcaggaatgttttgcaaatgcacttctcactcttccccagtacaactgtaggtacactgttcctttttatcaaataagcacgtttgaaacgatccaaaaaaaaggtcttaatttcatgtaaacaaatgtatccatgtgtggagatactggaataaggtcaaagctatacttttgaatgaccatgtgtttagagttaatttcagctcattgataggtttatgttacattagaaagagtaatggttttgatgatgtcctgtaaggaagaaagtttgcaattagacctagctcctgcagaatgccctgagtaagttactgcaggcagcttgtaataattgggtcttccaaagttttgctttgcttgcgcactggtccctgagtggagctgcctactctttctaacttaacataaaactatggcattgtgtgtgagtgccgtggagatgttgacagtggtgtgtgtctctccctgtaggccttcatggtgaaacacctcttggagtatacccaggcaacagagtctaacctgcagtacagcttgttgttagtgctgggcctcctcctgacggaaatcgtgcggtcttggtcgcttgcactgacttgggcattgaattaccgaaccggtgtccgcttgcggggggccatcctaaccatggcatttaagaagatccttaagttaaagaacattaaagagaaatccctgggtgaggtgagtgaggggtgtttgcttcacagcagagagcaacttcctagcttgaggttcattcctctagggccctgccttatcctttatcttcctcctgagacaaatgaaccgtgtccttgcagggtcccctcactactctttgtatcttatagctcatcaacatttgctccaacgatgggcagagaatgtttgaggcagcagccgttggcagcctgctggctggaggacccgttgttgccatcttaggcatgatttataatgtaattattctgggaccaacaggcttcctgggatcagctgtttttatcctcttttacccagcaatggtgagtaagcctcccagctgaatcctggcagcttctccttaggagatgagttacttccattgggttatagtaggcattgctgaggtctcacagctctgattggaaatttcctcaaagcaggttcaatctagagctcgatagtgcttgctctatagggacagaattttgacttgagaggaggtaaggtgtcacttgcatgaaagagagtctgaatgagaaggtcagctggtgaaccctgtcccacttgacataggagtgtttgagtcactgcgttggagttggtgctaagtgatagggccctcctgcctcccctttggaagcactcagtctctgtggtcactattgagaataaatactttcttgtcttcattgccttataaagagataagaattcagtaatgttttattacaattcaataggtcacttttattaaagacagtacgattacataacatttggcccatcctagcaagcaggattatatgctcattttattgagaatgaccttaagcagattaggtagttctcaagtttgaatgagctttaatttggcgtggcatcgcttttcctttcagatgtttgcatcacggctcacagcatatttcaggagaaaatgcgtggccgccacggatgaacgtgtccagaagatgaatgaagttcttacttacattaaatttatcaaaatgtatgcctgggtcaaagcattttctcagagtgttcaaagtgagtttaaagattttgtatgtgcatgtggtagaaggaccttggattctttgggtcttataattcacacactttgctttctgagcacattacgtactaggactagtgtctagtatcgtaggacataatatcatagaatctttgtgttcaaaagggatcttagaggtttgaacccataacctcatctcactgatgaggaaattgagacctgggaaaatgttgatttttcccagttaaaacacagctagttaggaataatccagtttcgaagccccctgtgtatattctcatcctgcccatgattttccagcctggtcatgaggctttcacagaagacaatatcaaattactactgagagcatcacctttgcccactctactctgtggtttcacgggaaatagtttgtggcccttgaggtaaactgggagtcaggatggctggatgctggtcctagctctgtcaaacgtgtaagtgcccacaaagctaggagaaatggcacagatggggcattcagaaagatctcaacacaaattgaaccagtgtgccttgaaacaggtgaaatttaagtagtagataattaaaaacaaacacatagatacttaatttaaataaaagagatgaggctgttggtggaccataacctcatcaggagctgagtccagtgctgtgaaacagtcaatgcattatagttggagtagaaatacagtgttcaggccaggcgccagtggctcacgcctgtaatcccagcagtttgggaggctgagttacgtggatcacctgagttcaggagttcaagaccagcctggccaatatagtgaaaccccgtctgtactaaaaatacaaaaataagctgggtgtggtggtgcatgcctgtaatcccagctattcgtgaggcagagacaggagaatcgcttgaacccaagaggcggaggttgcagtgagctgagatcacaccattacactccagcctgggtgtcgcagcgagactgtctcaaaaaaaaaaaaaaaaaacaaaacagtgttcagagcaaggcagctgttgttttcctttcattgagtaaccttcaggaacatgatgtccaattctggaatctacatttgatttatgagggctgttaagctaagaagcatccagaggagatgagcactcaagaggtgcccagcagtggacggggctgccttgttaagcagtgagtttgtttctactagagtggaacaaatggattctgaatggacatctgccagcaggttgatggcaggatggctgccactggtcccttctggctctctgattctgtagttttatgatcttttttctgaaatttccctcatccatcagcccctgactggttatctttacctgtatgtattaatttgaaaagagtgttcttactcattatagacatggccaaggtgtataatacatgttcaagtaaggagttcagtgtttttatgtgacttacaagctagctgtgaagatagttcccaatgccttaggcagtggtaatacctttaaggtcagtgtataccctcttagaagaattaagtatttgccaggtacagtggtacatgcctgtaatcccagcactttgggaggcctaggcgagtagatcacctaaggtcaggagttcaagagcagcctggccaaaatggcaaaaccccgtctctactaaaaatacaaaaattagctaggcgtggtggcacagcctgtaatcctagctactcaagaggccgaggcaggaggatcacttgaacccaggaggcagaggttgcagtgagctgagatcacaccactgcactccagcctcggcaacagagtgagactcccgtcttaaaaaaaaaaaaagtattggccgggcgaggtggctcatgcctttagtctccacgctttggaaggagagacaggatcactagagcccaggagttcaagaccagcctggacaacgtactgagacctcctctctacaaaaaataaaacataactgggcatggtagtgcacatctgtggtcccagctacttgggaggctaagatgggaggatcacttgagccatggaggttgaggctgcggtgagccgtgattgtgccactgcactccagcctgagcaacagagcgagacctcgtctgaaaaaaaagtatcttattgttctgcttcctgctccacggtcttcagtacactatggttgctttgctaatatgggggttgattttgcaaatatttaagaaaaatcattctgcctatagaaattgtatttcacctatcttcttccggttgtcattactgcatttttatatggaagcttctatcccactgccaacatacagcaggcactctgggaaatgttagttccctccccactgccccttttttttttttttttgagataaggcctggctttgtcacccagtctggaatacagcggtgcaatctcggtgcactgcaacttccacctcccaggttcaggcaattctccggcctcagcctcccaagtagctgggatcataggcgtgtactaccacacccggctaatttttgtatttttagcagggacggggttttgccgtgttggccaggctggtctcgaacacctgacctcaggtgattccccctgctttgggcctcccaaagtactgggattataggcatgagccaccgcacctggcctcttagtccctccctttttaattctccagtgccattgtgttgtctttcctattaattccttaggcaaaaagtcaacaacaaccaggtaagcaaacacaactgccaattatagatacaattaatgtgttcattccttctcaacctaagaaatttacaagaagaatcagaaaaaggtatcatagaagatgatgattgagttcatacatagtgactgctttctgttagattcattcctgtcacttgatccatttcaaacctcagccttttataccagctttagtggtagagttgatagtcataggtgttgaagggtggctggagacctacagagtcttgtttggaggtggaggaacaacatccctaggcttcttttaacttgctttgaaattggcttgctttttattcatagaaatccgcgaggaggagcgtcggatattggaaaaagctgggtacttccagagcatcactgtgggtgtggctcccattgtggtggtgattgccagcgtggtgaccttctctgttcatatgaccctgggcttcgatctgacagcagcacaggtcagggaaccctcagggatggggaacattttagaaataccacatttgctggaggctgaggcaggaaaatcacttgaacccaggtggtggaggttacagtgagccaagatcatgccattgcactccagcctgggggacagagcaagactccatctcaaaacaaaacaaacaaacaaacaaaaaaaaaataccacatatggagatgatgctgtggtcctctccttactggacctggaggttcccccaagaattagtaggtattttttcattcatgggattaagctgagaagcagaagagtggggagccagcccttatgcacaaatagtgtatgagttgtttttagtcaacataagtttgagtttaattctgaaattacagatcatcctgtggttcatatttactgacaattttaattgaaggtctcaaaaactctacttaaaaaaaaatgtggccaggcatggtggctcacgcctgtaatcccagcactttgggaggccgaggcgggcggatcacttgaggtcagaagtttgagaccagcctggccaacatggtgaaaccctgtctctactaaaaatacaaaaattagctgggcatagtggtgcatgcctgtaatcccagctactcgggaggctgaggcaggagaattgcttgaacctgggaggtggaagttgcagtgagccaagatcgtgtcactgcactccagcctgggcgacagagcgagactccgtctcaaaaaaaaaaaaatgtaattgacttgtaataacagctgaccgtgaagttgcagccttcctagcgcctgagaggaaattcatggtgtcaggttacttcagttgcatagcatcattaggcacagtttcttctcttctcctattttcaggctttcacagtggtgacagtcttcaattccatgacttttgctttgaaagtaacaccgttttcagtaaagtccctctcagaagcctcagtggctgttgacagatttaaggtaagtggctccttcccctgcccccgtgtcaggagccctccccacacaactaactgctggctctgttcaaggggccacccaggctggcctcactgggcttaagcttggctttggccttttggcaagttggtaagaaaaagggggcagtggaggagactgaattgagggatgagacttgtcaccttttttaattaatgtgaatttttaccttttgtgaacggccatgatctgggctcccaggattgcagagttcccctttagagctagccccttccacctgggcctgacatggatgtgtcgcaactcactgggccttgaagtggcttaaacctagaagaccagcactgtggggcatcttccccttgatctttgctactgtcactttgattgattgacatgctgaatcctttttgatactttctttttcctgccctgtggtgctactcacgatgcagggaaagcagttacatggaaatagtcataaaactaggtcatgttgagaagtgcagttaagtaagtctcagcttcttttcttgcaggtggttagttgatcataccttggctgtgttctttgttccttcagaatactacacatacatgatacaaaagggagtatatttgggagggtggagagaaatagatatttgatagtggttaatacttaacaaaaaaagggatgccatgtgggctggaattccttgatgttgccactgcatagattagctcctatgtccctgcttgtctttattggccagtgagaggaataagaaagcaattttggtgatgtgaaggcttgaagctcacatgtttgagggatgaatataatcatcttggaggttcaggagaaaacaaattggattttcttcttaagaaacatggaaactcagttcccgagatttgtttgtattctacttgtttacagttgaccgggtgacttttatttggtcaagaaagctagtcctggctgggtgtggtggctcacacctgtaatcccagctctttgggaggctgaggcaggtggctcacttgagcccaggagttcaagaccagcctgggcaacacagcaagaccccgtctctacaaaaaaataaaaaaatagccaggtgcagtggtgtgcgcccacagtcctagctacccggggggctgaggtgggaagattgcttgagcccaggaggtcgagcctgcagtgagttatgatcatggcactgcactccagcctgggcaacagaatgagactcttatctgtgtttttgtttttttttgttgttgtttgtttgtttcttacaaaaagagaagaaagaaaaaggaagggagggagggaagagagagaaggaaggaaggagagaagagagaaaggaagaaagctagtcttcgaatgtgcccctcccccaccccaacgtggccacttcttagaaaaccaagagctgagtcatatgaaaaaaaatggcctaatgggactcagagctttattttgctgaatccgcaataaccagtcgtggatgaaagcaaatgtttgaccataagttctccctgctgttcatttctatattcttgttagtgaatggatttggtagcactttggataaagtaagggcatgtagtgtaggttggtcctccccttgtttttcgagggctctcatctcctgcttattagtgaggacttggattagcaggtggctttcacatcataggtccctcctctctccaggaagcctcagaattaatagtagaagcagcaccacccacagctctatttgatgccccatgagactttagaccccttctatcttacttctcttggtggtctcagtctctttttttccttgttattctttttttaattagatgcttggcacaagataacaagtatttatggccagccttggtggctcacgcctgtaatcccaacactttgggaggctgaggtggttggatcacttgaggtcaggagttcaagaccagcctggccaacatggtaaaaccctgtctctactaaaaatccaaaaaattagccaggtgtggtggtgtgtgcctgtagtcccagctactcgggaggctgaggcaggagaatcgcttgaacctgggaggtaggggttgccatgagtcgagatcgcgccactgcactccagcctgggcaacacagcgagactctgtctcagaaaaaaaaagataacgagtgtttattacttaattcctcccgaactctaagccggttctttcttcttatcttcagatgtctattaattagaattacattgactttatgagggttggggggctgttttttaggtgtaaggcaactgtttattatgtttctgagtacgttaaaggaagtttgcctcaatcttgggggaccatctaaggcagccttttgaaaacaacagaactgttcctgggattgtatctccccaaaagcatctgccctctcatcatttttagaagatggaatatagaataacaaggatgagacttgcttctttgattcattttacagaccttgaaactcactgacgatgttgcagagccctgcttttcaccctgtgtcttgttttacatcattttctttctttcttttttaaattggagttggagatctgacagatttgcaagtatagtcttttctctatttcacctaccctgcaagtgcatatggcaggagaacttgttgcttcctgttgggtagtatgcataaagaataggaaaagagatataaaatttatttatgtaacctgtaatttattgatttgataacctgtagaaaggcagtgtgaagctgcactgattgtcaccagtggaatagggtggcttgctctagcaaatacagacacaggacacccagtgaaatactgcatggaatatacttatactgaaaaattattattgtttttctggaattaaatttaacgggggcccggcatggtggctcacgcctgtaatcctaagcactttgggaggctgagcaggtggatctcttgaggccaggagttcgagaccagcctggccaacattatgaaaccccgtctctactaaaaatacaaaaattagctgggtgtggtggtgggcacctgtaatcccagctactcaggagggctgacacaggagaatggcatgaacctgggaggcagaggttgcagtgagctgagattgcgccactgcattccagcctgggtgacagagtgagatcctgtctcaaaaaataaataaatacattaattaattaatttaactgggcatcttatatttatctggcaaccctgtgagtagtcccctcttctgttctcaacagattcattctgatttgattcttctagtgaatgaatagtgttttcatggtcagtgtcctgtgataaagttgaggcttatggtttataggtttatatggttataggtttatgttatatctaagattctgttgttctgacaggtgcaaattcaagtagatacaagttcaagtatggggaggcccttctctgcctcttagcacgtcagggcagagtgatctgaagccgaaactctcctggtagaagggagggtaaggctgcggggagtaggaaggaaacatggggctggagctgtgaaaaccagtaggtactggcatgtttcttaatagttcattgaggcctaaaagaccttcatcctttgaataactctttaagggagagaaatgatggaaattctgtcggcatgtggttttactctgtgaaggtgatcaaaatgtttggcatgttactcttagttcaatctctcaggaaggctttgaacaaatgaaagcagcagccatttcagcaagcgggggccacacctaaggttactcgagagtgaagattatctcagaagtttagaatcatgacacttcggggaagataggatcagggatgaatgggagacgggggcttaagggagagcttagaagtttagaatctaagagagaaagggtttgtttttggggagagggattatgtatgatatttaatagcacctgcaaactttaagatagctggggggttctcagtaactaaggagggtcctgaccctaaaagctatcttttctctaaagattttgtaatgtttaaaatttttttaaattaagataaatatattttaaatcatactgtgaatccaactggtatagcattctgtagagaagatcactggcttaagaggattgttagaaggtggctcacacctgtaatcccagcactttgggaggctgaggcgggtggatcacgaggtcaggagatctagacatcctggctaatatagtgaaaccctgtctctactaaaaatacaaaaaattagccaggcgtggtggcgggcacctgtagtcccagctactcgggaagctgaggcaggaaaatggcgtgaactcaggaggcggagcttgcaatgagccgagattgcaccactgcactccagcctgggcgacacagcgagactccatctcaccaaaaaaaaaaaaaaaaaaaagtggattcaaagtcttacgggaaaatcctgggctgtgatttattgtgatcagtgttttacatcttaatttcagaaacatttccctcttcaagagttcattcttcagctgggtgcggtggctcacgcctgtaatcccagcactttgggaggctgaggcaggcagatcacttgagcccaggagctcaagaccagcctggccaacatagtgaaaccccatctctacaaaaaaatacaaaaattagccgggcatggtggcacgtgcctgtaatttcagctacttgggaggctgaggcatcagaatctcttgaacctgggaggtggaggttgcagtgagtcgagatcgtgccactgcactcctatctgggcaacagagcgagactccatctcaaaaaaaaaattatttttcttttaacataactcaggggtctctgggaatgagtgggaggaaagtgtcttgttctcttcccaagggttgtttctcagggagatacccttcacttccatgcaagcctgttcctttggttgtttgaactctcaagttccaaggcaaggctttgaagacatgagagtttcttggcaagaagatgttctctgcggtagatgaaactttagatactcttttctgacggtagcaatgtaagcctgtgacagtctctactcctagatacatgcggcgctgtgagtgtgggaagtgggcaggctttggcattctgcaggaggggtctggaaggaaaacacgtagtgagcatctgtactggaggtcagcatgccctttgcttttcctacctgctttttactactccttagaacaaggggctacgtgccagtcagttaaatgtcattaggtccgctttaggctggctgagggggaaaggcagtttagcatgtaatttgtcatgtggaatattgggtcattgataaggcccctggacctcttgaggttgccccacactcccgtgaccccttgatgggcctgagattgggctgcactaatgagctaccttttgcccttcagcttccttccactgtatagcctgatgtgttttgctacgtgagtgtacgccctaggcttgtctccctggtcttgatccagtgtctcatctttgcacctctctcacaactcctatcagagtttgtttctaatggaagaggttcacatgataaagaacaaaccagccagtcctcacatcaagatagagatgaaaaatgccaccttggcatgggactcctcccactccagtatccagaactcgcccaagctgacccccaaaatgaaaaaagacaagagggcttccaggggcaagaaagagaaggtgaggcagctgcagcgcactgagcatcaggcggtgctggcagagcagaaaggccacctcctcctggacagtgacgagcggcccagtcccgaagaggaagaaggcaagcacatccacctgggccacctgcgcttacagaggacactgcacagcatcgatctggagatccaagaggtaagtggtccgccccctgcctccctgcccgcaccccaccaccccatgctgatctgccaccaataggcggctgctgttccttttcacaaagtgctttgtggctaggagtgattttgaactaaagagcaaattagaccagctctaactctaaaaaaaaaccaactaagcatttagcaacagaaatgaataacaactaatcttatgaggtgatcattttataagcaaggaaatgaaacattcaagaggattttccaggatttttccccaaagaggattctattttagttgtatgtgagctgtgacaattatttctgattgttacaagtctgtgagcgcccttgtgcactaggctgtgcatcatacctggcacatgataggtattctcagtgctactgtgacaacatttgtgttgtaatgatttattcttaatataagttaaggatcgttaacggtagatgatgtcacagcccaggtagcacaagattagtctcagagggcctcctatagggaatggtggaacagagatgccaggttcaaggcttttaaaatacagactatgtatttcggaaccagcaccatattcacaggtccgtgtcattagagggccccggatgtgtatatattcattcattcaacagccatttcatgagtatcaaactccatgccagatgctgtgatagggctgggcacagagccacaaaaacccaaacagacaaaaatcccgtccttcttggagtttacattctagcaggcacagacaggtcgtgagcaaatacaatatattgcatatcagatggtgataagggctatgacagaaggggacagaggctgggcatggtggctcatgcctgtaatcccagcactttgggaggccaaggtgggcagatcacttgagcccaggagttcaagaccagcctggccaatatgttgaacccctgtctctacaacaactaggaaaattagccagctgtacgcctatagttccagctacttgggaggctgaggcaggagaattgcttgagcccaggaggtgtaggttacagtgagctgagatcgcgctactgcactccagcctgggtggcacagtgtgagactcagagtgagtctcaaaaaaaaaaaaaaaggtgggtgaggagagagtgtgctggggcagggagcaggtgtggttacaacttgaataggctgcctgagggaatgccttatttaaaaagtagtatttgggcaaagatcaaaggagatgagggagagagctacctgggtatgggatgggtggggaagaacattccgggccaaaggaacagaaacacagaggccgcaagtggtgagtgtgtctgttattggagtggaatgagcatgggagagagtagtggatgccaagggcagaggtggtgcctgccagagcctctggtgagacttcagctttactccaagtgggaagaggagcctttggaggattcacagcagaatgacatgattggacttatgtatgaagaggatcattctggttgctgcaggggagacaaggaagcaaggagaacagtcaaggctctgttaccacagtaaccgggagaaagatgaggatgtcttagatcaaggttgctggtgggaggtagtaagaaatgtttgtccatgtaactggaagtagggaggaggtttgaatgcagtgtatatgaaaatcagcaactgaccagaggcatggtaagccaatccagaactagactgagaagaggacaaaaagcttccagcccttaaaagctatgagcaagaaggggacacagtctttagtgacaccacttgaaactatgagtgtcattgaagggcatgcaagtcaggtttttacttcagttaactttttttttttttttttttttgagacagagtctggctctgttgcccaggctagagtgcagtagcacgatctcggctcactgcaacctctgcctcccgggttcaagtgattctcctgcctcagcctcccgagtagctgggattataggcacgtgccactgtgcctggctaatttttgtatttttagtagagacggggtttcaccatgttggccaggctggtctcgaactcctcacctcaggtggtctgcctgcctggcctttcaaagtgtggggattataggcgtgagctgctgcatctggccttacttcagttaacgcctaacaggctttttatttagtaactattagcttgattattgaggcagctctaatacattgctatcagctctattagaaaatgattccacacgtgcagctaaaatgtattcttttgctttgtatgttgaccctcattttgcccttcagagcccacagacaatgggagacctttagccatttgaagagagatgccttaattctccctgggcctttgctttagggaagagaaggggaggtaatgtttgccaagtgtcttctgtgcaccaggcatttttctcatttttgatgtctcatttagtcatcatttaatcataagaatagcatttttctcatgtaaatctaactggcctgagcagaggttgaacctgtgacttgacctccttgttgccaccaggcagtaaaccattcagtactcgtggaccatgtcaaaaactatttgttcaactatcagacactgtacttagttttatgaggatactgcctttcctcaaggtgctcagagtccaaagaaggagacagacacagtattaggttaagtcacggggcctggatcacacagttagcaagtgctagtgaagttgggatttagataaagacccatctgcctccagaatccatgctccgtccacactaccactctcccttccttcctggggacacttgaactggcacggggttgtaaacaagtgacccttttgaagtcatctgtctgtcccttgaaaactttcaacaccactttgagaactctttatcttgcctaaggatactcagttaatcatagacttggtgttctacttttttgtgggattgatggtataaatattcctcagatttttggaaatgttttgcatgcaacagtgtccatggtttttattgaaaattaattatgtatacaccctggagaaaaatcataataaaatgatttttaagagtcctgccctctcttctggcaaacaacaaaaacaagtaaataaagaatatgggtggccaggcgtggtggctcatgcctgtaatcccagcactttgggaggccgaggtgggtggatcacttgaggccaggagtttgagacgagcgtgaccaacatggcgaaaccctgtctctactaaaaatataaaaattagctgggtgtagtggtgcatgcctgtaaccccaacaggagaattgcttgaacccggaagcggaagctgcagtgagccaagatcgcaccactgtactccagcctggttgacagagcaagactccatctcaaaataataataataataataaaatgatttttaaaagccctaccctgtcttctaaaaaatgacaaaaacaagtaaatgaagaacatgggttagcagcagaataggaaagaggctgggcctaagaatgacggtgggatactggaatgtgtgcggcatatttactttccccaaagggcttccattcctgttatctcaggtgtctccacagaaacccatgagataggcagctaatgagtgagaaaacaggtaagtggcctgctgagtcatcagggtgacagttctgtatgggtagactacagttaatgtgtttttcctcaagtccttagcgatgagtggttagtagtctctaaatgaccctcctctctgtgtgccttgtccagggtaaactggttggaatctgtggcagtgtgggaagtggaaaaacctctctcatttcagccattttaggccaggtaagatttttgttattgtccttttctgctgctttctctggtttgcaagagtctcaggaaaaacgaacaaatttcctggagagtcaggaaaggtggaaacaaatgaaccctcagcctgcattgtatgcccccaatcccccgcagttccccccagttctcccccttcacagccttctgcctggaaggaggcctggtgggcgcctgatggatgactgactgttgtcccagctggaaccatttggtctcatgccttctttcattcagcatgtatctattgagtgccacaggtatgcccgtgtattgaaaatgtcagagataagagatgagcagacaccctacactgcagcgctgccaacagagttaacctgtaaagaagcagggcggccagcactcccagcctctctgtcagacaggactgtcagggtttgatctagaagcaaagcccctctgttttctgcctaatccctgaaagagtcatgcccttggggagttcatggtccagtggggagcaaggccttgagaacacaacaagcacatctccaggcagggagtgaacagcgtgcagggcccagcacacggtggccagtgctgagagtgagggacaggatggggccggagtcatcccactgagacacactatcattgctgtgttttagaatcaaacaatccagaaaaaaaaaaaaaacaaggtgcccacatgcttttacattagaattaaattaacttgacttagatggttgagatgagcataaacttatgattatctctacaccctgatggataaggtccactgaattgaaatgaaacagagggggagcaggggtgcttttgtagcccccagattatggaatgctttcttgtcttgtttggcatcagctgtcacagttggtgagttgtggtcctccttgagggtggtggtgcctggggctgtctgagtcagatcatggcaggcatcacctccaccttctgctttatgacactctccagtggctgggcccagccattggtcttgtaaaaagcaccagacttcctaggtgatttatgatgaccaaccagatttggagggccagtgaggagagacagagatggggggagggggagaaggaaagaaaaggtcaattcgtaagtgctgctctgccatctagcaatgtgctcctttttccagggttgactaggcagtggttaggttgaaaaccaagtcaggctttgcttctggacaaatcctggcaaccctgtctctggcagggaaacgggttgggctggtcagccctgctttaactgtagtttacatctgttgatagcgctgcaatgtgcggtgtttgtgcagcagccagaagtgccggctttccacagtagaccccctggggacttctgaaccctttgaagtgcacatcagaatgctaccagtttgtggtgtacgtaggtacacctgtgtgtgtacacgctgtgtgagggtgtttgagaagaccagcttatatgaacaagtactgcacaggctggttagtgaaactttgcttcaaagctgtagcatccctaaaccaagacaaatgtctactatcagtcccaaacaaaagaaatcatggaagggggtaaaatggataagtcaattcatatcaaaccattgcaactgaacacaaacttcaaagcacatggttcatcactgcttgtgggcaggcaaggtccatcattggtaaatggacactgtgtatatattataaatactaggtgatgtctaacctggactttttttttcccttggtcctcatttcatagaagcaactggtctagccagcatcctaggtaattgccttggatgagttggcctgcccccatgttgaggcagggattagctggaaacccctacagcatcctctccaggagaattctgcaagaacctcttgcttgtgcttctcctaatttaaacagtttgcacacagcaaatgggctgcagagggaagtgtttgccttcaagttatgggttatgctgagctcccatcacacataagcaaggagaactttgattttctttgctgcttagctctctttggaattaaaggtggaatctggatttgggtccaaaaagcatcccgggaaattaccagagctagattccattgtggaaggtgggggttccgttggcatagggtgatggttttgagttatgatgccattggatggtgtctctctccctagatgacgcttctagagggcagcattgcaatcagtggaaccttcgcttatgtggcccagcaggcctggatcctcaatgctactctgagagacaacatcctgtttgggaaggaatatgatgaagaaaggcaaggaatgtttggcttctgtcatgctttccatcttggccgcgtgagatgcaaggcagccctagtcagcaggctctgctcccgccgtgtccctgacgctgtctctttgtgtcctccagatacaactctgtgctgaacagctgctgcctgaggcctgacctggccattcttcccagcagcgacctgacggaggtacaggccttccgcccctgaccaggcatttagcagagtggcagagctgggccagagctgctcctgggagtgcaactgaaatgcttgggagaagagcctcacagggagttaggctgtcattaggcctttgtgttaggaaagcatgtgtccattagggcagggatgttaacactgcttgttttaaggttgtaagtattttctgtgtcttggggattgtaaacaaaatcccattgttgactcagagttgatgttttttattctatccagatatttttaaaactacaagtaagcgtgtgcatgttgagcatcttccttgaacttgattttgccaacctccttaactcagatagtctgtagagagcccttttctattagaaagagcccttagaacaaatccacatttctttgggtctctgccctgcagcagtttccagaggcttgtctttggaactaatttgtgctcttcagtgttaaaacttgtctcccatgaattgccctgaaggtctctgggattggcacctttatttagctgatttcagttaaatccctcaaaccagatttggtgaatggtttaattactttagaggtccttaaatccatgtccccagatcagcagcatcagcatcagcatcatctgggaacttgttagaaacacaaattcttaggctgttctccagacctactgaatcagaaactctaggggtggggcgcaaaggtctgttttaacaaaccctgcaggtaattctgatgcaacttccagtttgaaaacctctgaattaattgaatatttgacaactgatttattcatttaatcatttagtaacatttattaggtgtttattatgtgccagtgacatgtgcagacactgtttggcactaagaatataaaggaataagacaataatctgcacgtaaagaagtgtacagttaagaggatgagatacccaaacaaataggcacaaaataatctgatgaaaagagccccatctctttggggtactagcgggaaagaggttgggggagatttcagaggagatgatgccagaactgagcagacaaagtagaggcaagcacatgacattgtcatgttcatagtatacacataatttcaaatggcttaggtcccaggatgtggaagggggattgtgcactggaggctgagaactgctggggaactgggtgacaaagggtctggtttgtatgccatgtttggatactcaaggtttatcctttgaggctcttgaagaattttaagcaagggtgggagatggtcagctttgtgttctggaaagatcttcctgccatgtggagaatggattggagggggagcatccgggtggactggcaagaccagatgtaggattgatcggtacccagatggcagtggtagaggaagaggcatctgggccaactcccccacttcgttgaaggatcagcatggcagttcatctgcggggaatcagcatggcagttcatctgcggggaattgacagaaggagctggtctgggtgggcaagaagagaagtgactgggtgacccctccacgctgttctggacttgcgctggaggcttcaccacacttctgggctcttgtagattggagagcgaggagccaacctgagcggtgggcagcgccagaggatcagccttgcccgggccttgtatagtgacaggagcatctacatcctggacgaccccctcagtgccttagatgcccatgtgggcaaccacatcttcaatagtgctatccggaaacatctcaagtccaagacagttctgtttgttacccaccagttacaggtatggttctttcttccctcggctgcctgcctgagtttgggaaatcagaaacagggaggtaggtttgctccaggtatccttgtgttataactagaaattcctggaatcaaggtttcattttcttagcaaattagccccctgtaccaataaagctcactgtaccagtgtaacagatggccatctaaatcagagatccttggagcatatcagcttctgcatatagatcagcaagtaaaagggctgagaggagcaggccaaaaatggagtttgggtataagatagtttggaaagcattgtgttaacatctctatgcaagtgggaactgttttgggaaaacaagcttttctccctctgccattccatcataagcaggcactttggagagcagctcaaggatgttgccatctggctcacatatgttgtcacgtttagggggcaaaccctccattctgccaaagaaagtcataattatgtatatttgtgagtgcagtgaaagggtgtaaatttaatgcagggctcatgtggctccatcagcagattcatgtgaaaaaccggagggactcggccaggcacagtggctcacgcctgtaatccctgcactttgggaggctgaggctggcggatcacctgaggtcaggagttcgagaccaactggtgaaaccccatctctactaaaaatacaaaaattatccaggcatggtggcacgtgcctgcaatcccagctactcaggaggccgaggcaggagaatcccttgaacccaggaggtggaggttaaagtgagctgcgattgcatcattgcactccggcctgggcaacaagagcaagactctgtcacaaaaaaaaaaaaaaaagaaaaaaactggaggaactgctccttatactatgtcacgaggcacaatacactgaagtggggttctcagtgttggcaccactgatgttttggaccagatagtccattgttgtgtggggctgctttgtgcacccctggcctctagccactagataccagtagagacagtcgctggcttacggttcaacttacagttttttgactttatgatggtttccacacaaccattctgtttttcactttcagcatagtattgaaaaaaattgcatgagatattaaacattttattataaaataggctttgtgttagatgattttgcccaactgtaggctaatgtaagggttctgagcatgtttaaggtaggctaggctaagctctgatattttcaatttacgttgggtttatcaggatgtaagcccattgtaaattgaggagcatctgtgtacctctcccccgagttgtgacaaccaaaaatgtctccagctgggcgcggtggctcaggcctgtaatcccagcactttgggaggccgagatgggcggattacctgtacggcaaaaccccgtctctactaaaaatacaaaaaaattagccagacatggtgctgcatgcctgtagtcccagctattcgggaggctgaggcaggagaatcgcttgaacccaggaggcggagattgcagtgaaccgagattgcgccaccacgctccagcgtgaacgacagagcaagactctgcctcaaaaaaaaaaatgtctccagatgctgccaaatgtcttctgggagcttaactcgtctcctgtagagaactactgaactaatgtatgggtttttgaatgtatttgcacaaacagcatattgtgttgtctctgcctttgccttcagtacctggttgactgtgatgaagtgatcttcatgaaagagggctgtattacggaaagaggcacccatgaggaactgatgaatttaaatggtgactatgctaccatttttaataacctgttgctgggagagacaccgccagttgaggtaagatctgatggtgtttgcgtgtgtccccttctgtctctgcaagggaaacacagccggagtgagtgatggagagacctcagctgaatccagtgtctgtgtcttattggcaggggccctgttttctggtgaacagactgctgtgccttagttcacacactgattctgctctaggagagcaggattgtggggctggtgagctgaggtcttctgtcactgagaacttactaatatgacaatggcagggagaaggatatgggctcagtgagggcagagaagatgtgtgctgctgttcattcacagcttagtttcctaagctccatccacctgattgaagcattatgaagctcttttttaaataaacaagtgaataaagtgccaaggtagggaaattaaatattgcatacatttgaaagcactcaggtcaggtgctgcggctcttgctggtaatcccagcatttttggaggctgaggtggacagattgcttgcgcccaggaattcgacaccagcttgggcaacatagagagaaaccccgtctttacaaaaaaatacaaaaattagccaggtgtggtggcaggcgcctgtaatcccagctacttgggagggtgaggcaggagaatcgcttgaacccaggaggcagaggttgcagtgagctaagattgcaccactgcactccaacctgggtgacagagcgtgattccatctcaagaaaaaaaaaagacataagagaaacttggaaaggagagcattaagtagtttctgttatctcaggtagaaccctgatggctgtttattgagtccctgtgtgccctgttataggcagttctcaggggtagggcctgtgcaggttgtaaccatgtgagagacatcatctctgtccttaagggactcacagtgttctagggaagaccgatgcttttatgctcttacaagcacttacaaatgtggcttacaagaccacatcacatgtatagtactaatggagttctaagggcgaatgggagggtgagctttccagggagtgtatgttgcctcatgaagaatggaagacttgaatctatctgaatggggacaactgtgactgcgattgggacaaggggaggggcattccaagtggaggaacgagtgtggaccaaagtagagaaatgggaaattgcagtgtggtgtaaggaatggtgtgaagtccagtgtggcttgagagtaggggctgtggacaccagtgagatgggagaggagcttgcaggattagggcagggccagaatatggaggtcctacagaaccaggtggaaaagcttatgtttatcctgtggtagcagtgggaaatgatcagatctatggatttggtttagtgatgtgggctcagagaggaggaatggaaatgaccccatgcctaatactttgtgcaacttggaatggacaagaacagaataaaggttactgtgtttggagtttagtgactggggagagcaaatgtcagtggactaaattttaaatcttaaaaatttaaggagatgaggaagtacaagaaatgagtataggtgacccttttaagaagttggatgtatcttttttcagtaatagcagtttaattgatgattccctaatatgtatcctgtggacattcatctggatggctaacatgactggagacttttttttttaaatattattagatcaattcaaaaaaggaaaccagtggttcacagaagaagtcacaagacaagggtcctaaaacaggatcagtaaagaaggaaaaagcagtaaagccagaggaaggtaatggccttttttgaaatttttagatttgtcatcaaagtttatcagaaataacttgtgtagtaagtaattcatgatgtttgatagcagtgtgtgtacaatataaatacttggtcttacatttctggaaaacaaagttcttatataatactgggagaccacgaggcaccttctgtttgcttaaacagaccagggcagtaagagtcaccttcagacccatgtcttctcctgtgcagggtggggtcaggtttaggtaattagaactgagtcatcctgagtaaggaaaaatcgaatggtgggtacaggtacacccttccatccagtgattcgcctctgctcatgaaaagtcccaaccaaatcagaggtgttctggctctaagaatatctgtgtcctcagaagcacccatgttagaacagtagactcgtcactttgtcttgacaatatagcaccaggactatgagtaagagtgacagagaggggtttttcctacttggcttttcctgtccagagcccttgatcctgtttcttaaaccctttatgttatcaacagtaacaaatcttgagagttaagggaagatatttgcaataatgtgggcattttcacctttgaattttaagttgcatgtcaatttaaatacacacaaacactgtgtgtgtgtgtgtgtgtgtgtgtgtgtgtactgtatagatgtagacatgtgtgttcttgttttaatctctttgttgcttcacctccttacctcacccttttgaatccagggactttcttgggtttgccattgctttggagacggagcctgttgctacttccttatccttaaaactgcaggaggtcaggcacaggtggcttatacctgtagtcccagtactttgggaggctgaggtgggaagattgctcgggcccaggagttcaggaccagcctgggcaacatggcacgccccgcttctctccaaaaaatataaaaattagccaaacgtggtggcacatacctgtagtcccagctacttgggaggccgaggtgagccactgcgctccagcctgggggaccgagtgagatcctgacaaaaaaaaaaagaggaaagaaactgcaggagatatttggtattgggagttgatcatcctgacttactgcctcttttatttctttttttaaaaggtatgggattttgaattcaggtatgagattttgaattcaagtgtggtttatgataccttattgacacaccccaaaaaacaaacagcacagaaggctgagacatttgttagttcttaccacgggcagtaaaaaatcagaatatcattagcaaacatatgttcttctgtacatagtcactaacctggctactcacaactcttaaagtgctcaaggcatgagggaggcttattctgagatttgtaaacattatttgtgtaaagagggaaaagccgggtactatgcttagtacctgggtgagaggatcattagtaacccagacctcagcgtcatgcaatatacacatggatctgcatgtaacagatgtaatatacacacggataagcatgtaacagatgtgatatacacacgaatctgcatgtaaccaatgtgatatacacacggatctgcatgtaaccgatgtgatatacacacggataagcatgtaccagatgtgatatacacacaaatctgcatgtaaccgatgtgatttacacacggatctgcatgtaaccgatgtgatgtacacacggatctgcatgtaaccgatgtgatgtacacacggatccgcatgtaaccgatgtgatgtacacacggatccgcatgtaaccgatgtgatatacacacggatccgcatgtaaccgatgtgatatacacacggatccgcatgtaacagatgtgatatacacacggatccgcatgtaacagatgtgatatacacacggatctgcgtgtaaccgatgtgatatacacacggatttacgtgtaaccgatgtgatatacacacggatccgcatgtaaccgatgtgatgtacacacggatccgcatgtaaccgatgtgatatacacacggatctgcatgtaaccggtgtgaggtacacacggatccgcatgtaaccgatgtgatttacacatggatctgcatgtaaccgatgtgatgtacacacggataagcatgtaaccgatgtgatgtacacacggatccgcatgtaactgatgtgatgtacacacagataagcatgtaaccgatgtgatttacacacggatccgcatgtaactgatgtcatatacacacggatccgcatgtaacagatgtgatatacacatggatctgcatgtaaccgatgtgatatacacacggataagcatgtaaccgatgtgatatacacacggacccgcatgtaaccgatgtgatgtacacacggacccgcatgtaaccgatgtgatttacacacggatccgcatgtaactgatgtcatatacacacggatccgcatgtaacagatgtgatatacacacggatctgcatgtaaccgatgtgatatacacacggataagcatgtaaccgatgtgatatacacacggacccacatgtaaccgatgtgatgtacacacggacccgcatgtaaccgatgtgatgtacacacggacccgcatgtaaccgatgtgatgtacacacggacccgcatgtaaccgatgtgatgtacacacggacccgcatgtaaccgatgtgatgtacacacggatccgcatgtaaccgatgtgatgtacacacggatccgcatgtaaccgatgtgatgtacacacggatccgcatgtaaccgatgtgatttacacacggatctgcatgtaacctatatgatatacacacggatctgcatgtaacctatatgatatacacacggatctgcatgtaaccgatgtgatttacacacggatctgcatgtaacagatgtgatatacacacggatccgcatgtaaccgatgtgatgtacacacggatccgcatgtaaccgatgtgatttacacacggatctgcatgtaacctatatgatatacacacggatctgcatgtaacctatatgatatacacacggatctgcatgtaaccgatgtgatttacacacggatctgcatgtaacagatgtgatatacacacggatctgcatgtaaccgatgtgatatacacactgatctgcatgtaaccgatgtgatatacacactgatctgcatgtaaccgatgtgatatacacacggatccgcatgtaacagatgtgatatacacacggatccgcatgtaaccgatgtgatttacacacggatctgcatgtaaccgatatgatatacacacggatctgcatgtaacctatgtgatttacacacggagctgcatgtaaccgatgtgatatacacacggatctgcatgtaaccgatgtgatttacacacggatctgcatgtaacagatgtgatatacacacggatctgcatgtaaccgatgtgatttacacacggatctgcatgtaaccgatgtgatttacacacggatctgcatgtaaccgatgtgatttacacacggatctgcatgtaaccgatgtgatttacacacggatctgcatgtaaccgatgtgatatacacacggagctgcatgtaacagatgtgatatacacacggatctgcatgtaaccgatgtgatatacacacggatctgcatgtaactgatgtgatatacacatggatgaacatgtaaccgatgtgatatacacatggagctgcatgtaaccgatgtgatatacacacggatctgcctgtaaccgatgtgataaacagacggagctgcatataactgatgtgatatacacatggatctgcatataacagatgtaatatacacacggatctgcatgtaaccgatgtgatatacacacggagctgcatgtaactgatgtgatatacacatggatctgcatgtaacagatgtaatatacacacagatctgcatgtaactgatgtgatttacacatggatctgcatgtaactgatgtgatttacacacggatctgcatgtaaccgatgtgatatatacacagatctgcatgtaaccgatgtgatatacacacggatctgcatgtaacagatctgcagatgtactccctgaatctaaaataaaagttcaaaaacaaaacagggaaaatcttcctgtatagctgtttctcttgcaaatgaaaaattaaattctgtgccctgcaactaactgaataaactctcctctaggccaagggtacccaatggaacctgaaaatctattcagaccatgaagggaagacaatgttggacgtgccttattatactcccctgcctttagagttcaggcacacaactgacgagcattaacatttatatagagatcctaagactgacagaacagtctctttgtagctgtaagatacctaattccaacctcactctattaaaataatagagcatcacaggacagatagcagggccctggaagaaatgcatattttgaaatgtctctgcaaagctgtctgttgaaggggaagttctgcattacgtagagaatctccttcctttactaggtctctccagagggtctgacacctttgataggagacattcacatctgttctctctgacgtctgctactgggaggcttcatctacatgacaagaaccttggcgtccacaccctgtcccccaccactcccccaccactcaagctaatttcaactcttcaggcagagcttaaccctttcaaccaattgccaatcagaaaatctttgaattcacctttgacctttaagctgcacctccctgccccatgttgccccacctttccggatcaaaccagtgattaccccacttatattgattgatgtctcatgtctccctaaaacataaaaccaagctgtaatccaactgccttgggcctgttctcaggacctcctgaggctgcgtcactggtcatgattcttaaccgtggcaaaattaactcctaaattgattgagacccgtctcaaggtactttctggtttacattctgtattctcatattagtgttaagaatctgagtgcgccagggagatcctcaggaatatatttgaaccttttctctcctccagcagccagccagttactatgtcctactgaatttacctcccgaaactccatcccaccatcacaaccccagttcaggcctttatcatctcttacctacagtgttacagctgcctcgttttgaacctgtcttccacacggtcagctgcgagatctagttaaaaacatgagaccagctaggtgcggtggctcatgcctgtaatcccagcactttgggaggctgaggcaggcagatcacctgaggtcaggagttcgagaccagcctggccaacatggtgaaacctcgtctctactaaaaatacaaaaattagccaggcgtggtggcgggcgcctataatcccagctacttgggaggctaaggcaggagaattgcttgaacccgggaaggcggaggttgcagtgagctgagatcacgccactgcactccagcctgggcgacagagtgagactctatctcaaaaaaaaacacacacacaaaacatgagaccaaccaactttcctgcatggagtctttcagtaaccttccattttcaaatattttccctgatagggcacatacagaaaaggctatttgtgtggaacacaggaggcatgaaagaggctgctcgctcccagaggcagctggtgtggcaatatcagccatcccaggtccttcctagcccaacagaagtcagacacacctgtcaccctttctgttgagaagttctttgtggggccaaaattcaaagcctttcttctgtgaccacagcctgcttagtcggcctcatctcctgccattctttaagtgcacatctgttccagctgtgccgaatcactgtggtggtgtgttttgctaccccgtgcctgtgcttgtgttgttttctctgcctgctctctcctttccccacccggtcatctgtggcttaccttttgagaagcaatacagaaagtcttacctgaaacatgcctgccaaccaccccacacctaagccaaataggtcaagtatgcctcccaggggttcccatgctgccctgcgtatagctctatcatcacattgagcacatttcactgtaattatgtgattattgatctgcctgtcctaccagtctgtggcaggctcctcagccaggtccctaggggtggggacctggtcttcatcctctttgctgctcctgggcttcatcctgggtctggtttgtggtaggtgctcagtaaatgttaaatagatgaatgaatgcttctgacaaagaggaaatctaatctagacccctgtgaagctgccggttgtccgattctgttgctctgcaggtgacttagttttatggaaatagttcttcccttctgagtccatgtttctttttttcttacctagggcagcttgtgcagctggaagagaaagggcagggttcagtgccctggtcagtatatggtgtctacatccaggctgctgggggccccttggcattcctggttattatggcccttttcatgctgaatgtaggcagcaccgccttcagcacctggtggttgagttactggatcaagcaaggaagcggggtaaggttactcataaatgggaaagttctgtgtctaagaatgtggccgtttctccctattccctggctattcttagggaaactgttctagttttcacttaaaagaagctgtaaagagagatttttccaggatgaaaagatgagtccctaatgtagcctcaccagaaggaaaaaaacgctgaccaacccacagggcagtagggcgtgcagtaggacacctgcaggctatctgttctcatccgttgtgtattagtccatttttgcactgctacagagaaatacccaagacggggtacttgacaaaggaaagagggttaattgactcacagttccacataactggggaggccccaggaaacttacaatcatggtggaaggcaaaggagaaggaggcaccttcttcacaaggtggcagaagagagacaagacagcgtgtgcgggaggacatgtcaaacacttttaaactgtcagatctcatgagaactcactgtcacgacaagaatagcatgggggaatccaccccacaatccggtcacctcccaccgggtcccttcctcaacacctgggaattacaattcaagatgagctttgggtggggacacaaagccaaaccatatgacattagaatagagagaaagagggctaggtgtggtggatcatgcctgtaatcccagcactttgagaggccaaggcaggtggatcacttggggctaggagttcaagaccagcatggccaacatggcaaaaccctgtctgtactaaaaatacaaaaattagctgggcatggtggtgcacacctgtaatcccacgtacttgggaggctgaggcatgagaatttcttgaactcaggaggcagagggtgcagtgagccatgattgcgccactgcactccagcctgggtgacagagtgagacactgtctcaaaaaaaaaaaaaaaaaaaagaggtggacaaagccatgaccaggtcccagggtgggtcattatcctgtaccctgccctgcccttgagctgagaatggcgctgagcaggggctcttggcagtcgttaggagtctggcctcatagaactttggcttcaaacagaacaccactgtgactcgagggaacgagacctcggtgagtgacagcatgaaggacaatcctcatatgcagtactatgccagcatctacgccctctccatggcagtcatgctgatcctgaaagccattcgaggagttgtctttgtcaaggtatgcattggtgggtggtctctgccctcctccctggtgacctgtggtcaggctttggtgtggcgtctctcagttcatgctgagtaggggagctcccttaaccaggatggccctggctgagatgactcatattccgttagcctccaccttttctcacttgccacctgtccctcctgacccctcacacctccccgctttgggagtggatgtgctgcggagcggttctctggaccagtaggaacagagccgtccctgggccctgaccactctgtgctctgctcctcagggcacgctgcgagcttcctcccggctgcatgacgagcttttccgaaggatccttcgaagccctatgaagttttttgacacgacccccacagggaggattctcaacaggttttccaaagacatggatgaaggtatttctcactgagcctttttttaatactctggagctcactgtgcttccagccttctagatgattctccaaatgtgcagatctgtctgtctgtagatcctgagagcacagtgactgctggtgttttcaccaggaacattgcaactgcattttctgtcttgtttgacctgaaaataaattcaatgaattgagttagcagaaaggctttgaacagaggcatctgagattctgaaacacacacagattttaaagcaatgcattggtttctggatgcctacaacctggcaggttttctggctgttgtatgggctgtgcctgcaccagaactgaaatactgtacccccacagttcagagtaacagtaaagcccctgacattgacagggggcttcctgtgtagcaagcagcatgctcagtgttttatgcatgttaccttaatccccgcagcaggcctgtcaggcgggtgttgtttcactccttgaataatgagaaagctgctatctggaaaggtcaaggaactggcccaagatctacagctattgagtgacaaagctgcaaattgaacccagatctttttgaccccaaagctaatgtttttaattgctgcactgtagctgccttcatggaaggggtttgtttcaggcattgataggccattgtaaacccatggccagaggtaacaagaaatcagaactatccctgatactcgaactgatacataacatgttcccatttctgctaaacacacacgcatgtgctcacacatgaatggaaaaaagaaaaaaagtaaataatagcaacatgtctgggatttgcatgaaaatactttaaccagaagaaaaaaggcggtggggtggggagacagccaaaaagagatgaaagttgataactgttgaagggtctgtgctcttcctttaatttttatgtatgtttaaaaattttgcaagacaaaaaatgtcttaaatgttaacagcagttcattggtattggtaagaatatagtttttgttttcttcttcacatatttattttccaaacattttaaaataagcataagttactttgtaaagggggaaaatgtttaaagcagtggggcaggaagggaaccaagaaaagggagtggagtaagaggattttcttgagacgaaaaaaaaaaatcagagcatccaggtttctaaatttttctttgatcagactgtttaaagacaacatcacaaacttcagatagagagtttgtggaacccctttttgtttttttcaattttcagttccatttttccaaaccatctgacacttgctcctttatttgtttccacagttgacgtgcggctgccgttccaggccgagatgttcatccagaacgttatcctggtgttcttctgtgtgggaatgatcgcaggagtcttcccgtggttccttgtggcagtggggccccttgtcatcctcttttcagtcctgcacattgtctccaggtaaataggaagcgttcatgtctgctggggccacggagaagcctcagttgctgggtaggtgctgtgacacggagctcattctctctccagggtcctgattcgggagctgaagcgtctggacaatatcacgcagtcacctttcctctcccacatcacgtccagcatacagggccttgccaccatccacgcctacaataaagggcaggagtttctgcacaggtttgtcctgatgggggctagaggcctcaaaggggagtcagcatcccagcgtttgatacttgtccgggaggctcttcaaggccagagatggggattataaacctcattaccaagggtattcatgatttaatggaataatctctgattaaaatccaattgcttggcgggactcctttctgagcaagtgagaaaacagaaatacagatttgggccgcatgcggcatcacgtgcctatagtcacagctactcaggaggctgaggctggaggatggcttgagcccaggtgttcaagtccagcctgggcaatatagtggaccccatctcaaaacaaaatacaaggaacaaaccccacagattaggagtctattggccttggccctgaaaagctatatttcatagagttttgctttttcttttaagtagtaaaaggtagtcatgacatttgagtagattttatttaagcatcgagtattgtttatttgtgaaacttatgtgcattgtcattgtggagctttgtattaataagagattggaactaaaatgttcttcaatataggacaggttgaataagctatggtatatccatagagtactatgtggcccttaaaaagaatgagggagctctataggtactgatagggaatgatctccagcatatattagtgaaacagcagagtacagatgtgtgtattaatatattgtatgctacctttgagtatgtgtttttatgtataacatttagaatatcaggctgggtacagtggctcccgcctgtaatgccagcactttgggaggctgaggtgggcggatcgcctgaggtcaggagttcgagaccagcctggccaacatggtggaaccttgtctctactaaaattacaaaaaaattaaccaggcgtggtggcaggcacctgtaatccagctactcaggaggctgaggcaggagaatcacttgaacccaggagacaaaggtttcagtgaggccagaccatgccattgcactccagcttgggcgacaagagcgagactccatctcaaaaaaaataaaaataaaaatttagaatatctctgaaaggattaaaaaaaaaacctgttagttgccactggaagggagaactgggtagctggaagatgggaatgagacagacttgacctttcatggtaaacctttggtaacttttaaattttctattctgtgtatatgttgcctattgcaaaagttgggtaattatttttagagagaaaatttagaatagaaagtttagaaaaaattattttcaaaatgttaaatgactcagaaaaataattcctaaactttaagcagaaaagaaagtgaaatgtactaaatacgtacatgtgtatatacctacacacagtaaatgtcagtgcattgaaaaaaactgctgggaggaaatgcagcggaatatcaactctggttttaacagggtgatgagattactggaattttacattttcctatttctattgcattttctaaattttctctaaagattacatattttattggaaagaggaaaagtgatttttcaaagcaaagcacatctgcgcagcaaaacttcctgctctggagttctagtcgtacatggtgcactgagccttcagaggggtctggtctgctctctgggacccctactgatggccgtgccatgctccttcagtagcagcagtaaacattgcctgagtcccttttgctgtggtttagcttgcttctcctggtgcttggctccatagctggggaacaagtgccattctgcatggtggcggcatgtgcacacacttatggtgttcccatattcactctgagtttctttttcctcgccttgaaccatttctgctgttggcgtttgtaacctttccttctttcagaaaatgccttctgacctaagatatttttctaaagtttaacacaagcctctttattcagtctcttttcccatgtttactctgtgctgagatagatgttttccataacatctttaataggatttttttttgtttttaaagagtaactaagattagaaaaacttaatgtcctcctatgcatgcggcctagaatacctccagaattcctagaataccctcctggagtttccagggcattctctcagttagaaacaggaagtatttaaatacgtgccctccatcatctgattcgctgaagctttgtccatgcgcggggttgtgtagtactttctttgcccattaagtgttgtctttctcacagataccaggagctgctggatgacaaccaagctcctttttttttgtttacgtgtgcgatgcggtggctggctgtgcggctggacctcatcagcatcgccctcatcaccaccacggggctgatgatcgttcttatgcacgggcagattcccccagcctatgcgggtctcgccatctcttatgctgtccaggtcagtctctgggataggagcgtcatctttgcttgtttgagcccttcctctgctgacgtaaaagagggatgattgtggggggctccaccctgagccattatttcacctctggacccctagaattgctcatggtctgatttgaccgtaacaatctggatttgactggggcaggtagggataggagagaggtaagtgtggaatccaggaataaaggaatcgaactctgttgcatgtgtgtgagaagtagatgctgttttcttcaaaaagaaatatgatcttgaaaatagtttcttaattgtgggtttctgtgttcaccaccatttcatctctggcctctttctagtcttctaagaaatgttatagactcaatatgcttcttacgtgcattttcttctcagggccctgattttcccaatactgttatatacataaaaccttctagcccctaggggtgattgagggtcttcaaatagctcagagaatagttgagaacttgagcactgactagatattttaagatgttgagtgattattattaccctctaaaataatggtattggaattatgtttttaaggagtctatattttagagaggtacaagctgaaatatttggatgagataagctctctgcgatttgcttccaaataatatggggggtgggggtaggaatggaagggaatacagatgaaacaatattgactgtaagttgatcatttttatggtagagttttggtacctgggagttcattatactactctttctactcttgtgtgtttgacatttttctttattgaaaagataaaaataaatagtcaaaggaaccccagagatatgtgtcttcacagataccccgagatgtccagccacattttgcaatttacttgacaactggttggggaagacaatgcattatatagactgtttttagactccgcagtctatggagcacaggggctccagactcactcatttcccagcattatgtatctgatttgactttcctggaaacattcttactagttgctcataggttgatatctccatttgttgtgactcccacaaacaggctcagatacaagtaggaagtccagaagtgaatcagttgcagatatgtgttattggaaatgtaaagatgaatagaaaggctttgggtacaaggaagtggttccagcagtgccatgatactgcccgcattcactgagcattgcagttgatggggtaacaggtatgccttaaaagccaagagaatgactaggtccctaagaccagctgctgcatgtgctcagttcttagtagtcctctagatgaaggaagttctccagcattggcctggcgtgtattgataatgaattatctctttgattgttgttttccattatcagttaacggggctgttccagtttacggtcagactggcatctgagacagaagctcgattcacctcggtggagaggatcaatcactacattaaggtcagactgctgtaggccttttaccgtgatctgactcctcttggagtcggtttaccctttgctgcctcagctgggtgtacaaggaggaggcttgtgttctctgcctatctaatcccacagaatctccagcaatctctcaaccgtgcttggaatgggaaagagattaccgtaagagtttctaagtatatttgtaaattatgtcgagctgagaacttcattggctaatttccagaatgttcagaaccttgtcagttcagcttaactgactaatggagcattttccttacactgtttaaaaccatgtattgttttaattcttactatgtccaattgttcttaatcagggatggccatcaggaccccctgctgagcttttggcaggacaaacgtggcctcatctctggattctgttgcagtggattggggtgggacccaggcttctatagtttgaaaagctccatagcgaattctaaactgctctcccaacttacaaacgagtaaatttaattgataccagagtatccagctcttcccacctttccccaggaaccccttccgtcttgccgtgggtggcaggcatcttgctgctgtcctaactggcactcttaaacaatttcctacagggatgtcttaatccatttcacactgctgtaaagaactacctgagattgggtaatttatgaagaaagaggtttaagtcactcacagttccgaaggcttaacaggacgcatggctgggaggcctcaggaaacttacaatcatagcgaaaggtgaaggggaaacaagcacatcttcccatggcagagcaggagagagagagaagggggaagtgccacacactttcaaacaaccagatctcctgagaactcactgtcacgggaacagcaagggggaagtccacccccctgattcagtcatctgccaccaggcctctcccctcacacatggggattattatacaattcgagatgagatttgggtgggaacacagagccaaaccacatcaaggggtgtccaatcatttggcttcccagggccacattggaagaagaattgtctcaggccacacataaaataatactaacgatagctgatgagcttaaaaaaaaagatggcaaaaaaaagtctcataatatgttaagaaagttgacgaatttgtgttgggccacattcaaagctgtcctgggctgcatgtggctcaagggccacagattggacaaatttgcttataaagaagcagcatcatgagtagttagattctcaaattgaactcaattcttaagagttatctattttattgaactgctgtgagactttacaagcatctgtgtcattgtttatatgtgaagagtatattctgagttcccaacacttgactttgaaacatagttttgaaaagttagctttttttctttttttccttttttaatttattttttatttttttattttttttgagagagggtcttattgtcacccaggcttgagtgcagtggcatgaatacggctcagtccagcctcgatctcccaggctcaagtgatcctcccacctcagccccgccaagtaactgggactacaggcatgcgccactaggcccagctcatttttgtattttttgtagagataggtttcgccatgttgtcccggctggtctcaaactcctgggctcaagcgatctgcctctgcctccacctcccaaaatgctgggattatagacaggagccatagtgtccggcctgaaaaattactctttcaattgggaactgagtgtacgtaaactggattctctaatagagatgtgcttcactgattgttttgacagtgagcctcattagtggtagaatatttcttaagcttacaaatgaataactttcttattctcagaaaggatggcaggtggctgcccagtgtatctagtaatagctcttctttcatgtttagaagttagcctctttgcacactgtcctggtgtgtagatgacccgtgtgtgtacatatgtgcagtgtttgagttaatgttatggttggcgagagccttgtgctggagaggttaggattacggtcagtggtggtacaaagtggaccctgctgaaaccggtcacatttcagaggcctgccctcccactgactgtcccaacacagagtccttccagcttggagttttagactttaggcttaaccccccagagtgctacagtctttggcccttacttccccccataaggctatatactccatggccaattgccagagagttttaaaagatcatgagatatgattgttgatgataaaaattacccaagcagttatatcacagcattttgagctggaatagattctcaagatcatctaatccagtccccacaatttgcagataagaaactaagatgcagaagaagtggtgatctgtccaggtcacacagtggcaaaattagaattagagtctgtgtctcctggattgaccaagacatgccagaatgccaggatccaatcagatgttcagtaaatattagttttcttcctttggatttaagccaatgattatcaaatggtagaatcctatctcaaagaatttcagtaaaaactgctgtggtggaggggtggaaggcctcatgtctgcccgtgttggttttcctttggcccccaaggcagctttgtggaatagttccttgagacaaaaggtagtctgaacaccacttccctccccaggctgctgctagtagccatgacacttagccattgtgctctgtctctgtcgagtttagtgatgataagcatttacttccaagggattctttcctagcaaggtgacagggtggcagctacctctgtgtggctactatggttgtcctggttttatttctctgtgacaaagcctgcagctccccaagaatctgtggtcagtctgaactggccacccttgtctccccagactctgtccttggaagcacctgccagaattaagaacaaggctccctcccctgactggccccaggagggagaggtgacctttgagaacgcagagatgaggtaccgagaaaacctccctctcgtcctaaagaaagtatccttcacgatcaaacctaaagagaagattggcattgtggggcggacaggatcaggtaaggatgtgcaaagccttctttgaatccattggaacgtagcagtttatgaaatatcactttcacccctttaaaccggatccttgtttgtttgatgagcaattagtgtctcagccccctactgaaaccaattttctaggtttattgttgaccccactttgatgacattgagtgcttttcacagtcataaatgtgcacattctcaatgcagaacactggggcacacagccaagtacgaaagaggagcagcacccacaactctgctacccagagagaagcactggtaacattttggtagctatcttgttaggcttcctctagtaatatgtaggtttacaaaaatgaggtcattgacacatgctgtttcatggccttcttttaaaactatcagtaggctgggcgcagtggctcatgcctgtaatcccagcactttgggagggcgaggcgggtggatcacctgaggagttcaacaccagccagaacaacatggtgaaaccccgtctctactaaaagtccaaaattagccaggtgtggtggcacatgcttgtaatcccagctacttgggaggctgaggcaggagaatggcgtgaacctgggaggcggaggttgcagtgagccaagatcacgccactacactccaacctgggtgacagagcgagactccgtctcaaaaaaaaaagaaaagaaatgcgtaactgtagatcctttagatttctagggtcaggacttgagtaatttacttctttttttttttgagacaaagtctcactctgttgccaggctggagtgcagtagcacgatctcagctcactgtaacctccacctcccaggttcaagcgattctcctgcctcagcctctcacgtagctgggactacaggggcgccagctaatttttttgtatttttagtagagacagggtttcaccatgttggccaggacggtctcgatttcctgacctcatgatccacccgcctcagcctctgaaagtgctgggattacaggtgtgagccatcgcacccggccccttttttctcactttcgttcctgaattgcattccaaagactgaacttgtcttcttttactgtcctttttatccttgtataagaggtatctttgattcagttttcattagttttctaggctccatgcttctttggcatcaaaactcttctagcttttttccttgccattaaaaaaaaaaaaaccttttgtcttttctggccaattgattttaaagaactttctaaggaagaaaaggaaaaagccatttcctgctttctgtttgagggaattacttcacgtcaaaacaagacattgctccaggtctttcatgctggaagggaatctttagccaagcagggtgactctccccaagcctttttactgttctctcccttgagcccatctgctgcattcgtccccaggggtacactgctcccctgaaagctgactgatgtcctttgttatgatttccctttaacacaggtgagataggccaaaacaagcaccacaacttcattaaacagtagttagtgacagaagagaaacaagaaaaagaacatagtggccaggtgcagtggctcacgcctgtaatcccagcactctgggaggcccaggctggtggatcacctgacgtcaggagttcaagaccagcctggccaacatggtgaaacctcatctctactaaaaatacagaaagttagctgggcgtggtggtggatgcctgtaattccagctactcgggaggctgaagcaggagaatctcttgaacccaggaggcggaggttgcagtgagctgagattgcgctattgccctccagcctgagcaacaagagcgaaactccatctcaaataataataataataataataataacctgatttacactccggttctaatagggcttcttccaagtttcacgggtaacttggaaactctcctgtggtcatgtcagtcaaggacaccatcttgaggacttcactgcctttcttaccagcacattccatcagtgcaaaggtagtcagattcagaggactctaaagtcttccagtccaggtggtccaaacctaggcaccttttgttaaactggaacaacttgacccattgtttcgggcaccattccttccttagcttagatcttaaagccctgcctcggcccagagggaatgtctcctcccctcctatctgggaaaggggccagtaactgagtcccccaaccctgaacagagtcattcattttttttttttttttttttttttttcctgagacagagtctcagtctgttgcccaggctagagtgcagtggtgcaatctcggctctggagtagctgggattacaggcacatgccaccatgcccagctaatttttttttttttttgtattttttagtagagacagggttttgccatgtttgccaggctggtctcaaactcctggcctcaagtaatccacccaccttggcctcccaaagtgctgggattacaggtgtgaaccgctgcgcccaccggcctggagtcactcatttctaggaggagaactatcctgctagacggaccaggtttcctaactcgtttctggtagaaggatgtgaggattgttgcattaggaagatgggtcctaatacagctttttccaagtttcctgggcgttacttcttccaagtcttatgggtgtttttcaggttcccattaggctgttagacagaggtatgcccagggggtagatcccgacagtggggtcgtggctgtagacactggggcaaggcaggctgtttgcgccctccatgagtgctgaagagacagcatcgtggtgatctcgatgaggccctcacaagaggtctttcatgacatggtggcacgagaaaggtaggagggtcaagaaccaggcgtacagccaaggaaaagtgattcaacagctaaaaccctgtagttctaaatctaaaccatggaaccaagttgcagaaaggtagacaggactatggcaaacttcttttctttttggctctgtagagagagcaccttttaaatgtttatatcctttgacacagtaatttcagttctaagattctttcccaaggaaattgtctgaggtggcagtaaagtttcagcactaagataataggacataacattattataagttttacataaactaaatgttgacccttagagggctggctgaacaagaatacatgcacatgatggaatgcaaccactaaaattttatcttgaaaatttttttaaaagatggttgactgagtgttatacaatgcttttgttttgttttgtttgaaacagagtctcgttctgtcgcccaggctggagtgcaatgatacgatcttggctcactgcaacctccgcctcccaggttcaagtgattctcctgccttagcttcccaagtacctgggattacaggcactcgccatcttgcccagctaatttttgtatttatagtagagacagggtttcaccatgttggccaggttggtctcgaactcctgacctcaggtgatctgcccgcctcagcctcccaaagtgctgggattacaggcatgagccaccgtgcccggccaatgcagtgttaagtgaaaaaagcaattacaatattgcatttctgatatgatctcaactctgaggaaagaccgaaaggaagtgtgcctaaaatgatagaagtgagattatgggagattgatgatgtcatctcgtattacttatgtaaacttttcaaatgaagatttggttaacctgttctgctgattactgtaataacactgatcccccaaacctgcttctctgccatagtttcctatcacagtagggccattgacagctactcattgagtcgaggcaaaacctccttcccgtatgtgtttatttatccctggaacttcttcaattccccagctgctgctgtggcaacaggaggccttgtcttagtctctctctcagccctaataagggggtagggagaaaaaagacatcttgtcctctggtttgcccctcaactgcttgctgtaagatctctgttctcctaactttgcctaagaagcattcagctctgtgcacctgttcctaaggtgaccaggaggcatttttccattttactctcatgaaaatggaatggtcagccaggcgcggtggctcacgcctgtaatcccagcattttgggaggccaaggtgggcggatcacgagatcaggagtttgagaccaacctggccaatatggtgaaaccccatctctactaaaaatacaaaaattatctgggcatggtgacgcgtgcctgtagttccagctacttgagaggctgaggcagaagaatcacttgaacccaggaggcagaggttgcagtgagccgagatcgcaccaccgcactccagcctgggcagcagagtgagactccgtctcaaaaaaaaaaatgaaaatggaatggtcccttcccttccttctcaggctgaagctgtgtaatttgaaggtgtctgcctggtatctcaggaaagttaattgcatttttctatcattttatacattatctcagttaatcagttgaaataacaactgaatagaaatggaaaaatagttggcattgccctgaggctaaaccagcattgtcctcacagactttgctaacagctcctctcttgcatgtcttctgactcatcagggaagtcctcgctggggatggccctcttccgtctggtggagttatctggaggctgcatcaagattgatggagtgagaatcagtgatattggccttgccgacctccgaagcaaactctctatcattcctcaagagccggtgctgttcagtggcactgtcaggtgaggacctgagcacctgcatgtctcgtgcgtcacttagaggccagatgagcatgtgggaccacatgatgctagcaccgccccctgggaccatgagctcaccatctctagtctggtgcttttcccactgcaccatgtgcttgctggtgcagaagggagaggcagcaccactcacaatgccacttggttgactgaagggtgcagggaggcctgcaacacagtgctgaagaggccagagaggtctgggcccagggctctgctccgtgacttcggacaagttatttaaccactcctgtgcctgtttcctcaaccataagatggggatgctttaaagacctgttgctgtgaaggttgaataagttcatgtaaattatataagcacagggcctggcaaatggtaagcattcagcaaatggtggctgctgtcatcagcctcattgacatcatcctcatctgccccccactccattctgtcatctctcctaggtgcgctgaaagttgcagtttttttgttctgtttgtttgagatggagtctcactctgtcacccaggctgaagtgcagtggcacgatcttgactcacggcaacctccgcctcctgggttcaagtgattctcctgccacagcctcccgaatagctgggattacaggcgccctcccccaggcccagctaatttttgtatttttagtagagatgaggtttcaccatgttggccaggctggccttgaacgcctgacctcaagtgatccacccgcctcggcctcccaaagtgctgggattacaggcgcgagccactgcacctggccaaaagttccagttccaatggtggctttcaggcattattactactcatgttatttcattttctactatcttcccctacctttgatactctggaattatgtcactttttgaaatctgccaggttgccagagataaaatccttcttcttggcctattaaaacagtccaaggagaaagcatcacattatctttcctaagcttacctgatcctacccttagccttaagcttcagcctcctgaaaacagtggatttccatcatttgtgtccctgtctattaaaaaatcattctggcctggcacggtggctcacgcctgtaatcccaacactttgggaggccaatgcgggcggatcacgaggtcaggagattgagatcatcctggctaacacggtgaaaccccgtctctactaaaaaatacaaaaaattagccgggcgtggtggtgggcgcctgtagtcccagctacttgggaggctgaggcaggagaatggtgtgaacccgggaggcagagcttgcagtgagctgagatcatgccactgcactgtagccagggtgacagagtgagactccatctcaaaaaaaaaaaaatcattctaaaagtaatttttagcagttttcagaaaaattggtaccaacctaatttcaaataatcataggcagtgttcagacttgttttaaaactatcccctccacctttggaaatggcattttgaactcaaggaactttggtagatatcttagtctgctcaggctgctgtatataccaacataccatagactgggtggcttaaacaacagaaatttatttctctcagttctggaggctgggaaggccggggatgggtgtctgctgagggccgtcttcctggtttgcagatggttgtcttgttctgtcctcatgtggcctttcctcggtgtgtgcctgtggtgcatgcctgtggtgtgtgcccgcggaaaggagagctcttgtgtctcctcttcttgaggccccaccctcatgatctcatctaaacctaatctcctccttacagccccacctccaaacaccatcacattggggtcagtgtttcaacagtttaattctaggggcacacaaacctgtagtccatagcagtaaatcagcagaattctcacctgtgtttgtgtagtgtcaacaccctagagtatgtttattttggtgtttctgtaattgaatctggacagcatgcactgtatctgtggttgataataaaccattctctttgggtattgaggtaataaggtcagacaagcaatatcagaagaaaattagaatttattggtcaggcgtggtggctcacgcctgtaatgccagcactttgggagggctaggtgggcggatcacctgaggtcaggagttcgagaccagcctggccaacatggcgaaaccctgtctctactaaattagccaggtgtggtggcccatgcttgtggtcccagctactccagagctccagaggctgaggcaagagaatcacttgaacctgggaggcggaggtggcagtgagctgagatcgtcccactgcactccagcctaggtgacagagcgagactctgtctcaaaagaaaattagaatttattgaagatgaaagcctaaaaataggccgagtgcggtggctcacacctgtaatcccagcactttgggaggctgaggcgggcggatcacgaggtcaggagtaccagaccagcctggccaatatgctgaaaccccgtctctactaaaaaatacaaaaattagccagtcttggtggcacacacctgtagtcccagctacacgggaggctgaggcaggagaattgctggaacctgggaggtggaggttacagtgtgccgagatcatgccactgcactccagcctggacgacagagcgagactccatctcaaaaaaagaagccattgcttggccaggcgtggtggctcatgcctgtaatcccagcactttgggaggccgaggagggcggatcacctgaggtcaggagtttgagaccagcctggctcttcccataaatctccctatttttagatgccacaggaacaccttgaaaaaaaaaattggccttacaatatttggctttggccataagaactagttttttaaatcatcatttggaagagaattaagaaataaagcacgttaaacttgagatttcttttgaaactgctgccaccaagaagcctcagttttaatttaacaattttatagcatttcatttgggtttgtgaaatgggggcttctagagttagtggttaacaactgaccatgaggccaggtgcggtggcttatgcctataatcccagcactttgggaggccgagacggaaggatcacttgagctcaggagttcgagaccaccctgggcaacatcgtgagacgtcgtctctgcttttttaaattatataaaatgttaaaagaaaaagaattgaccatgggcgcgtgcagctggtgtgggtagaacatcgtgcgcctgtagctttagtagaattggaaccatttgtctccagagaaagaaatgttgactgctttgtggctagctcagtagttggtacactgctgtcctgggtttgtagctactgagcttaggtgcagcttaggaagtcagctgtgcaaagtgagaaaatcatttcagttaaatttttgccagctctaattttggctttttagtctgtagtagacactgaggaagaattaaatgctggacttgtcttttatcccctaaggtttccttttatcctctcaggtttgttacggatcccagagaatgttcagctcttggtattcttttgtttttgagacagagtctcgctctgttgcccaggctggagtttcagctcactgcaacctctgcctcctgggttcaagtgatttgcgtgcctcagcctcctgagtcgctgggaccacaggcatgggccaccatgcccagctaatttttgtatttttagtagagacggggtttcaccatgttggccaggctggtctcgaactcctgacctcaggtgatctgcccacctcagcctcccaaagtgctgggattacaggtgtgagccaccgcgcccagccagtattcttttgctttagttagaagatagaaagcctatgatgagtttcccaaggcacaggcaggataaataagctgtttcctcagctgcctcctagagactctgaatctggaaaccgcgcctccaccaccattagccagtattgagggtgggtacctcttcttgagatacctgtaaacaattaaaacttgaaaggaattcttagaggaaaagcaaggtaaaaccaaaatcaaaccaacaaaactcagaaagtcacaagataaaaattgttgagttgttctgtgtacaaatataatctaatctaaatcataggccagataatttgggaccacaccccttccttagattagccagaatgtcattctagtacctgcatcctggccctcctttatctgcctgtgtgggcttgagctctccagcctgtgtttctgcagctccctattgttttgccctcatgattgcctccaagaagagaggccccttttcatccaggccttaaaacacttttgctggcctctgtctcatggccctagctttccccaccttctcccagagctccctgtgcttcctggacccaggaaacccagccctggcctctgtcctatcccccgcagctggagtgtttttcatcctgaggactgtctggagcctggctaggctgacagtgagctgtccccagctgtcactctggtatgtctcttgagtcttcgtcccctgtgagtgatgggtaccttgtctacccggagcacttctgcctggtgcccattcattagcaagaaacagtgttctcatttcttcttcttcaggtgccttctccttttgatctgctcattaaatttttttttttttttttttttttgagacagtctcgctttgtcacctgggttggagtgcagtgacatgatctctgctcactgcagcctccacctcccaggttcaagcagttctcctgcctcagcttccccagtagctgggattacaggcacctactaccacacctggctaatttctgtatttttagtagagatggggtttcacatagttggccaggctggtggtcttgaactcctgacctcaggtgatctgcccacctcggccttccaaagtgctgggattacagccatgagccaccattccccacctgtcataaccatcttaattgtatttaacaaatgctcaaaacttcataagacagacaccattgttatgcatattttattttaccaaatagtgaggtttcactatattgcccaggctagtcttaaactcctgagctcaagagattctcccacctctgcctcccaaagtgctgggattataggcatgagatgccgcccttggccattattcctgttttatatagatgatgaaactgaaatccagagagtgagagtaatttgcccaaagacacacagctaaaagtggcagagctaggatttgaacccaggctggccggctggctctactcattacactcactgcattgcctcctgaagcgtgtgtcacgaccccactgttaaccacgaccttgatattccatctctccaaaaaacagttagacgtgcctctttgtggatcttgacctttagttacatttcttttcccagcatcttcaaagtctcatctgccttcctcatctcaaaaacgaaaaaagaaagtcacacaatctatgccgttctctctagtatttttcatttgctctactttttcctcttaacttttttcacctaatctgactcttaacaactaaaagccaaaatcagtccgtatttctgcatacctcagaataagatttccttttgcttcctgatagaagaaggtatgtgagtcccaaaatctcctgctctgaaaaccaaggctactatgaagcacccagcacagatgacagggcagcatggtttactgcagtgttttctactataccgagggtgaattgctgtgttgtctcacactttgggagatattcttggcttcatttagcagtggtcaatgttgactattgctaaaaataaaatatgaagaaccaaagatgaaaatgtacctttggcaagatcaggactccaggggttctgattgttaaaaataattgccctcatgttcagacacttttctatccaatcacttaactgaatccttttgattaagtggatgcataactttgctttcatttctgtctgtgggtcagacccaggaccatctggcttctctaatgaggggagatatttttccattcctgattgagctccctgttgaggttggtctggtctgccttactgtgtaccacctacgagtgtatgcaaatattcattttctatctggaacccattgtttagtggtctgaggctccttcagctggtgtgatggacctgggtgaattgaatgttaagcctgggctgggcacagtggctcacgcctgtaatcccaacactttgggaagccaaggcggatggatcacctgagacctggagttcaagaccagcctggccaacatggcaaaaccctatctctaccaaaaaatacaaaagttagccaggtgtggtggcgcacacctgtagtcccagctacttgggaggctgaggcatgagaattgcttgaacctggcggggcagggcaggggttgcagtgagctgagatcatgccactgcactccagcctgggtgacagagcaagattctgtctcaaaaaaaaaaaaaaaaaaaagttaagcctgttgtcgtatttgcccatagaaaatctgatagggccggctactcagtgggcaggagaccgcgcttttgtgtacagcagttctcgcttctccatggtttcactttctgcagtttcagttacccatgatcaaccagggtccaaaaatattacatactatattttgcaagagacagaccacagtcaaataatgttcattacagcatattgttataattgcttgatttcattattgttaatctcttactgtgcctaatttataaattaaactttatcataggtatgtatatataggggaaaaaaacatagcatttatacggttcagtactatttgtggtttgaggcatccaccggggctccctggagcatatccttgtggatgaaagggggctccatgcctgctctttgatccagaggcatctgatggacttacttgctgtatgtgtttcctggggctgtcataaacagtttaagccacaaactggatggcttcaaacaacagaaatgtactatctcacagttccgggggctggaagtctaaaatcaaagtgtcatttgggccatgctgccactgaaccctatagggaaggacgcttccttgcctcttccagcttctggtagttgtggccatctttggcattccttggctttggatgcatccctctggcctctgcctccattgtcacatgatgccctcccagtgtttctctgccttcacgtggccatctctcataaggaccagtcatatgggattaagggcccacccttctctattactctggtatgacctcatcttaactaattacatctgcaaattaccctatttccaaataaggtcacattcttaggtacttaggtgtcttttggggagacacaggtcaacccattaaactgtaccatattaaacaacacttcctgggccaagggtagtgagaagcgagcatgttccaagcgggaaaaacgccgtgcaaagggcaagaggcgctggagagcaaggcgggtcagaatctcccaggagatcgagagatgcccagatagcaggaatgaggcggtgccggcctgctgtcctctcactagagttctgtgataatgacgtgattgtatttgcatgcctgtaattagtaaccccagatatggagacaggtgtgtggcatagagtaaaagtccatgtttctcccagagagtttcctgtttcccacatgccaggcataattttatgagcaaagcaaatatacttttcagattactagacctccaaatgttatgtgtagatcaagacaagccgtccaaaattactgtaacatcccagttttccaccaaatacctgttccaccaccaattctccaccctcatcctcagtggcaaagataattttctcctgtcctaaacatttctagtcctggccgggcacagtggctcatgcctgtaatcccagcattttgggaggcccaggtaggctcatcacttgagcttgagcactggaatttgagaccagcctgggcaacatggcaaaaccccatctctacaaaaaacacaaaaattacgtggcatgcgcctgtaaaaaaaaaaatttctagtctcgttcttttggtatcaactctgatttccttgaggtagatactgttggcacagtaagcaaaaatggtccccaaactggtcttctgtgccaggaaaattcctttttcttgacttgtcctttattctttctctccttcttcctcttcccttctactggatcagtttctttccctggtcaggccagctgtcctggagccccatactcaattacagggttgtgaaccaggtaaaccaagagaaagagggtgcatttctaagtttgtacgtatggagagatttattttttattttattttattttatttattgagatggagtctcactctgtcgcccaggctagagtgcagtggtgtgatctcagctcactgcaaccactgcctcctgggttcaagcaattctcctgcctcagctttctgagtagctgggattacaggtgcccaccaccacacctggctaatttttgtatttttagtagagacagggattcaccatgttggccaggctggtcctgaactcctgacctcaagtaatccacccgcctcggcctcccaaagtgctgggattacaaacatgagccattgcacccagccgaaagatgtattttaacaaatacacgcacaggaaaaaatctagaaggatatttgccgatatttgcatttataaattgttctataactagtattatttacatagtaaaaatagtaaaagaataaatcaagttttatggagctgaggaggtggcccagtgtgctgtcagagctcccatctgtctggttgtggaatgagccgtctgtgaccatcagggtttggagtcttctctccctatgcatgtgtgttaaacatcttccacagacagcctttgccaatgggtcgcttagggtgggaccactgagaaattcctgtgtttctccctagatcaaatttggaccccttcaaccagtacactgaagaccagatttgggatgccctggagaggacacacatgaaagaatgtgtaagtgaagagcttaggggaagccgtgctgagatggtgagggtggaagcacagcagtgcccttgccacaccccgtctgctctggccgtgcctccaggatgcctgtggacaaaggcttcgtggcagggctctccaagtctttcagatacctgggaaaagctgatccctctcaaccccaccgcccacactgcctacggtcatattggccttgcactatccattgattgaagatagtaatgacaactacttagaattaagtgatgcttttaatttattagtcataacagtgtaacatactttgaagcgtccacatatacgcaaaagatatataacgtggccgggcgcagtggctctcgcctgtaatcccagcactttgggaggccgaggcaggtggatcacctgaggtcaggagttcgagaccagcctgaccaatatgatgaaaccctgtccctactaaaaatacaaaaattagccgggtgtggtggcatgcacctgtaatcccagctactcaggaggctgagacaggagaatcgcttgagcccaggagacagaggttgcagtgagcgagagcgcaccactgcactccagcctgggcaacaagagcaaaactctgtctcaaaaaaaaaaaaaaaaagatacataacatattgagtctgcagaaagcacacagtgtgcatatggaccatggaccacagacattttgggacaactcagtaggccctcacaggccctcacgagcagctgcagtctacaggttgataccactggcctagggtgaggcttctgttatgcctgggttgagtcaggatccaggatcccctgccctaattcaactattagtagatgagttctgttttttcctctgctctatcgggattcttctcatttgaagaataagttctgcagcttacaaaaaatgtttcacaggcacgggcctacggctttggacttcagaaggagagtacttttccttactatactatttcctattgcaagaccatattttcagaaccaaaacttaaggcccactatgtgactggattttggggacatgaaagcgttgggatttctgggatgttttaatggtataaagctaacagaatagtctattggaatcagggactgccttggaagtgggtcctagcacgcatgatcagtacacctgcaccttcattccagatgagacaggttcttggctaatagttctttcatcgctttcagaatcatttctttctgtccttggattttcaggaaattcagcttagtttcttacccctctgatctctagtttctttctccctagattgctcagctacctctgaaacttgaatctgaagtgatggagaatggggataacttctcagtgggggaacggcagctcttgtgcatagctagagccctgctccgccactgtaaggtaaggcagtttggggttggcagcagcagagaatgggaatgttttagtgcagccttgccctgacacactggggtccaaaggtattcctggctctgatccctgttggcactttctaagagcatgaccagagataactctaaccctgacacaatttgggtatattggttctggggagggagaacagggttgctttgtttttaccttcatccaagaccaacttttgtttctggccattgagtagttgtacgactgcaaaccatagacatagaagattttttttttttttgagacggagtcttgctctgtctccaggctggagtgtagtggccaaatctcggctcactgcaacctccacctcccaggttcaagtgattctcctgcctcagcctcccgagtagctgggattacaggcgtgcgccaccatgcccagctaatttttgcatttttagtagagatggggtttcaccatgttggccaggatagtctcgatctcttgacctcgtgatctgcccgctttggcctcccaaagtgctgggattacaggcgtgagccaccgtgtctggccgacatagattttaaaattgcaagagactttaaggtcatccaatccagccccttcattttataaacaggaaaagaatgtccttttgtccagtatgttaccagccatattggattcaagggaaaaaaagaattaattgtacatgctcactgtcacagagcatgtaggggcaagtatttgattaaatccgtggttttgttttgttttgttttgtttttgagacagagtctcactctgccacccaggctggagtgcagtggtgtgatctcggctcactgcaacctccacctcctggattcgcgcgattctcttgcctccgcctcccgagtagctgggactacaggtgcgcgtcaccacgcccggctaatttttgtatttttagtagagacaggttttcaccatattggccaggatggtctcgatctcttgacctcgtgatccgcctgcctcggcctctcaaagtgctgggattacaggcatgagccactgcgctcagcctagatcagtattttacaaatatgctgttttggaaatcaaggcaaacatggttttgaaattgtatcacttctaagcaaaaggatgtttttacatatatgcgtgctttcttagaaaaaaaaaaaaaaaacaataggctgggcacggtggctcaagcctgtaatcccagcactttgggaggccgaggcaggtggatcgcaaggtcaggaggtcgagaccatcctggctaacatggtgaaaccccgtctctactaaaaatacaaaaaattagctgggcgtggtggcgggcgcctgtagtcccagctactcaggcggctgaggcaggagaatggcgtgaacccgggaggcggagcttgcagtgagccgagattgcgccactgcactccagcctgggcgacagagcaagactccgtctcaaaaaaaaaaaaaaaagaaagaaaagaaaacaatagatagtgtaaaacttaaatgaaatacattttagtaaaatctagattaaccagaatgctaaaggaatttaatcgagtttctttctcctctgcttctctggcagattctgattttagatgaagccacagctgccatggacacagagacagacttattgattcaagagaccatccgagaagcatttgcagactgtaccatgctgaccattgcccatcgcctgcacacggttctaggctccgataggattatggtgctggcccagggacaggtaccgagtccttcaggaactttggcttggcatgtctgggaggaaactggcccctggcagggatggactgattgccatctttgtagggttctgggcattcagataagcacttgcagcagcgctatttacttgctattgggagggatacagcctccgaatcacaagattactcaggcacctctgatggggttctcattttactttactaatttgtccttttgttgcttgtgagtagcgacactgacttaagtcagagagtacatgtacttagtgattcattcacatacacaatgatcacccctggcatacttaggccagagagtatagatacttgtgattcattcacatacacaattatcatccctggtacatgtacttagtgattcattcacatacacaatgattaccgctcccggaggcctactgagaccagccagcacatgtttgcttttttgcaatcacgcagcggcaccaaacttcttaccctgttgtttcaggcgttcccacagcctggccctagccttgccttcttcattttccactcttcctttgcaggtgcggttggctatagacatcttgcattctccaagctttttatctgtctttagtcagatagttccatctacctaaaaggccctttgcccttctctctcccatatccacctgctctcaacctgcctgtccctgaagaatgacatggcccagatgccaaagcctccatgaaaccccctggctgcctcagccgccctagactgtatctgtacctctcttgtagctcttctgtctcagttgataggaattgtgcaatgccctgtctccctagagaactccctgaacgctctctgagggcagagtcaccgctcattcatctttagggccccagcagtgcttagtactacagttctttatacaggtgatgttaagtacatttatgttagacaaatacctcttttgcatgcccctaggatacaagtaaattaataatttggaggaaatagcaagccatttataatgggtaacatgtcttctattgtagaagctcccacagtgacagctactataatagctacttctactgaatgtttactgtgtgtcaggcactgtgcttagtgctttacatataatctctcaacataccatcagtcatcacaacaacctagagaaagacatagcctggattctgctttacacatgaggagacaaagtctcagggaaagtccataggaagtggagtaggccgggcacggtggctcatgcctgtaatcccagcagtttgggaggccgaggcgggcagattgcctgagctcaggcgttcaagagcagcctgggcaacatgacgaaacgccgtctctaccaaaaatacaaaaaattagccaggagtggtggcacacacctgtaatcccagctactaaggaatttgaggtggaaggatcatttaaccctgggaggcagcggaggttgcagtgagctgagatagcgccactgcactccagcctgggtgacagagtgagacctcatgtcaaaaaaaaaaaaaaaaaaaaaaagcaaacagtaaaaattggtgggatttaaaaaaaaaggaagcggaggagatgggacaggactcaggccagcaaccgcactgccagcacactgtctaaattgtggagaaatattgagaaaaggttaaatagcgcaggttcagcctgggcttcaaagctgaattgagagaacttgggggctaaggatttttctcctcatcttgaaattattttcacactagtgttttttgtgactatctttgtttgccttaaactaagtgttgactgagattctgtcatacataagatacgttgagctactactttgtaagtaggtgttaaaatagagcctagtaaggtataatagatgggaccaagaacatcttctgggaaattctttttttctttttttgagccagagtctcgctctgtcgcccaggctggagtacagtggtgcaatcttggctcactgcaaccttcgcctccggggttcaagcgattctcctgcctcagtctcctgagcagctgggagtacaggcatgtgccaccatgcctggctaatttttgtatttttagtagacacagggtttcaccatgttggccaggctggtctcgaacttctgacctcagataatccgcccacctcagcctcccaaagtgctgggattacaggcacaagctactgtgcccagctggaaattttttcttaagaacacaaattgagacccctttctttcgatgggtggcttgatgttttggagtggggagcccattcactctttatgagggactctatccttctcttcccttaatttttttcttgctaattaaaatttccttgtaatttcaggaaagcctaaaaaaaaaaaaccacacacacaccagaaaagcataaaggcaaaaacaggatgataagccatttacccccagagacgagcattgtaatacactgacttaccccagctgtgtttttcttgcatctgcacacacagactccaacagatgggatgctctctgccgcagacacaaaataccagactaaaaggggtttggaggatgggattttgttatcccacatgggttggtttttgtgcagctcagcagtgtggggctctgtatcactctcagccagtactcaccttcccctgctggtacaggatgcctgctcaagcacccaaccaaaggaaggacacgtgtccaaaggaaggacacgcttatgttctccttgtggcctgtccactgagcaggacaccctctcctaaagcaccaaggagacttcctcttacatctccttaaacaaggttatgttccatgcctttgccctgtggcgggggcggctgagaaagttgagtacatgcatttcagcctctgccacaggaggtgggttctgccagcgtatcattcagggttctgctgccacatgattttccacggctacatagaagtccatcataggaatggccacctgactaagtcactccctgacttcctttttctcccctgacaactagacattctgagctcttccatttccctctataaggttagatcagcttgcataacaaaatggcatttgtctggtgtgcccttgacttgagctgcaacttctctcccctgcagtttatttattttattttgtttatttatttatttatttttttgagacggagtttcgctcttgttgcccaggctgggagtgcaatagcacgatctctgctcaccacaacctccgcctcccgggttccagcgattctcctgcctcagactccccagtagctgggattacaggcatgcaccaccacacccagctaatttttgtattttcactagagacagggtttcaccatgttggtcaggctggtctcgaactcctgacctcaggtgatccgcctgcctcgacctcccaaagtgctgggattacaggcatcaaccaccgcacccagcctgttgttttttatttatttatttatttatttatttatttatttatttatttattattttgaggcagagtctcgttgtgtcgcccagcctggcatgcagtggtacaatctcagttcactgcaacctccacctcctgggttcaagcgattctcctgcctcagcctcccaagtcactgggattgtaggcacccgccaaccatgcccagctaatttttgtatatttagtagagacagggtttcaccatgttggccaggctggtcttgaactcctcacctcaggcagtctgcccacctcagcctcccaaagtgttgagattacaggcgtgagccaccagcctcctgcagtttatagacctggttggttggttccttcactcccaaggctgaaggaatttggatttatgtgaaggaggtctggaagtcgttttctttttttttttttgctatgatactactttattaggcaaaaccacatactacaaaaatgctggaagtcattttctctgtcctttcccttactccctggatagttgaaaataaaaaaataaggggggaggtgcacgcagggctagttgaattgtccccagattctaccctcagagggcactggcacttactgagccgtggatcctctgaatcaccctgcatgacccagagctgtgtcctgacggcgtctccttcttttgcaggtggtggagtttgacaccccatcggtccttctgtccaacgacagttcccgattctatgccatgtttgctgctgcagagaacaaggtcgctgtcaagggctgactcctccctgttgacgaagtctcttttctttagagcattgccattccctgcctggggcgggcccctcatcgcgtcctcctaccgaaaccttgcctttctcgattttatctttcgcacagcagttccggattggcttgtgtgtttcacttttagggagagtcatattttgattattgtatttattccatattcatgtaaacaaaatttagtttttgttcttaattgcactctaaaaggttcagggaaccgttattataattgtatcagaggcctataatgaagctttatacgtgtagctatatctatatataattctgtacatagcctatatttacagtgaaaatgtaagctgtttattttatattaaaataagcactgtgctaataacagtgcatattcctttctatcatttttgtacagtttgctgtactagagatctggttttgctattagactgtaggaagagtagcatttcattcttctctagctggtggtttcacggtgccaggttttctgggtgtccaaaggaagacgtgtggcaatagtgggccctccgacagccccctctgccgcctccccacggccgctccaggggtggctggagacgggtgggcggctggagaccatgcagagcgccgtgagttctcagggctcctgccttctgtcctggtgtcacttactgtttctgtcaggagagcagcggggcgaagcccaggccccttttcactccctccatcaagaatggggatcacagagacattcctccgagccggggagtttctttcctgccttcttctttttgctgttgtttctaaacaagaatcagtctatccacagagagtcccactgcctcaggttcctatggctggccactgcacagagctctccagctccaagacctgttggttccaagccctggagccaactgctgctttttgaggtggcactttttcatttgcctattcccacacctccacagttcagtggcagggctcaggatttcgtgggtctgttttcctttctcaccgcagtcgtcgcacagtctctctctctctctcccctcaaagtctgcaactttaagcagctcttgctaatcagtgtctcacactggcgtagaagtttttgtactgtaaagagacctacctcaggttgctggttgctgtgtggtttggtgtgttcccgcaaaccccctttgtgctgtggggctggtagctcaggtgggcgtggtcactgctgtcatcaattgaatggtcagcgttgcatgtcgtgaccaactagacattctgtcgccttagcatgtttgctgaacaccttgtggaagcaaaaatctgaaaatgtgaataaaattattttggattttgtaaaa

SEQ ID NO: 85 - DNA, 75590 bp, Homo sapiens
gcggcccacttaccgcgagaacgcggagtcctgcggatggcgcacgcgcaaacctcctgtgatgcctgcgcctcctggccccgccttccgctcgtgggagttccggatgtttagcgttaccatggatcctggaggtgcccgcgaacactgcttgtcgcctgggcaaccggagaggacgaagcaggacctaggtggcggcggtggtaccggctgcaatggtgtccaatcccgtgcatggcttgccctttcttccgggcacgtcctttaaggactctacggtgagcagttatctgccagactcccacctgtccccaccttccagcagcccaggaggtttccccgctcagtgcacctccattcccctccactcaagtctgtcttctctccaaacacgtcttctgtcctgaccctgttctttattctgggccgaacttctgccgttcttccctagccatcctcatcccctctctccgatcctttgccctccgcctcatccctctctagttttttcccactccatcttggcagtgtgttggcgccttcattctcatcccgttagccgcgttctttcttacggccctgctcctccaagcccctgcctcttgtccctttagatcactgtttcccccaccctactcccaacctatctctgggccctctccctagctcgttctctcacatcataacctgtctccgtccatcgccgcccttaaaaccccccgccactatgcaccttcaacctcattcccacaggtccgtcattcccgccccacctcttcctcttctgaatcctgtacccggtagtatctcccactcccagctccatttcctgttttgtatgtatatcgattccgctcctcttctttccgccaggtctttttcctttcttctttatgcttgcatccaaccccattcttttttctccatcttctacattttccacaatttagtcccatcctctccccattcctttctttctccgttgcgggttttccccaaaacttgctcaccttcctcccaaagcatctttccctgctttgtaagagatattcctttccagttccctcaagaattgattagttgctgtttattcttccccggccctgttctttttattctaacgtttttgtaaaaagattcctgtttagattttgttttgctccttccccaaccttgtgtttttatttgcattttctagacaaaattttttaaaaagtagcagcagcttggattcttttttttttttaaactcttgccacagtttagctcttaaaattatttggtttgttttaattctgacagggctactgaaatgtatgtgctgaaaaatcaataatgagattcagtagactgatcatcatagatgagctaacagtagtttatgtttatatagtttaatactttaaactcttgccttcctctccagcttcacaaagttaaaatattttgtcaatttattttctttggaagaatcaatttagaatgaaatcgaaagtttggtgagagaatttgtattctgaatctctgtaattatccctgcattaagacacaacatcatagatttttagtttcagtggacttttcagttttatgtaatttagaaaatgttgtaggcacttgcctgccctatacaggatgagcttaagcttttggtgttggtgagtatagacagggctgagttgatacagggaattacagaggtgtggatggaagtgcaaagctctaaaaacatattgctgtattacaagtaagaagaactgtgcattggacatatttcagattttaaatacactggccaagtgtcaaccaatttgccctatttgaaatttgaaaagcatcgtcagtatatcttcagcagtgaaggactgaatatgtattaatgtaattctaaagacatgcagataagaagttaaaaaatttttaaaggggagtgggaaaacgattttaaaaaaagacacacagaaggtgaaccataatggacaagaggggtggaaagggccgaggttgccttgcctggggtgtctgtgagttatggctgaatgatggtagagacatttgtctaaaacaaagaaataaactgaagtcactgatgttgcttctgtctttggtggtggaagaagagcttgaagttccataaattacccaatgaggatgtcaactcagcgcattttgttctatgtcatgtttactatatacctggagcagtccctgtcaactgacttgtgactctgaatacatgacctttaaaaacaaatgtcatacatttgtttttatgggttatatacagtttataacccttttagcaaaagaagtttattctgttgtacctttcatgttagtacagatcttgaaagatggtaggctgggctctaaagcaattaggatgtagaaagtttttttcataaaaatattttttatgattaatcttaaattgtatctatgtatatatttgaatattatagataagtaattgtgaaagtatcctcacaacagaaaaaggaaaccattaacataacctctaatttgcctttctactcttttttatttaatcttttaaataaaaatgtgttcattgtaaaaaatcaacataatttagaaatgtataatacagaggaccaaaccagtctcttcatgcacatatttccatgcttataattgcagtacacatataattttatatgttgctttttcaggcttattaaatcataaatattttcaccaggttgccacgtgatctctaaaatcaatattttaatgacagcaccataatccattgagtgagttttcgatcatttactcatgtcttcatatgactgtcttttagattgtcttcaacatttaccattgtaatgggcagcttcaggcatatagttctttctcataattctgaatcatattcgtaaataaatggtcggggtagaattattgagttcaagactttaaatatataccatccagttgctttccaaagagttgtaagaatgtatcactgtcattgtgacaagagggacaggtaaaaataaattcattccatgtaaaaataaaattcacagaaccgtatcttctaggttctacagtttttacggccccagatatcagatgaaaaacatgagaagactagtgaaaaacttaagagtatagatgagatactcttttaatctctcatgcaaggtgaattggtagttaaattgggcattacagagcacagctttaaattttactttaagcttaggtggctacttcgctccttgttcttgttcaagtgttttaacttaaaatacagaatcttttaatgtaggtaagcttttgttttgttttgtttttttgagacagagtctcactgttgcccaggctggagtgcagtggttcaatcatagcttattgcagcttggacctcccaggctcaagtgatccttccacctcagccgactataataggcacaagccaccacacccagctaatttttttttttttttttttttttttttagtttttgtagagacagcatcttgttgcccaggctggtctcgaactctggggctgaagtgattctccctcttcagcctcccagagttctgggattataggcacgagccaccatgcccagccttaatgttggtaagcttcttgatgtaagttttgtgatgcttataagcaaagattcaagttatatttttaaaagttagttttttttttacctaacaaatatttgtctaatgttattaatgacacattcttttcttcttcagaaaacagccttccacagaagtcagacgctgagctacaggaacggctatgcaattgttcgacgtccaacagttgggataggcggagaccggctccagttcaaccagctgtcccaggctgagctggatgagttggccagtaaggcaccagtcttaacttatggccaacctaaacaagccccacctgcggattttattcctgcgcatgtggcctttgacaaaaaggtatcatctggaattttagggtaccccttgaattagggtctgagagccaactgcttgcaaaaaagttaaaacagtaaaccacagaatttccaaagggctctgaggagaaaattgttcagatgccttaacccttagtcatggacagctgaactcaggctaaaaagaggctttctttagtcaggaagctgattacagggagtaaagtagttccctgtagacttcaccagactattttccaaatgcagttaaagaaaagttggctataattctgaattcttgaatttatattctatgtttatcagccgtgtgttctccactttttaaaggtaactgtattctgtaatggtgacatatctaatcttcatgagatgcagaatatcattatgaaaacaatgactccatctattgtcagttttctgcaaggcagtctccataagtttttggttttcagggaacatttcatgtttgatattacataaccaatgggtggtataacatttttgtttgtttctcatttatctttatgtttttgcaatgtgagtttcctcatttccatctattgacattaccacatcattcttgtttttccttgtcaatgagcctcctcttttcactaaagtgaagtagccctagccctgaccatgtagcagaatcactggcgagatttttaagaaagttacgttattccaaccctcatcagttctaatttccagatgagctttatgtgtaactggttctgagaagtactgatcagttttgataagttagctttcttaatttactcttagtctgtttcttttcttgtcttaatttttattttattattcctgttaaatgtctataacattttcatccagccagccaacttttattgagtacctgttgtaagctagaggctggggaggagctatgccatttacatgatagtcacttatttttaaacaatttcagtctctcaactagaatctgtatcatttcctcttccccacttaactcatttatagggacacattcacatatgcattcataggccgaacctaaacatccactaaacagtatgatttatataattggatgtatcttttccttttgcttgtttcttttgtttatttgtggctttgacagacattgcaaaatcagcagagaagggagagggctgaaaatacaagagagaagtgggataggcactaaataattaccaagatatgaatcctggtatgtttaatttttactgaaaagaatagtaagtaactgttataaagtagaaggtgataaagtgatatatgtcgtaagaaagtattagtaaaattcagaggagaaattgcgcttgagtaggaaataggcttcctattttttgttttctatgttattttacactaattgttgttacttaatttgtacttatttaatattcataattcatttctttaaggatagtgcacataaaaatattatttttattttccaattcattttacttggatcatcacaatttctagataaatgagccttagcatagataatggggtagagagaagctaaatgcatgactttgaaactaagtttgtttgtttataataagggaattatggtttctctgaattaaatgaaggttctaattttaaatgaaggacctctaatacccagaggtccacataatagccaacatatttgtctatattttggaaattcttaggactgttcctcatagacagaatataacttcatttcttacttaggtaataaagaccaggacatctattccaagtgccctcatcttttccccttgctcctgtataattccagcatcacctactatattgtgtttcccagactgacttccagctctttatttctgatgttcttctttcatctttttcatcttcaagtttcatattatttctatttcagacactctagtgactgcttctctagctagagtcatatcatcctgtcctctttctataataccttgtgatgcctttaagcaagataactttgtttctcacttgactgtcaaatcacttacaatctgacttctccctacccacagccccagaatactttctcctaggtagccagtgctgtccttttaccagatctagagaggtttactttgccagcattgtctttggcttgtttatgccatctgacactgttgacccttcctcccttcttgaaactgtgctcttcttttgcctccatgactctcattttcctccttctttctatgtggttgcttattctttagcctcccttcctcttttcaattcttaacttacaagtattttcaaggctctatctcattctttatataattttcttgagatctcacccactttcgtgatttcaaccgtcacctcaccgtagagaatgtcactatttagttccaactctgacatcattgagactccagatctgtatccccctggcccatgggatatcttcacctggatgaactgttggtacctcaagttctgtatgtctctaacttatctctatccctcaccttttcccatagatctgctttccctgtgtggttccactaggtaatccaagcttgaaacctgagccatctttggctttttctctcctttatcctccacacttaatgagttgccaagtcaaatatctctcactttcatttcctctgccactatcatagttcagacaagccaaatgactacctaactgttgttttagtctcattcctagtccttatgcttataacaggtatgctgccttgtttattctctagagttcagctctgattatgtcatttttctgggaaaatgccatcaggctttcttaaccaatacagtaaacattaccaccattcacctcactgtgacatgaaagtcatctttcattcttctttcccctcacaatccacatctaatctattagcaagttctattgtttctgcttctaaaatatgtaactaattcatttacttattttcatcctcactattaccataaatttattttccacagagcagccaggcttattttttgaaaatcagattatgtcacatactgactgaaacacttccatggcttccctatcatctataaagatccaactctacaggttcctcacagccctactggagctggccctccctgctctctccccagcctcatcttgggtcctttttctcacctatcatgtttcaatacattggatttatttttactgatttccttgaaatggcagcatttgaaaattccaattcagggcctttttgtacatggcatttctcctatctgaaatagcttccccaccatccttaagtggctgactccatctttcctttcagtgaggcttttcctggccactctgctatggcagttcctcctcatttttctatatcacttccctctcttttttttttttcccctttgcagcactatattataatttgtgttgctgatttgtttagtgtttatctgtcccacctgagtgtatacttcatgaaggtaaggacttatatagtttattatatatttagtgctcaataaatatcagttctaaaatgacatgaataattaacaaaatttatttcttgtctgtgtcactgctgaaaattggcaagtcaaacacgtaccatatatgcttataataatgtaaaattaaaaatgtgacttggctttttataattgtgtgtgatatgaaaatatttatgcagcatttccccccttcatcttgaagtaaatacaaatatttttatgtttattgtggcattctgagcacttcctgggagttagaagacctggattctaattctgggtctcctaccagctaacattgtgaccttgtagtcacaatctctaatttcctcgtctataaactcagaaggttagaatacatgataatcaggagcccagcctgctataaaattccatgaaaagtatatttttaaacacagtatttaaatataatttttcttttctttctacgtaacaatcaagttcttattctacctgggaaagctgatgttatcccactactttaaaaacaattttttttatttccataggttactggggaacaggtcgtgtttggttacatgagtaagttctatagtggtgatttgtgagattttggtgcacccatcacccaggcagtatacagtgcccccaatttgtagtcttttatccctcacccccttcccaccctttccccctgagtccccaaagttcattgtgtcattcttatgcctttgcatcctcataccttagctaccacttatgagtgagaacatacaatgtttggttttctattcctgagttacttcacttagaataatagtctccagtctcatccaagtcactgtgaatgctattaattcattcctttttatggctaaatagtattccatcatatatatcacattttctttgtccacttattgattgatgggtatttgggttggttccatatttttgcagttgcaaattgtgctgctataaacatgcatgtacaagtatcttttttgtatgatgagttcttttccaatgggtagatacccagtagtgggattgctggatcaaatggtggttctacttttagttctttgaggaatcttcacacttttagttctttaaggaatcttccatagtggttgtactagtttacattcccaccagcagttcccagttcattgcatccacaccaacatctaatattttatgatgttttgattatggccattcttgcaggactaagatgatatcacattgtggttttgatttacatttccctgatcattagtgatgttgaacattttttcatatgtttgttggccatttgtatatcttcttttgagaattgtctattcatgtccttagcccactttttgatgggcttctttgtttttccttgctaatttgtttgagttcattgtaaattctggatattaatcttttgtcagatgtatagattatgaagattttttcccactctgtgggttgtctgtttactctgttgactgttccttttgccgtgaaaaagctctttaggttaattaagtcccagctatatatctttgtttttattgcatttgcttttgggttcttggtcatgaaacccttgcctaagccaatgtctagaagaggttttccaatgttattttctagaatttttatagtttcaggtcttagatttaagtccttgatccatcttgagttgatttttatataaggtgagagatgaggatccagttttattctcctacttgtggcttgccaattatcccagcacaatttgttgaatagggtgtcctttcctcactttatgtttttgtttgctttgtcaaagatcagttggctgtaagtatttggctttatttctgggctctctgttctattccattggtctatgtgcctatttttataccagtaccatgctgttttggtaactatggtcttatagtatagtttgaaatcaggtagtgtgatgcctccaggtttattctttttgcttattcttgctttggctatgcgggctctttttaggttctatatgaagtttaggattgttttttctaattctgtgaagaatgatagtggtattttgatgggaattgcattgaatttttagattgcttttggcagtatggtcattttcacaatgttgattcccaccctatcagcatggaatgtgtttccattatttgtttcattatttgtgtcatctgttatttctttcagcagtgttttgtagttttccttgtagaggtctttcacctccttggttatgtatatttctaagtttttgtttgtttgtttgtttttcagctattgtaaaaggggttgagttcttgatttgattctcagcttggtcgctgttggtgtaaagaagagctactgatatgtgtatattaattttgtatccagaaacttcgctgaattcttttatcagttctaggagctttctggaggagtctttaggattttccaggtaaacaatcatatcatcagtgaacagtgacagtttgacttctttacctatttggatgacctttatttctttctgttgtctgattgctctgcctaggacttcttctagtactgtgctgaagaggagtggagagagtgggcatccttatgttgtcccagttctcagagggaatgctttcaacttttccccattcagcattatgttggctgtgggtctgtcatagatggcttttattacattgaggtatgtcccttgtatcaattttgctgagaattttaatcagaaaggggtactagattttgttgattgctttttctgcatctattgagatgatcgtgtgatttttgtttttaattctgtttatgtggtgtatcacatttattgacttgcgtatgttaaatcatccctgcatccctggtatgaaaaccacttaatcgtggtggattatctttttcatatgttgttgaattcggttagctagtattttgttaaggattttagcatctatgttcatcagggatatcagtctatagttttattttttggttatgtcctttcctggttttggtattagggtgatactgccttcatagaatgatttatggaggattccctctttctctatcttgtagaatagtgccaatagtaccagtttttctttgaatatctggtagaattcttctgtgaatctgtctggtcctggactttttcctgctggtagttttttaattatttcagtcttgctgcttgttgttggtctgttcagggtatctaattctacctgaattaagctagcagggttttatctttcaggaatttatctatctactctagttttctagtttatgtgcgtaaaggtgttcatagtagccttgaatgaccttttgtatttctgtggtgtcagttgtaatatcttccattttgtttctaattgagcttattggattttctctcttcttttcttggttaatcttgctaatggtctatcaattttatgtagcttttcaaagaaccagctttttgtttcatttatcttttgttttttttgtttgtttatttcaatttcatttgtttctgctttgatcttggttattttctttcttctgctgggtttgggtttggtttgttcttgtttttctagttccttgaggtgtggccttagattgtctgttagtgctctttcagactttttgatgtaggcgttttggggtttgaacttttctcttagcactgcctttgctgtatcccagaggctttgataggttgtgtcattattgtcattcagttcgaatgattgtttaatttccatcttgattttatttttgacccaaagctcacttaggagcaggttatttaatttccatgtatttgcatggttttgaaggttccttttggagttgacgtccaattttattccactatggtctgagagagtgcttgatataatttcaattttcttaaatttattgaggctaattttgtggcctatcatatggtctgtcttggagaaagttctatgcgctgttgaatagaatgtatattctgcggttgttgggtagaatgttttgtaaatatattaagtccatttgttccagggtatagtttaaatccattgtttctttgttgactttctgtcttggcctggctagtgctatcagtggagtattgaagtccccccctattattatgttgctgtctatctcatttcttaggtctattagtaattgttttataaattgggtgctccagtgttaggtgcatatatatttaggattatgacattttcctgttggacaggtcttttatcattatataatgtccctctttgtcttttttaattgctgttgctttaaagtttgttttgtctgatacaagaatagccactcctgctcacttttggtgtccatttgcatggagtttctttatccacccctttaccttaaatttacatgagtccttatgtattaggtgagtctcttgaaggcagcagatggttggtgaattcttatccattctgcgattctgtatcttttaattggagcatttaggctatttacattcaacattagtattaagatgtgagataccattctgttcatcgtggtatttgttgtctgtatacctggattttttgttttttgtttttaattgtatttttgttttataggtcctgtgagatttatgctttaaagaggttctgttttgatgtgttttgatttgtttcaagattcagagctctttttagcagttcttgtagtgctagcttggtagtggcaaattctctcagaatttgtttttctgaaaaagactgtatctttccttcatttatgaagcttagtttcactgaatacaaaattcttggctgataattcttttgtttaaggaggctgaagatagggccccaatcccttctagcttgtagggtttctgctgagaaactgctattaatctgataggttttcctttataggttacctggtgcatttgcctcacagctcttaagattctttccttcatcttaactttaaataacctgaggaaagtgtgcctaggtgatgatctttttgtagtgaatttcccaggtattctttgagcttcttgtgtttggatgtctagagaagttttccttgattattcccccaaatatgttttccagacttttagatttttcttcttcaggaatgctgattattcttaggtttggttatttaacataatcccaaactttttagaggctttgttcatattttcttattcttttttctttgtctttgttggattgggttaattagaaaaccttgtctttgagctctgaagttctttcttctgcttgtttgattctattgctgagactttccagagcagtttgcatttctataagcacatccattgtttcctgaagtttttattgttttttatttatgctatttcattgaaaaaaatttcccttcacttcttgtatcttttttatttccttaaattgggctttgcctttctctggtgccttcctgatcagcttaataactaaccttctaaattattaggtaaattagggatttcttcttggtttcaatctattgctggtgagctagtgtgatttttgggggcattaaagaaccttgttttgtcatattaccagagttggttttctggttccttctcatttgggtagactctatcagagggaaggtatagggctcaaggctgttgttcagattcttttgtcccacggggtgttcccttgatgtagcattctctcccttttcctatggatgtggctttctgagagccgagctgtagtgattgttatctctcttctggatctagccatccagcaagtctgccaggctccaggctggtactgggggttgtctgcacagagtcctgtgctgtgagccgtctgtgggtctctcagccatagataccagcacctgctccagtggaggtggcaggggggtgaaacggactctgtgagggtccttagccttggttgtttaatgtactatttttgtgctggttggtctcctgccaggaggtggtgttttcaagatagcattagctgtggtagtatggggggaacaggcagtgggtgggcccctagaactcccaagagtatatgccctttgtcttcagttaccagggtgggtagggaaggaccgttaggttggggcagggcaagatgtgtttgagctcagactctccttgggcaggtcttgctgtggctgctgtggaggatgggggtgagggtctgaggtcaatggagttgtgttcctaggaagattatggctgcctctactgtatacttcaggttgtcagggaagtgggggaaagccagcagtcatagacctcacccagctcccatgcaacccaaaggtccaatctcactcccactgtcccgcccctctccaacagcaccaagtctgtttccaggcagtgggtgagcaaggctgagaacttgccccaggctacctgcctcccagctttgaaagcaagtggggctttccttcttcccccacctgtggaatctgtacactggattcacaccttctcccgagttctggccaggagacttctcaattggttcaaatcattacacagttcagctggaggttcccttcttcctgtggccttttcccagtgcctctggctgccctccccaagtacccctgtgaagcaaggcagaaatggcttggtaggggaccccagggagaccataggacttttcccgctgcttcctctacccccgtatttcactcgcctctctgaattgacccagctccaggtaaggtcagaatcttctcctgtaatctagaccttcaggttcctcagtgggggtgtgtgttcggggacagatgatctccctttcccacttccatagtttgggcactcacagtatttggggtgtctcccgggtcctacaagagcaatttgcttccttcagagggtctgtggattctctctgcttacctaatttattcctgcagtcatcctggagcaaaaaagctcacagtgcaagccttcacacgctgctctgcccgtctgagtgggagctgcaatctagtcctaccttccatctgccatgattccagggaaactttccaaagagcttttctacattaactcttctatcccattcattctttgtgggaggagcacagaactcttaattctgttcttaataaatagataagtgccttttaaaaattaacaattaagtaattcttttcggttagcatattctttacctgagaccatatatatatatatatatacatacacacatataacaagaccatatatatatgtgtatctccttgcctcccattctcaggccaacttcctgttgccataggcattttcatgcccaccaatcttagaaaacagatggtttgggagcatggctgtggccacagacttgatctttggttatcttctctgtgattctcttctcactcctttggtgagttgtccaggttcatggcttgaaatgtcctctttatgatgataagttgtcctctaaacatatgtatacataaatgcctatttgccatctcatcttgaatgtctaataaatatctcaaattaagcatatctaaaactgaactcccaattttgtcttcttacccccaaaatctgttctgcagcaatcttcttcatatcaatttgatagtaattctatgctttcagttgcttggccaaaaatgtttgcattatccttgaatgttctgtaatatttacttcttcccctaaacccagtcctgcagtataaattaccccctgcagtatacaacttgtgctgtcacttaaattcagtaagtctaaaatcaaactcaccatctgccatacccaaattatcttctccttatgtttacatttctatgagatcaccactatatcgccagcactgggttttcctcaacacctcatctgcttccaccttcccacttccttactatcaatccagtcagacttctgcttttccattgctggtaattaattactgcagacctggactattgaaggggcttccagtctgattgccatgcctagtacttcctcctccatcatagcctgcatactgctgctgggtttccttcctctgcttctgttattaccactgcttagaagccccccttgtatcctctgctgatctaaaatctttcactcttcaagtctaatacatcttttgtttcctcctagttaagctttctctgaccactttagtccacacagattccttcttggaaccacgatagcatttgttacctgagaagtagcaagatgtgtggagagaatattgggttgtgagttaatagtctgaatttcagttccagttctggccctaaccccttacatggcctcaggcacgccaccttaccaccctgggtctcagtttcctcctttataaaataagtggggttgggctagctgatcagttcagctttaacattttatgtatttataaatatatggctcagatacaggccattttatatatgaattactatgatcatgtcccccctttcagttctttgcagttgatctaaaatgttacttcaacattatctgtcctttgcttttaccatgttatttttctccttcaaacattccactgcacttatccattttatctttttattatgagttttaaggccttcattatattcacatttctcctatgcacttgtatgcacttgccagttctcttggtttttatcttgtttttccacagtagttacgctacccatttttttttttagcaacagtgtccgtgtatagaattatttcatctttccatttatcaagccatatttctgtttcatttaggatcttcttgatttgttcctcttattctagtagaggcttgggtaaactatcttgcctgcttagaatcccattctaatactttctctccttgaaaagacacattaaaaacagagacaaaataacagaaatttaaaaatcccaaagcatgttaacatattctttttataatattgttttatgctttttattttttatttttttgagatggagtttcactctgtcacccacgctggagtgcagtggcgctaactcagctcactgcagcctccacctcctgggttcaaatgattctcctaccatagcctcccaagtaggtggaattacagttgcccaccaccaagcctggctaatttttgtatttttagtacagacggggtttcaccatgttggccagactggtctcaaacaccttaactcaggtgatctgcctgccttggcctcccggtgtgctgggattacaggcgtaagccaccacgcctggcatagtttatgttttttaaatgtgtaatctatatattgataccatgttgacttcacattgatgatgatgctccccagaggaccaatggtttgctcaatgtaatatatatgttcctgagcacaaggagggtatttacacacgttttagagattgtatagcggattgatgatgagggtatgtacacacccttcaaagattctgtagtggattgatgatgtgaaagtcattcatataaagtttataataatgaacgtaattaatatacatttacaaaggactacacttctaaagaagtgcaattaacccttcattttcagtttgaaaccaaaaatcgcaatcttatccaagattttttactcttcccagaagttctgggagggacttttgacatggaggtgaagctagtagagttaagtcctttaagatgtattctcaccaaggaacatatgcaataaatagtttatacacattgtgagtatttaaagcagatgtcagcaaactttttctgtaaagggcagttagcgtatattttggccattgcagtggttttagcctgcgtagtctgccacaacaaaataccacagattgagtggtttaaataatagaatttattttctcacagttctggaggttggaggtccaagatcaaggtgccagctggtttgaattctggtgagggctctcttcctggcttgcatacagcggtcttcttgctatgtcttcatgtggccttaccttggtgtgtacatgtgggagttaggggagggaagtaactctctttctcttcttctcttctaaggcaaccagttctatgggattagacttaaaggtggcatacctctatccttaagatctggtttaaccttaattacctcctaaggatcctgtctccaaatatagtcacattgagggttaggggttcaacatatgaattttggggatgagggggacacaatttagtctgtgtatctctgtcacaactattcaactcttcccttgtaatgggagagcagctgttaacaaaaaagcgtaaattatttacataattatttgtggattgaaaatttaaatttttataatttccatgtgttatgaaacattttttaaaattttttaaaccatttaaatatgtaaaacccactcttagcttgcaggtcataaaaaaaacaggtggcaggttagatttgtcccatggactatagtttgcagtatctgtagttttagagtatcaagatttacaggatagaagtgatgagtgttaaaatctccctgtgtggttctgttttcaggaaggtacttgatatttttcagatgactatgacaagctaatagtacaccatttctcctttccttgtatgttataggtactgaaatttgatgcctatttccaagaagatgttcctatgtcaactgaggaacagtataggatccgtcaggtgaacatttactattatctagaagatgacagcatgtctgtcatagagcctgttgtagaaaattctggaatccttcaaggcaagttaataaaacgccagcggctagccaagaatgaccggggtgaccattaccattggaaagacctaaatcgaggaataaacatcacaatttatggcaaaactttccgcgttgttgactgtgaccaattcacacaggtatagcatatatttttgaaagttgtggggtctgaggcatcattctaatttatagaaggatacatttcatttattagggtaaggggaggacattggtaatctgtcctgcatgaattattatgaatggctaggtatttgcatgtgtgtatgtgctaatatgtgccaacactaatagtaacataattttttcagaatgatattaatacttattcactcaaaatcaaactctcatcatagctgaataatttggtaagaaaccaggttaaaatggcagttcaaacagggagtaggggaatagcatccctgctgggatgtaagtatggaagagggattaaacgttttatcttaagtgtgagtttacaaaaatagcactacttctattagcagatatgagcctaaaattttttgtgtagctcatatatttttggtaaatgatacttgctatattctaggaaagcttaccatctaaagaatttctgaaatgaaaccatttttaaatgaaaaaacctcttctatatgtaaaaagtcctctatttcgtaagtttggattttttaatacaaaggaaacttttattaaagttacatgcatagaggatataggtggcctttctttactacaaagtgtaggaattaggaagtcaattccaaatttgtcttagttaaaaaaatatttctagcagcaaagatatagtttctgaagtattttatgtccctattccaggatacctagtgccatatgtgactaatttttaccatgcactgagctcctatgaatccattattgttttcatttagtagtttgtttaacagatatttatttgcatgcctgctttgttccatgcactgttctaggtgccagatgttttcaggaaggtacttgatatttttcagatgactatgacaagctaatagtgcaccatttctcctttccttgcatgttataggtacttgcccctatagaggttccaatcttgttggaggagataagcaatagcaaataaatagattggttatatgtcagatgatgataacagcaatggaggaaaataaagctgagtaaagggaatggaagttgaggggctctttatagaggcggatcagagaatgcctcagtgataagatgacatatgaatagaggcctgaaggaagtaaagaaaggagccatggcatcagtgccattccaaagcaatagagaaaaatagcttcaaaagtagaggtgctagaccatctttgagatattctcccgttccaacatatttttatctctttgctttttaggtgtctgaggtcttatatatcataggcagtttcacaattgtaccaacagtgagaaatgataaaatgttatctaaacataaatgtattaacaattatttttacagttgtgttttcataacaattatttttacagttgtgtttttatgggcaatttgaacatttgcaagttaatcactgagcgtttgacctaatctatttatagtcggttctcattattgacagtaattaggactataaagtcaccacaaacactgaattagtgaatactgaaccactagtcttagaggaaatacagggttaggttcccactaatctctggccacatttttgtcaactgatcaatacataagtttgattcatgtatgtttctgtttaaagacaccttatttaatatatacggttgattcattaacattaaactcacacccaacagcactataactcacgtctgaacaaagcttatctaagacatgcattttctccatgaggtgtgttacagccttcttgtgcttaggaacactaaatagcacttcatcactaggcactgggaccctttaaacagcaaaatcaccaacaaaaaacacaaaaatgcaaaaaatctggcaccttcatgtatatgtatatgtatgtgtatatgtatcacattttctttttccagtttaccattgatgggcattcaggttgattccatgtctttgctattatgaatagtgctgcgatgaacatacttgcgggtatgtctttatggcagaatgatttatattcctttgggtatatacccaataatgagattcctaggtcaaatggtagttctgttttcaggtcttttaggaatcactacactgctttctacaatggttgaactaatttatactctcatcaccagtgtataaacatttctttttctccacaaccttgacagcacctgttatttttttactttttaataatagccattctgactggtgtgagatgatatttcattgtggttttgatttgcatttctctaatgatagtgatgttgagcttttttttcatatggttattggccatgtgtatgtcttcttttgagaagtgtctgttcatgtcctttgcccactttttaatggggttctttgctttttttcttgtaaattaaagtttcttatagatggtgcatattggacctttgtcagatgcatagtttgcaaatatttctttcccattctttagatagtctttttactctgttgatgctttcttttgctctgcggaagctcttacgtttaattagataccatttgtcaatttttgcttttgttgtgattgcttttggtgtctttgtcatgaaatctttgcccattcctatgtttagaatagtgttgccttggttgtcttccagggtgtttatagttttgggttttacatttaagtcttttatctatcttgagttgatttttatatctggtgtaagatatatggctagcatatggctagcaggttatcccagcacctttccccattgcttatttttgtcaactttgttgaagatcacataattataggtgtgtagccttatttctgagctccctattctattccattggtctatgtgtctgtttttgtaccagtactgtactgttttggttactgtagccctgtagtatagtttgaaggcaggtaacatgatgcctccagctttgttcttttgcttagaattgccttgactattcaggctctttttgggtaccattgaattttaaagtatttttttctagttctgtgaagagtgtcactggcaatttgataggaatagcattgaatctgtacattgctttgggcagtatggtgactgtaaagatattgatttttcgtatccatgagcatgtaatgttttttcatttgcttgtgttatctctgatttccttaagcagtgttttgtaattctcattgtagagatctttcatctccctggttagctgtattcctaggtatcttattctttttgtgacagttgtaaatgggattgtgttcctgattttactctcagcttggctgttgttggtgtataggagtgctagtgatttttgtatgttgattttgtgtcctaaaattttgccgaagttgtttattaacttaaggagtttttgggatgaggctctggagttttctagatatagaatcatgttttctccaaacagggatagtttgactttctctcttcctacttggatgtccttcatttctttctcttgactgattgttctggccaagacttccaatattgtcttggatagaagttgtggaagagggcatccttttcttgtgtcagttttcaagaggaatgcttccagcttttccctgttcaatataatgttggctgtgggtttttcatagatggctctgattattttgaggtgtgttcctttaatacctagtttatttatttatttattttattattatactttaagttatggggtacatgcgcacaacgtgcaggtttgttgcatatgtatacatgtgccatgttggtgtgctgtacccattaatttgtcattcaattaggtatatctcctagtggtatccctccccacaccccccaccctatgacaggccccagtatgtgatgttccccaccctgtgtccaagtgttctcattgttcaattcccacctatgagtgagaatatgcagtgtttggttttctgtccttgcgatagtttgctcagaatgatggtttccagcttcatccatgtccctacaaaggacatgagctcatcattttttatggctgcatagtattccatggtgtatatgtgccacattttcttaatccagtctatcattgttggacatttgggttggttccaagtctttgctattgtgaatagtgccgcaataaacatatgtgtgcatgtgactttatagcagcatgatttataatcctttgggtatatgcccagtaatgggatggctgggtcatatggtatttcttgttctggatccttgaggaatcaccacactgtcttccacaatggttgaattagtttacattcccaccaacagtgtaaaagcattcctatttctccacatcctctccagcacctgttgtttcctgactttttaatgatctccatgctaactggcatgagatgtgtggttttgatttgcatttctctgatggccagtgatgatgagcattttttcacgtatctgttggctgcataaatgtcttcttttgagaagtgtctgttcatatccttcgcccactttttgatggggttgttttattttttcttgtaaatttgtttaagttctttgtagattctggatattagccctttgtcagatgggtagattgtaaaaattttctcccattctgtaggttgcctgttcactcagatggtagtttattttgctgtgcagaagctctttagtttaattacatcccattggtcaattttggcttttgttgccattgcttttggtgttttagtcatgaagtccttgcccatgcctatgtcctgaatggtattacctaggttttcttctagggtgtttatggttttaggtctaacatttaagtctttaatccatcttgaattaatttttgtataaggtgtaaggaagggatccagtttcagctttctacatatggctagccagttttcccagcaccatttattaaatagggaatcctttccccattgcttgtttttctcaggtttgtcaaagatcagatggttgtagatgtgtggtattatttccgagggctctgttctgttccattggtctatatctctgttttggtaccagtaccatgttgttttggttactgtagccttgtactatagtttgaagtcaggtagcgtgatgcctccagctttgttcttttggcttaggattgtcttggcaatgcagactcttttttggttccatatgaactttaaagtaattttttccaattctgtgaagaaagtcattggtagcttgatggggatggcattgagtctataaattaccttgtgcagtatggccattttcacaatattgattcttcctacccatgagtatggaatgttcttccatttgtttgtgtcctcttttatttcattgagcagtggtttgtagttctccttgaagaggtccttcatgtcccttgtaagttggattcctaggcattttattctctttgaagcaattgtgaatgggagttcactcatgatttggctctctgtttgtctgttattggtgtataagaatgcttgtgattttcgcacattgattttgtatcctgagactttgctgaagttgcttatcagcttaaggagattttgggctgagaggatagggttttctaaatatacaatcatgtcatctgcaaacaggaacaatttgacttcctcttttcctaattgaataccctttatttctttctcttgcctgattgccctggccagaacttccaacactctgttgaataggagtggtgagagagggcatccctgtcttgtgccagttttcaaagggaatgcttccagtttttgcccattcagtatgatattggctgtgggtttgtcataaatagctcttattattttgagatatgtcccatcaatacctagtttattgagaggttttagcatgaaggactgttgaattttgtcaaaggccttttctgcatctattgagataatcacgtggtttttgtctttggttccgtttatatgatggattccatttattgattcgtgtatgttgaaccagccttgcatccaagggaggaagccaacttgatcgtggtggataggctttttgatgtgctgctggattcggtttgccagtattttatggaggatttttgcatcgatgtttatcagggatattggtctaaaattctctttttttgttgtgtctctgccaggttttggtatcaggatgatgttggcctcataaaatgaattagggaggattccctctttttctattgattggaatagtttcagaaagaatggtactagctcctctttgtacctctggtagaattcgggtgtgaatctgtctggtcctggactgtttttggttggtaggctattaattattgcctcaatttcagaacctgttattggtctattcagggattcaacttcttcccagtttagtgttgggagggtgtgtgtgtccaggaatttatccatttcctctagattttccagttttttttttttttggtgtagaggtgtttatagtattttctgatggtaggttgtatttctgtgggatcgatggtgatatcccctttatcattttttattgcatctatttgattcttctctcttttcttctttattagtcttgctagcggtctatcagttttgttgatcttttcaaaaaaccagctcctggattcattgatttttttttttggttttttaattaattaatttatttatttttttattattatactttaagttttagggtacatgtgcacattgtgcaggttagttacatacgtatacatgtgccatgctagtgtgctgcacccactaacttgtcgtctagcattaggtatatctcccaatgctgtccctcccccctccccctaccccgcagcagtccccagagtgtgatgttccccttcctgtgtccatgtgatctcattgggattcattgattttttgaagggttttttgtgtctctatctccttcagttctgctctgttcttagttatttcttgccttctgctagcttttgaatgtgtttgctcttgcttctctggttcttttaattgtgatgttagggtgtcaattttagatcttacctgctttctcttgtgggcatttagtgctataaatttccttctacacactgctttaaatgtgtcccagagattctggtatgttgtgtctttgttctcattggtttcaaagaacatctttatttctgccttcattttgtcatgtacccagtagtcattcaggagcaggttgttcaatttccatgtagttgagtggttttgagtgagtttcttaatcctgagttctagtttgattgcactgtggtctgagagacagttttatataatttctgttcttttacatttgctgaggagtgctttacttccaactatgtggtcaattttggaataagtgcgatgtggtgctgagaagaatgtatattctgttgatttggggtggagagttctgtagatgtctattaggtctgcttggggcagagctgagttaaattcctggttatccttattaactttctgtcttgttgatctgtctaatgttgacagtggggtgttaaagtctcccattattattgtatgggagtctaagtctctttgtatgtcactaaggacttgctttatgaatctgggtgctcctgtattgggtgcatatatatttaggatagttagttcttcttgttgaattgatccctttaccattatgtaacgacattctttgtctcttttgatctttcttggtttaaagtctgttttatcagagactaggattgcaacccctgcttttttttgttttccatttgcttggtagatcttctgccatccctttattttgagcctgtgtgtgtctctgcacgtcagatgggtctcctgaatacagcacactgatgggtcttgagtctttatccaatttgccagtctgtgtcttttaattggagcatttagttcatttacatttaaggttaatattgttaagtgtgaatttgatcctgtcattatgatgttagatggttattttgctcattagttgatgcagtttcttcctagcattgatggtttttacaatttggcatgtttttgcagtggctggtaccggttgttcctttccatgtttagtgcttccttcaggagttcttttagggcaggcctggtggtgacaaaatctgtcagcatttgtttgtctataaaggattttatttctccttcacttatgaagcttagtttggctggatatgaaattctggattgaaaattcttttctttaagaatgttgattattggcccccactctcttctggcttgtagagtttctgccgagagatccgctgttggtctgaatggcttcactttgtgggtaacccgaactttctctctggctgcccttaacatttttttccttcatttcaactttggtgaatctgacaattatgtgccttggagttgctcttctcaaggagtatctttgtggcattctctgtatttcctgaatttgaatgttagcctgcctcactagtttggggaagttctcttggataatatcctgcagaatgttttccaacttggttacattctccccatcactttcaggtacaccagtcagacgtagatttggtcttttcacatagttccatatttcttggaggctttgttcatttctttttactcttttttctctaaacttctcttctcacttcatttcattcatttgatcttcaatcactgataccctttcttccacttgatctaatcggctactgaagcttatgcatgcatcacatagttctcatgccatggttttcagctccatcaggtcatgtaaggacttttctacactgtttattctagttagccattcgtctaatctttttttcaaggtttttagcttctttgcgatgggttcgaacatcctcctttagctcggagaagtttgttattactgattgtctgaagcctttttctctcaattcatcaaagtcattctgcatccagctttgttccattgctggcgaggagctgcgttcctttggaggagaagaggcactctgatttttagaatttttagcttttctgctctggtttctccccatgtttgtggttttatctacctttggtctttgatgatggtgacgtacagataggtttttggtgtggatgtcctttctgtttgttagttttccttctaacagtcaggaccctcagctgcaggtctgttggagtctgctggaggtccacttcagaccctgtttgcctgggtatcaccagtggaggctgcagaacagtgaatattgctgaacagcagatgttgctgcctgatccttcctctggaagcttcgtctcagaggggcacctggctgtatgaggtgtcagttggcccctactgggaggtgtctcccagttaggctacttgggggtcagggacccacttgaggaggcagtctgtccgttctcagatctcaaacttcgtgctgggagaaccactactctcttcaaagctgtcagacagggacgtttaagtctgcagaagtttctgctgccttttgttcagctatgccctgccctcagaggtggagtctacagaggcaggcaggcctccttgaggtgccatgggctccacccagttcgagcttcccagctgctttgtttagctgctcaagcctcagcaatggcggatgcccctccaccagcctcgctgccgccttgcagttcaatctcacgctgctgtgctagcagtgagagaggctctgtgggtgtgggaccctctgagccaggtgcgggatataatctcctggtgtgccatttgctaaggccattggaaaagtgcagtattagggtgggagtgtcctgtttttccagatactgtctgtcacagcttccctttgctaggaaagggaattccccgaccccttgtgcttcccagatgaggcaatgccctgccctgctccgtgggctgcacccactgtctgacaaaccccagtgagatgaacccagtacctcagttggtaatgcagaaatcacccgtcttctgcgttgctcatgctgggagcttcagactggagctgttcctgttcggccatcctggaacctctcctacctagtttattgagagtttttctcattaagggatattgaattttacccaaagtcttttatatagctattgagataattatgtggtttctgtctctagttttgtttatgtgatgaatcacatttattgatttgtgtatgttgaaccaactttgcatgctggaaatgaagcctacttgattgtggtggattacctttttgatgtgcttctggattcagtttgcagatattttgttgaggatatttgcattgatgttcatcaaatatattggcctgaagttttctttttctgttgtgtctctgccaggttttggtatcagaatgatgctggcctcatagaatgagttagggaggaatccctcctcctcaactttttggaatattttctgtaggaacagtaccagctcttggctgggtgcggtggctcacgcctgtaatcccagcactttgggaggctgaggcgggtggatcatgaggtcgggagatcgagaccatcctggctaacacagtgaaaccccatctctactaaaaatacaaaaaattagccaggcgtggtggcaggcgcctgtagtcccagctactcggggctgaggcaggagaatggcgtgaacccaggagacagagcttgcaatgagccgagattgtgccactgcactccagtctgggcgacagagcaagactccatctcaaaaaaaaaaaaaaaaatagtaccagctcttctttgtatatctgatagaattcagctgtgaatccctctggccctgggccttttttggttcataggctattgattactgattcattttcagagcttgttatcagtctgttcagggaatcagtttcttcctagttcagtcttgggtgagtgtatgtgtccaggaatttatccatctcttctaggttttctagtgttgtgcatacaagtgttcataatattctctgatggttgcttataattctgtggggtcagtggtaacatcccctttgttgtttctaattgtgtttatttagatcttctctcttctacattagtctagctagtggcctatctttttaataaaaaccaactcctggattcattgatcttttgaatggttttttgtgtcttgatttccttcagttcagctctgattttggttattccttgtcttctgctagctttgaggttgatttgctcttgcttctgtagttctttcagttgtgatattaggttgttaatttgagatgtaactttttgacatcggcatttagtgctataaatttccgtcttaatactgccttagctgtgtcccagagattctggtatgtcatatctttgttccattactttcaaagaaattcttgatttctgccttaatttcattatttacccaaaagtcattcaggagcaggttgtttaatgtccatgtaattgcatggttttgagtggtttttttagttttgacttctatttttattatgctgtcatctgggagtgtgtttgctatgattttggttcttttgcatttcctgagaattgttttctgtttgattatgtggtcgattttagaatatgtgccatgtggtgatgagaataacgtatactctgttgtttttgggtggaaggttctgtagaggtaggtcacatccatttggtccaatgttgagttaggtcctgaatatctttgttaattttctgcctcaatgatctgtttaatactgtcagggaagttttaaagtctcccactgctgttgtatgggagtccaagtctcattgtagatatctaagaacttgctttatgaatctgggtgttcctgtattgggtgcatatgtatttagcatagttagttttttttgttgagttggatcctttaccattatacagtgcccttctttgtcttttttgatctttggtggtttaaagtctgttttgtctgaaattaggactgcaacccctgcttttttctattttccatctgcttggtagattttcttctatccctttattttgaacctttgggtgtcattgcgtgtgagataggtctcttgaagacagcataccattgggtcttccttttttatctagcttgttattctgcattgtggtttttttgtttgtttgtttgttttgtttgtttgtttttgagacagaatctcactttgtcacccaggttggcgtgcagtggcgtgctctcagctcactgcaaactctgcctcccaggctcaagtgattctcctgcctcagcctcccgagtagctgggattacaggtgtgtaccaccatgcctggctaatttttgtattttttagcagagactgggtttcaccatgttggccaggctggtcctaaactcctgacctcaagtgatccacccacctctgcctcccaaagtactgggattacaggcatgagccaccatgcctggcctctgtgccttttaaatggggcctttagcccatttataattaagattagtgttgatatgtgtagatttgatcctgtcattgtgttgttagctggttattatgctggtttgtttgtgtggttgctttatagtgtcactggtctgtgtacttgtgtgttttgtattggctggtaatggccttttctttccatatttagtgctccttttaagatctcttgtaaggcaggtctggtggtaatgaactctgtcagcatttgcttatcagaaaaggatcttatttctcctttgctaagaagcttagtttggctagatatgaaattcttggttgaagatttttcttctttaagaatgttgaatataggcccccaatctcttctggcttatagggtttcagctgagaagtccagtgttagcctgatggggttccctttgtacgtgacctgccctttctctgtagctgcttttaacattctttctttcattttgaccttggaaaatctgatgattatgtggcttggggatgatctccttgcatagaatcttgcagggattctttgtatttccttaatttgattgttggcctctctagcgaggttgaggaggtttttgtggacaatatcctgaaatatgttttccaagttgtttgctttctcactgtccctttcaggaatgtctggtgaaatttgagcacttggtttgtctttcctattttgctaacacgttttctggtctaatataaccagtgggtatgctttcttttttttcttttttggtgaggggaagggacttaatcatatacagtatttgttttaagtgaattagaaaattgggaatatgatttcagcctaacttggccattgtgcatcttgcctccagacctaataggaattacatattgtttgaaaccatggttaggttccagatatatgaaagtaagcaatcctaagacttactctgttacaggcacctaactaaatttgattgatttaaattatttgaaaacagttattttgccattgtgcctcccaactagcttagcaaatacctagcaatataacaatataaaatacttcaggtaactctcaattattacctgcattatggagttggctcagttggagacttaatacagcttacatgcgctcaagcagcaaactaatgtttaacttaagcaatggcatagaaatcattattacactttttctttctttttttctttatttgaggcggggtcttgctgtgacgcaggctggagtgcagtgtcatgatcatggctcactgcagccttgacctcctgagctcaagcagtctactcacttcagcctcctgagtagcctggactgcaggcaaatgccatcaaaccagtctaacttttaaatgtttttgtagaaacagggtctcactatgttgctcaggctgattgtgaactcctgcgtttcaggagtcctcctacctcagcctcccaaagtgctgagattgtaggcctgagccacagtgcctggcccatacacttatttttatataatcagtttataacttactctgaaaagctccaagaaagatgatcattgttaactttcaattatttaggtatttttagaaagccaaggaattgagttaaatccaccagagaagatggctcttgatccttacactgaactccgaaaacagcctcttcgtaagtatgtcaccccatcagactttgatcaactcaagcaatttctcacctttgacaaacaggtaagtgacataggaaccacaataggcttacttatttccaaatgtgacctacatttattggcaaaaggtttgggtagctgtattggtaactattttgaaacattacagctataattgaactgtttggacacagtactgtctttctgctttcatcaagggttacaggtacaggaatgcctacatttcatatggagatccaaagaagatcgtggagttgcggagttgttttgtgaacctcaccaaacatttaaatctcaaagcaattcctgagctacatctgcttcccaccttacgtttccaattgacaatttctttcccttaaaatgagctaatttcatagactcctttgtgaaaccataaatcgattattaggaaatttcacaaatatgcatacatgtaggttgtaatgttaaaatgtttaatttcacagaagccccactacagatgcttccttgttaaatgttatattaatattggagtccagaatgttctgagcattttccaactctgttccaaccttcctaatcctctcccttgtgagctgatgtgtataagcagatttaaatccttccctttctgtactaaagggagaaagaaaaggaagagatcaccctcagtgcttctttgctgctccttttctttagacatttaaccccttttagttcagaaaatgtaaactagcactagcatggtcttttaaggattttgttcatatcagtcatatatctgttattattttgtatttaaagattgtgtttattcccacgatttgaagaagcctagccaaaaaaaaaaaaaaaaagattgtgtttatattattgctagaagatatgtgttgatgggaccaaaaaaagactggttaataaataaaaattttttctacactaattatatataaaccatattcacatgtacctttattaatatatatataccactatgtaaagaacttcattgctcttttaatttagcttctctttcactgactaatattttggatcaaagtgagctcttcttttttggcacaaacttataatcctattatttaattctttccagctgctgacatatagtacataatttcagatgttttagtatgtttgatgaatatttctttttttttcaatttaccccatctgaaattacttcatagtctttccagctagtctttccatcgttgatacataattgccaaagtagccaagttgaactccctacttttaggattcttgagtcactactttggattcttcaaaggtccttcgattctatgcaatctgggatgatacagacagcatgtatggtgaatgtcggacctacatcattcattactatcttatggatgatacggtggaaattcgagaggtccacgaacggaatgatgggagagatcctttcccactcctaatgaaccgccagcgtgtgcccaaagttttggtggaaaatgcaagtatgtttgattcagtttattctctgttacttgggatgtttttaggttcttaaaggagttacttaatcagtatgcaaaattcgtttatacttggaagcctctagctatttttgcttagatgctcagaaaatggcttcccacagctttcctcctttacttgcccctcggtccaggcgtgcccccaagacagtctggtacccaggtcaaggaaacaaaaccaaaacaacagtgggagatttatttaaagtgcagcagagcaaggtttctgaactgaaacaatttaatattagatttttaatgcatttttcaaacaggcttgttttcattcaaggatatgaatgaaagcttagcttttctttatatgctttcctgactttgcttctcacttcaactacttcctaaacaggaagtttctatgtggtttaacttgagattggaaaaggcatgtctgtgactcatagaggtgaggtccattgtgtcaaacccagctcattctttactggtttaaaattacctagcatgggctgggcatgatggctcactcctgtaatcccagcactttgggagactgaggcgggtggattgcttgagcccaagagtttgagaccagcctgggcaacgtgatgaaacctcctctctacaaaaaatacaaaaattagccatgcttggtgccgcacacctgtattcccagctacttgggaggctgaggtgggaggatcatctgagcctgggaggtcgaggctgcggtgagctgtgattgtggtgctgcactccagcctgggcaacagtgagatcctatctccagaaaaagaaaaaaagttacctaccatatttgagagtggcagtgcaacaaaatggcagcaaatacctgctgttcactgtttcctgggatgagtaggcttgctttagttattgtcttagtagtttttacatttctcttagaataatgtcatcttggtcacatgtaatgactgatagctcttatgtttgggtggctgacaggattctgtaaatgtgttcactgatttttttttctttttactatattttttgggaattaggatataagaaatttcaggtattggggctgggcacggtggctcacacctgtaatcccagcactttgggaggccaaggcaggtggatcatgaagtcaggagatcgagaccattctagctaacatggtgaaaccccatctctactaaaaatacaaaaaattagctgggcgtggtggcgtgcacctgtagtcccagctactcaggaggctgaggcaggagaattgtttgaacccgggaggtggaggttgtggcgagccaagatcgtgccactgcactccagcctgggtgacagagtgagactccatctcaaaaaaaaaaagaaaaagaaatttcaggtattgagcaagaagtttgtctacattagaggttataaataaatgtgtagtctgaggctaaattcaacgtgtctgtacatattgcttcacttgcacagtgcttttttatgaaaaatgcagtattatttgtgggcaaggagttggaggtttccatcattgagagaatggataagcaaaaatgtagtgaaggtacattttgattaatatacagtagttagaagcagtaaacaagatgtacacagaaagcaagtggatggatcttaaaaacatagtgctgtgtaggaaaaaatacatgaaattagatatataatgctataacacatgcaaaacatagtacacgtaggacacattcagtcacatagctgcattagaatgattgcatgtgaggagaggagaatgagattggggaaaaggataaaagggagtgaaaattgtcatcattttagaattaggaaagtttatgttatatatttttttaaaaaaatgaaaatactgctaattcagcttgtattctcaaatagaaacaactggatctgtgccctagttcaacatagtttggcttctacctactatacatattcttataatcagttctctacagaaccgtcttagagttcaatgacaatgggactaatatagtaattttggcctttcagaatgcttaaacaagcctgaaatccatgcagttcggagctaacaaacattagatttacaatagataaagaaaatggataggaatatattcagggtggcatgaaaagtctcactgaaactaaatccctttaaatgacagattccaggtttgtctctgctttatcaatgtgacctatattgaaaacttaatatataattatcctcttctataatttcccaattaaaaattttttatcaaagttgcatggagaggcagcctggtggcatatatagggttcttttaaaaagtaggaaacaggctggtcgctgtggccgaagcctataatcccgtcactttgggaggccaaggtgggaggatcacctgaagtcaggagttcgagaccagtctggccaacatggtgaaaccccctctctactaaaaaatacaaaaattacctgggcatggtggcaggtgcctgtagtcccagctacttaggaggctgaggcaggagaattgcttgaagccaggagacagaggctgcagtgagcggagattgcgccacttcactccagcctgggcaacagagcaagactccatctcaaaaaaagaaaaaaggtatcagtcatgaggtacagaaaaggctatgttcccatcagctacataattcctttaactagaagggtagtgttaaaagaatgatgtctaattgactctcaaaggcatttatccaatgggtgatttttattaaattcaattaaacaagaggtaaataatctgctatgggaaccatttcacatgctaaatgctatggaggacaaaatgtaactcccattcctagaatcctatctttcagtcatttctagtgtcattaagaagacaaggcatataaaatacacaaagctgttaagtaataacatgagtataccagattatctgattatgtaattagttaagtcatgcagaccgaggtcagaaggacaaaggtgtgggcctgaaaaactaaagaagtctttgtggaagagctgggattagactcagatttagaatggcagagaacaaagagctcactagaaagaagaacaagagcaaaagttgggaattaggaacaagtatggcatgtttgggggcgcccaagagatggtggctaggcagagagtttgtattagacagtaataggaaattatgggagtaactttcagaagtcctctcaaccagggcctccttttaagtagctaagataaatcaaaattatatatttataatggatggagttaaaatatcagaaattcagaaagttatttcttcgtcaagggcaattgcatattaccaataggtggcaggtaatatcaaaacaggacatcttttgacttaacaaaagctttctactcagctcttgaacccaaggaaccaggttctgaaagtctaaatatgttagttatccttcagactggctttcatagtttgatcttgcccttgcctgttagatgaatcttgaacaccccttagacctttagtgttccagaaagttgaatgtatttcctcactttctgtgcatctttgttggctcactcagtcattcgaataatattaatcgaacatccatatagatgaaggaaacaccatgctaggcaatggagatctgaaactactataagccccatatctcaaagactttacaatctgatgagatcaacatacagatcaatgaaatagaacaaattgtccagaaatagatgcacacatatgaggtcatttgatttttgacaaaggtaaaaaagcaatttggtggagaaatgattgtctttttaacaaaaggtgctggaacaattcaatagcctatgcaaaagtaaataaataaataaacttcaacccttacctcaccatacataaaagttaaccccaaatggatcatagacctgggcgacagagtgagaccctgtctcagagcagggggaaaaaaaaagcaaatgtaatgaaaacaaaaattgacaattgggacctaattaaactaaagagcttgtgcattgcaaaagaagctatcaacagaggaaacagcctacagaatgggagaaaatatttgaaacaatgcatttgacaaatgtctaatatccagaatctataaggaacttaaatcaacaagaaaaataacaaataaccccattgaaaagtaggcaaaggacatgaacagacacttctcaaaagaaaacatacaaatggacaacaaacattttaaaaatgcccaacatcactaatcatcagagggatgcaatcataccagtcagaatggctattattaagtcaaaaaataacagatgttggcaagcttgcagagaaaagggaatgcttatcactgttggtgggaatgtgaactagttcagcccctgaggaaaacagtttggagatttctccaaaagtagaactacaccaatcccattattgggtatatacccaaaagaaaataaattgttgtatccaaaagatacttgtattcatgtttattgcagcactgttcacaatagcaaagacatggaatcaacccaggtgcccatcactggtggattggataaagaaaatgtgttaatggtacatatacaccatggaatactatatggccataaaaaataaaatcatattctttgcagcaacgtggatgcaggtagaggccattatactaagtgaattaacacagaaacagagcattgggtatacacatggacacaaagacaggaacaatagacactggggactccaaaaggaagaagtaagggagagggacaagggttgaagaactacctatcaggtactgtgttcactatttgggtgacaggatcaatagctcaaacttcagcatcatgcaatatacctgtgcaaccaacctgtacatgtaccctgagtctaaaatttaaaaataaatacataaataataaaagttttgcttttcaaaagacactgttaggaaagtgaaaggaaaagctaaagattgggaaaaatatttgtaaaacatatttgagaaggtacttgtcataggatatataaagtggctcttaaaacttaggaaaacaacccaaataaaaaataggtaaaggattagaatagatacctcaccaaaagcatgcatgtatgacaagttagcacacaaaaatatatttgccatagttacttattagagaaatgcaaattaaaaccatgtaagatactactgtatacccactagaatgtccaaaattaaaaagactgaccataccaagtgttgacaaggatgtgaagcagctgaaaatttcacacactgctagtggaaggtcagctgaaacaaccacgttgaaaaatagcgtgacaggtttttttgttttgtttgtttgtttgtttgtttgtttttttgagacggagtctcgctttgtcgcccaggctggagtgcagtggcatggtcttggctcactgcaagctccgcctcccaggttcacaccattctcctgcctcagcctcccgagtagctgggactacaggcgcctgccactacgcccggctaattttttgtatttttagtagagatggggtttcaccatgttagccaggatggtctcgatctcctgacctcgtgatccacccgcctcggcctcccaaagtaatctgagattacaggcatgagccaccgtacccggctgacagtttgttttttaaaattgcacatatatctaccatacaaaccagccattcttttcttgggtatttgccaagagaaaggaaaacatatgtccacacagaaacttatgtgaatgtttatggcagctttttttataatagccaaaagttggaaagaatgcaaatgtctattaacagttagtgagtaaacaattattgtatatcagtactttggaatactactaaaaaacaaaacaattattgatgtatgaaacaacatgaatgaatctcaaagtaactatgctaagagaatgaattcagacaaaaatacatgccatataattccattggtgtaaaattaatataaatacaatataaataagcaaaatagatcagtgattgcgtgaggatggtgagaaggagagttagattataaaaggtcatgaggagacttttggatgtgattggatgtttattattttgattgtaatgatggtttcatgggtaaatacatatgtcaagcaacatcaaaattgtatactccaaaaatgtgcagcttattgtagtcaattacacctcagtaaagttgtaaaaatataaattcctatctagatatgtcatagtcaaatgtaagaacactagattcgaaaagatcatgaaagcagctccaaagaaaaaggtaacccataccagatggaagttagaatgacagctgacttctgtagcaacagtgattaccagaagacagtaaaataatatcttcagagtgctgagaaaaaaataagagtttaatgcctagagaaactgtctttcaggaagacagtgaaatacatttccaggcaaacaaaacagattttactaacagcagacctttactgggaaacttctagagtatacttcaagtggaaagaaaatgaatgcagaagtaaagtctaagatacaaaaagtcgtgaataaagaaaatagcaaagtaggataaatctaaataatcattaactatacaaattaaaagaacaatattgaatttgtgagagttaaaaatatcaaagtagaactgacatgtattacagtaatagcataagaaagggtgataggattaaatatataacaagttttgaaaatttttttttaacttttaagttcaggggtacatgtgcaggtttgttttatgagtgagcttgtgtcatgcaggtttgttgtacattttgtctcccaggtattaagcctaacacccatcagttatttttcctgatcttctccctcctcccacccttcaccctccaatagaccccagtgtgtattgttccctcctatgtgtccatgtgctctcatcatttagcttccacttataattgagaaacgtggtacttgattttctgttcctgcattagtttgctaaagataatggccttcagctgcatccatgttcctgcacaggatatgatctcattcttttttatggctgcatagtattccatggtgtatatataccacattttctttattcaatctgtcattgatgggcatttaggttgattctatgtctttgctattatgaatagtgctgcagtgatcatacacttgcgtttctttatgataggatgatttatattcctttggagatatacccagtaatgtgattgctgggtcgaatgggtagttctgtttttaggtctttgaggaatcaccacactgctttccacggtgtttgaactcatttaccctcccatgaacaatatataaaagtgtttttaaaaacatacttaagatataggcaaatatctttaaaaagaaaaataaatagcaaaagaaactgatgaggtataaaacaactgatgaagctatattagtataatacaaaaagacatttgggcaaaaagctttgattgagatgaagaggatcattacctattgcaagaatattttatttactaggaaaatataataattctaaacttgaatgcagtaataacatggattcaaaatataagaaaaatctgtagcaccattattcagtgagactggaaaaatatagcataatagtgggagccattaaaacatttctttcaatagttgttagatcaaaaagacaaatcaataaacaggtataagacttgaataatattattattcatttaatatatatatgcttacccaacacccaattttcaacaaaattaagttagaagtcaattttggaaatataacatgaaaaaaaccgtgtatttggaaattgaaaaacatattttcagataacccatgagttaaaaaaaaatattgtcagaaaatacctagaactgaatggtagcaaaaactcttaaaactctaaaaaaaagaggtacttggaggaaaatatatagctttaaatgcttacttaagaaagaagaaagatgacaataagttaggcatatttcttaaaaagttagaaatctaaagaatttaaaaattaaaatattaagaaattaaaagaaggaaatcataaaataagaggctgaaaataaagaaattgaaaacaaaggtaacagagaagatttgtcaagtcaaaagtcatctccttgaaaggactaataaagtgacaaactatagacaagatttatgaagggataaacaaaagaaggcacatatacaccatattaaaaatgaaagaagtggctgggcatggtggctcacacctgtaatcccagcactttgggaggccaaggcaggcggatcacttgaggtcaggagttcgagaccagcctggctaatgtggtgtgaaactccatttctactaaaaatgcaaaaattagcccagcatggtggcacgcacctgtagtcctagctacttaggaggctgaggcaggagaattgcttgaacctggaaggcagaggttgcagtgagccgagattgtgccagtgcactccaggctgggcaacagggcaagactgtctcaaaaaaaaaaaaaaaagcattctttaaagtgccatagccattaaacataaaataaaataataatacaactttatgccaataaatttaaaaacttaggtaaaatgagtaaagttttttttgttttgtttttgtttgttttgttttgtttgtttttgtctttgagacggagtctctctctgtcgcccaggctggagtgcagtggcctgatctcggctcactgcaagctccgcctcccgggttcacaccattctcccgcctcagcctcccgagtagctgggactacaggtgcccgccaccacacccagctaatttttttttttttttttgtatttttagtagagacagagtttcaccgtgttagccagcgtggttttgatccgcccacctcggcctcccaaagtgctgagattataggcatgagccactgtgcccggccaaaacgagcaaagttttaaaaaagtataacttgtttatgaagaaatagaaaaccaaatatcttcagccattaaagaaatagatttagtttaaacatttcccacaaaaaatccagcagatccagataatcttacagatgatttttgacaaacatttaaagaacaggtaattctaagcttaacacaaacccttttagagagaagaacttcttaattctttcatttaaaaaggccagtgaaaccaaagtcaccatgagaaagaaaaactacagtcattctcacttaagaagatatgtgcaaaaatcctaaacaagatatcagtaaacctgatccagcattatatgaaaaaataatttgttgagcaaacaaaggcagatggctggacagcacacacacatataccagatctcctggaatattgtatactaaaggaagttaatataatcacaagctatgtccctcattgcccatcacttcctggggaagctcaaagggaggtagtagggttgagaatagacatagggagacagatcccttggactatagagctgttattaataagatgcattattagggaaataccaggccctcctttgctatgatcaagggctggagttcaaacttttatgcctgttatagcagaaacttagccttattccagtttttcaatctcagtaattactagttaggagaacatcagcctacttttcatcccccttgtgatcagggttctgtgccaaagctttgtggttacaactataagatgtggcactctactagaactgattgactcttaagatttccttggatgccaggctgcaggtaatcaatcttaaacaagttaatccttagttctcatgaaacagtaagacaagaatggaattattccacaaatgcaagattgattctacatttggaaattatttattcccacatgaatggattattgtcatcatctcattgactgtccctgccccctgtctccaggactagcttacactgtcctcatagcagtgattacaacctgaaatgaaaccatcatttatataattttttagtgtctgtctccccaaagagaatattttctccatgaagtcaggaattgtatctacagtgttaattatcgtaatcccagtatttagcagtgtacctagtacatgatatagatggtcactagtaattgctggatgaatggataaacgggtgggaatttgagctaaatgacttggatctttcctagacctaggactttatacttacagaaggacatttgttctttcctcctgtagtgatttattttaagcattaatttgctaaaattagtgatttatagtgatagtttgagctgaatatgggagagagacttcacaaaaaccgtattatgtacgtgtcgtatcaacagatggaaatacacagccaagtgttctagtgggaatgttggggagaccctgactcttgaccagagcaaaagactgcactccctcaggttctcaagaatgcctggcagttgtgtgtcaagtctttcttgacacactcattccttctttttttctctctaacaccatcttatattagagaacttccctcagtgtgtgctagaaatctctgaccaagaagtgttggaatggtatactgctaaagacttcattgttgggaagtcactcactatccttgggagaactttcttcatttatgattgtgatccatttactcgacggtattacaaagagaagtttggaatcactgatttaccacgtattgatgtgagcaagcgggaaccacctccagtaaaacaggtaatcagatagtacttcttagtgtggtgagaaaactaattttttgaggtagaaatttaagaaaaaaagacttctatgcaaatattcgataaataatggacaaagtatatgtaacacagtagttcacaaaagaagaaatacaaatgacaaaaaaattatgagaagaccctcaatctaactgataatcagtgaaatagaatgaaaataatgatgtttttggatctgttcaattttaaaagattcatgatatccagtgtttgccctatatgaagaaatgggaattttcatatactgtttataggaaagccagtcagagtaaactttctgaaaggcaatttgttgtctattttattttgaaaaaaataaaatagacattttatttttataagtaaataaaatgtatattttctggctgggcacagtggctcatatctgtaatccagcactttgggaggccagggcaggtggatcccttgaagtcaggagttctagaccagcctggccaacgtagtgaaaccttgtctctactaaaaatacaaaaattagccgagtgtagtggtgcgcacctgtaatcccagctcctcgggaggctgaggcatgaggatcactttaacctgtgagatggaggttgcagtgagccgagatcatgccattgcactccagcctgggcaacagaatgagtgaaagtctgtctcaaaaaaatatgtatatattatatatctatataatatatataatatctatctatatatatattataaatcatattgtttataatatatgatattggatatatatgataggacacatcataatatggtttatattatgacatatagatatagatatatctcatatcttttacctggaaatatactttgggaactctaaaaatgtatatggaagaatgtgtattgtagcattatttataaaaaaataaagtgtgaggagattgacaaaataaatgatatccactcatgaaatggatgtatgaaaatacatgcattcatacaattaaaagacagttaaaatacacccattcataaaagactactatgtgtgtaaagtatcactgggccctttctcctcaaaagaaaggcatgaataaaattatggaatgtttgagtacctccagccagggccctgccttcccttccagcggctgctcctcttgcttgcagttggcctccagtcgtactgagttctctggttctaccagtacagcatcttgttttactcccaggaacttttgcttgtgctcttcctccttgaaccacttttctgttattcttacatgcagctcttttttatcctccaatacccagtgtaggcttcttccccaagaagtcttttctaaagctccaggtagggcaaaaagcctttcatctctattcctggggtattctctgcctccctctactagcacttctctattatattaaattatctgctagtgaatattttgtactagattgtaactcccttgaggccaaggactatgtcctattcatctttctctcctagtacctaatacagtgcctaataaataggaggtatataatatgtttcttgaactggactgaagaaaattggctatgaaggtgttctgcaaaaaggaagtgatgtcttaggcaaaacttttagaaacaatgttttatagaaacgattacaaagaaggatttggattttggtatgctgtgagttcccagaggcaatacaatttctggaaggaagtgtgggtgataatacctcttgctgtcagttttttctctgatagatttctttatcaatgatgtgttcattgattaagaacaatgataaaccctctcctggtgtaatgcattgtgaaaagaaaaagaattatgataaactctctgcccccaagtttcttggcagcatttgatgcagtacacaggggaaaataccatgagaacagatttagattttgatcaaggaaactattttaccacttcagttaatagataaggatggttatctaaccaggaggtagagtagtgagagattacaacatagtgatgcccttttcttggtgaaaggactttgacttttttttttttttttttaagacagggtcttgctctgtgtcccaggctggagtgcagtggtgcagtcttggctcactgcaacgtccacctcccaggttcaagcgattcttgtgcctcagcctccccagtagctgggactacaggtcgtgccaccacacccagctaatttttgtatttttagtacagacggggtttcaccatgttggccaggctggtctggaactccctacctcaggtgatccacccaccttggcctcccaaagtgctagtattacaggcatgagccaccgcaccggcctgatctgtcttttgagccaatggaattttttgagtcttagaatacctctgttccccatccttattactatcatcttttttttctcctaacctatcttgaagtaaagaaaagagagggaagccctggataaagagcagaggggaactgaagatctactgtagattttggttggttgttttgctctatcccagcccttttgtataataaaactaattttatataataaaacatctatacatatggcacattaattatagtgtttggtcagtttctttcccgtactttctctataataaatagctctataataaacaaattccacctgtccatgaaatttgttagagataaatagaatgccaattaccaatcagcaaacgctttttagtcattatacctcagtcattttaaccctaaataacataaatggaaaccagggataggaatttgtagcagagtctagaggaataaagctagagccaagccaatgcagggatagaagtagatacgaaatggatatattcaattcgagaggtatggcacttgtaagtcaagcttctctgctagatcaggaataagtaaacataaatgcaatagccagatgtgttttctgtcaggctggctccatctggaggcatgctggtagggaaaagaaagaaaccagaactaggagagctaatctgctatggagacttcccctgaaagcagtatctgaaggttatggtactctggggttctaagggtactactagcttggttgaagatgtccagacagaaactctggtaagtggatcatatgagcaggagtatctaggagtgatgatatccatagtcagatgagtgttcatctagtttacaacgggacccacccaagcagtagcttgaagtatgagaagcaaggtgcaaggataccgtacatatggactgatatttagggaaggtctttattccaggcaggggaagtgagtatattcaggaaaaacaggtaaagtttgttaaaatacaataggaatttgagaagaaggcccagaggctttatagctaccttcttattgcaaaatccttcaaccctcagtgacctccctattggccccccagccaggatgctctcattgtgtggtgttggtacaagtgcaaagcaagttcagataccaccactttgcagtttctgcctagcctccagagaaaactcagatgcttagcatgtaggccgtcagctcagggttcctctgtccatagttacctgtaaattcactgagtagtggttttgcaattgaagcaaattaggtcattttccatctgctaaatccactagtcatattctagccatgattaccacattaactacagtcccagcaagtgattttggggtcagtgttccaagtagtacgccgtagacaaatttaatagtcctttgttgttgaagaaatactctgttatggatggtactagggactatatggacttacttgttaaagtgcctgaaaataatatataaaaagattttgtggaggtatatacaagagaaaatgtgtgctacacaggaccctcactggggtgggactaggtcctgcttttgtagtaaggggtcagtggacatcagcaatagtttctctgtagccctgagagttactttagagcatcatcagttacttctgtgatcagtgaacatgatgcaaaatccacagaggaaggggataagtgatatgttatattttctgactatatttgtttatgtagaaaatatatttgcataagtattttctagagttttttctttaaacttatagttacctttaatgtaatcttaacacaagtagtatctgccttacttcttgcttcctatgtatctccaggagttgcctccttataacggttttggactagtggaagattctgctcagaattgttttgctctcattccaaaagctccaaaaaaagacgttattaaaatgctggtgaatgataacaaggtgcttcgttatttggctgtactggtgaggctaatttttatatactaaagattctcttctatctcagtactgtgtacaattgtttattttatctgtaagctgtagattaacagctgtcagagttatgtgttgactcaaccaaccattgtatctagtacccagccttcagggaggttggatagtattaagtatggtgcccctgaactaagacctagatcaagtcctatctctcccaagaatctttcttaagatcattaatctctcactcttacacctcaaatgttgacagatcttttgcctcttttattaagtaactatgaaattgcttaatattcaaaccatgtgtgtatctgtgtggctttttggtatactgtgatttctttgaggttagggaccatgtcttagtaagttttgcgtttatctgtgatatcttgcctgatatcttgagaggttatgtgactaatagttaagagcatggagttggaaatagacatacactcaaattctgcatatcccattaattagcagaattgtatgagagaagttgctgatagaaattcaaagtgtaaggtctttaaaatggaaaaaaaatgtagaataggaacctaaccattttattagaaatatgaacataaatagcagaagttgaaataagttatatctcagaataggaattaggagctgggggtaggaggtgtcaggtgacttttcaaactatatacatgtatttgaaaagataaaaactaaggtgaagacaactgaataatagattttagaaaacgattgcacaaagctttaaataaaaagagagttctggctaaaaacaaaattttttaagaaaacaacaaaacagcaaaatgtaggccaactagaacactctccataagaattctgaccaataaaggttttgtggtactagattctttcagttactgttaaaattcaagcggcttgttgaattattatatggtaactataactccttaagggcaggaatcatgtccttctagactttgtaggtactcagtaactgttcgttcagtaggcaaaagaatttatttctgcacacattatccatgagtaaggcaatacaatattgtacccattttatgtttcaaaacttaagaaacagaaaggctaattgtcttgtcccaggtccagtgctgcttagacaggggtaggactagaactcagccttctggctttcaacccagtattcttttgatgaagaaccagtataatacttaggattagaaaagggaaaggaactcctatgagtctgtaaactgcaaaattgtaagcttacctttgataatgaaaaacctggaaaaattaatacaaagttgattacaaaaatggctatgaatagtgttagatattgctaaatgaggagaaaagataaatttcttttgattgcagccttctgtactcacaagcaacctggtcaaacatgatatatcactaaaagttaaagcatttacagagaacttctatttctagcaatgatagaccaaataatttggatcagccctcttgctgaggtgtatgtttgtgtgtatgtgtatgtttatgtgtgttagcacttgaaggtgctggacaactagcaagatgtgaagaatcacagagcaagaaccaggggaacaatgagaaccgcagaagtgaacctgacatttgggttcatttttccgctaggcgtgtttgctgattccagaagacccacctgtgaggacaaacattggaatctatttagggcctgtcaaaggcagaagctcctgggaaaccctctgtgcttaagtctgtctgtagctaatctttgaagggactgttgtctggctttgaattatcatagtccctgattgtctcagttttacaaatcagattaaggtgatcctggattataataaccccaggtgactgtcagaagcaaacaaattctctgcagatgacatcattttcagcttcaatttatttctacaattttaaaaatacaatgtgtggcactcacaaaaacaatattaataatacaatgttcagaaacaagacaagataacataaagaaaagtgaccagaaataagagacaatagaatatacttatagggatttcagatactggcactatgaaacttaaacttaagccgggagcagtggctcacacctgtaatcccaacactttgggaggccaaggagggcagatcacttgaggtcaggaatttgagaccagcctggccaacatgctaaaaccctgcatctactaaaaaaatacaaaaattagccaggcatggtggcatgcacctgtaatcccaggtactcaggaggctgagatatgagaatcgcttgaacctgggaggtggaagttgcagtgagccaagattgtgccactgtactccagcctgggcgacagagcaagactccgtctaaaaataaaataaaataaataaataactaaataataaaattaaaaaaaaaatttttaaaaacctttgtttaccatgtttaaggagataaagaataagattgagaatttcagcaaaagatgagaaataagccaaaaaagtctatttcagttttgaaaaatcatcacattaacagaataaaagagaaaaattaaattttgaaaagcatttgctaaaatcaatctaatatgatttaaaaataaaactcgcatatacccctgaacctaaaataaaagtttaaaaaagtaaaaatgaaagaaaacaaaacttttaataaaaaaaaagaataaaagggggtttcctttatctgttaaaggttatgtatgaaaagtctactgcaaacagcttacttagtgatgaaatgtcgaaagggtactttctgagattaggaacaaggcaagactgctatcaccccttctggtccacattgttctggaagtcctagctggaacagtgaaacaggaagcgaataaacaagtatatggattgaagaggaaaaaataaaattgtcattatccaaaatgaacaattgtatatatagaaaataaagaatctaccttctacattagggaagtcaatatacaaatagcaacaaagaaaacataaagttaaaaaataccatttactatagcatcaaaaatattaaattcctaggtataaattaaattccttggtataatattttaggtgttacatacaaaagatatgtaacacctaaaagatgtatctttatcatacaagagatatgtaatatcttttacatacaagagatatgtaatatcttttacatacaagagatatgtaatatcttttacatacaagagatatgtaatatcttttacatacaagagatatgtaacacctaggtgttacatatcttttaggtgttacatacaaaaacactttaggtgttacatatcttttaggtgttacatacaaaagatatgttacataccaaaaatatgtaacacctaaaatattattgagagaaaattaagaagacctaaataaatgaagggatataccatgttcattggctagaaaattcagtattataaaaatattttccccaaattgatctatggtttaaaattaagtcaaaaaatccaaaaatgtttttatttttacagacaaattgattctataatttaagtggagaggcaaagcaccaggaatagccaagatactcttggagaagagcaagatcagtggattttgctcacaaaaatatcactgtgtattaaaagtcacagtaattaaaataacatgttattggtgcaaggataaacaaaccaatggaacagattagacagcccaggaaaagacatatgacaaatacagcactgcagaggggctgggaaaggaagatgtttctaatcagtgatatcaaacaatcagatattcatgtaacaaaaaagaaaatttgacctccatctcactccaaaagtggaaatcaggtctaggtagattgaaaatctaaatgtgaaaggtaaaacaataaaacttcttagcaataaataatcttaacattatagtagggaaagatttatttagtcggatacaaaaaaccagtcatgttttaaaaatggataaatgaccgggcacggtggttcatgcctgtaatcccagcactttgggagaccaaggtgggcagactgccccagctcaggagtttgagaccagtatggccaacatgttgaaaccctgaccctactaaaaatacaaaaaattagctgggcatgttagtgcacgcctgtagtcccagccacttgggaggctgaggcaggagaatcacttgagtctggggggcggaggttgcagtgagccgagactgagccacttcacttcagcctgggtggcagagaaaggctctgtctccttaattaattaattaattaaaatggataaatttgattatattaagataaagaatttctgttcttccaaaaaacaccattaagattgtaaaaaaaggcaagcttcaagtgggagcagatgtttaatacagaaatcaaccaagatcttatattcagaatatataaagaacactctgaaatcattaagaaaaatgagcaagaaacttgaacaggcatttcacaaaagaggatatccaagaggcaactaaacatattagaagggccaggtgcagtgattcacacctgttttcccagcactttgggaggcggaggcaggaagatcacttgaaccctatgtcatagggcaacataatgagaccctatcgctacaaagataaaaaaataagttaattgggcttggtggcatgtgcctatagtcccagttacctgggacactaaggcgggaggatcacttgaacccaggagttcgaagctgtagtgagctatgatcctgccactgcactccaacctgggcaacagagactctgtctttaaaaatatgtacatatgagaagttgcttagcttcgttagtaactaaagaagtgcagattacaatcatagtgagttgcctctacccacccatcagaatcattaatatgttgatgagaatatgtaaccataggaactctcatactctttactaagagagtatacccactttgtaaaacagtttggcataataaatttactagatggtgctaagggtgcaatatatgttcaccaaaaaataagaatgtttataatagcgtaattcataatagcaaaaatagacctaaatgtctacctacaacagactggataagttgtggtatatttgtgtcataatttgatttctgttcaatgaaaattaaggaactacagctactaataacaacatggctaaatcacataaacataattttgaatgtaagaatccagacacaaaagaatgcatacatattatgtaattcatttatatgaagattaaaaagcagacaaaacaaaactttatggatgtctgctttgtagcaaaactaaagaaaaccatacaattcaaggcaatggcctgtttggtgggggaaggatagaatattgattgggaggttctggcagcgttctgtttctcaacctggatggtggttatatgggtgtttactttattaaaattctttcggctgtgcattttgatatttttattgttgttttgggttttttttttttgcagttttctctctgtgttactgctcacagtaaaaaaaattaaaagaaagccaacagaactattagtaaagaaatagtggatatctttatgtgggcaggaaaaaagaggtgatattctggtcatggtaattttcagatgttttcccctgacctattgggtgaaatagagaatgtattcattagactcatcacaaaagttcttgaggaagaaagggtgcttgacaataaggggaaaaggtttatgagtgaggcggggacttcaaaagaaaatatatggaaattcaaaaagaaaggagtatgctatagaaatgatcagagacaaattaattaaatcccatggaggtcagactaagacactggatgtgttctgagaaaataacatgtactaaatcctagtaggcaattggtgcctaagtaaaaatatgctggtaaactctctgggactgagagtggaatgctggctgagaaacttggcaaagctttcgaagaacagaaacatgatttgaaccataatcttcaaagcagctgaatgtcttccaagagatacgcaagacagtaccatgtgtggtgtttgttaagaaaatattacagcctctgtttattttatttactatgagtgcatttattttatagcctctgatatttttatatgtgccttttaatgcacaaactatatttatatagaagaacatatgtttaattattaattcattcaacaaatattaaaggactactctgggctagatatggttctagataccaaaggtacagtggagaacaagatagacaaatatttgctctcatggagcttacattctagttgacattctagtcaaataaatacattgtataaggataggtagtaacatgtgctgtaaaaaataaaatgagacagagaatgatggggaaggggctcatttatatcagcagaatggggaaagcctctctgaggaggtcatagcagagcagaaaccaaacgaatagctgagggagccagccaggggaatacctgagagagcttcatgtaagaccgagacagtgtgcagtgaatggagggcaaaaaggtggaaatgacaggtcgggggccagccagggctctgcaaccagtggtataacaaggccagaggaatgggctgatgggagcagtccaggtaacaagaaagtatagataacaagctgcagagaatttaaaaataaaaccaactaaaagttggtctgtttcttcttattatcatgtgcctgtaattctaaacaacatcagtgatactcatccccaaagggatggctcctccatacagtagaatttcagttaattaatgtaaaagaaaagtgggaagtagtaaaattatcattaggcacacactgctgtaatcatggttgcagataagatccagcaatggctgctaaaattagtgggaaaacctttgaggagaaacaggattcccataatctcaaaacatctcccccaagatgttttgtaattgcaaagggaaatatggtaactttaagggaagaaatccagcagaaaccttaaccaagtgatcaaggtcagtgttatccataataagatatattgacatcataaactccctggtatacactaaagacatggtatcttttctgggttacttttgccaaaaatgcaaaaatgagatgcctgaggaacattcaagaaaataattgatgagtagtcttcaaaagcgtcaaagtcatgaaagagaagggcagattgaggaactatctatcacatattggaggagactaaagagaaataataactaaatgcaatgtgggatcctggatgggatcctgaaacaaaaagagcatttgtgagaaacagggtgaaatttgaataaggaccatagtttatttactaatattgtactattgttattttcctggttcagataattgtactaatggctatataggatgttaacattaggagaaccttggtgaggggagtgataattctctgtaatatttatgcttttctataaatgtaaacctcattcccaataaagacaataatttttttaaagttttatagtactctttcctgccataataaaccattaccattgtcccccccaaccccccggtatgcccctgcttagaagtttgtattttattctaagtgtgctagaaattctttgaaggtttgagagcagaggagtgatatgatttgattttaactatattgtagttgtttaacatttatatttttattacatgggtgtacaatccaaatgatttggagactattagatgaaggaatgatatgagaaaattattttactaagagaaaaatctaatgacttttttaatagatgaggaattattacacaaacaatcccatggtcttaatgagaagatgtgctacagttacaatatgagcggatttcagtcaggaataaacaaatctgtattaagttttgttggaactggaatttcttccttaggggttgtgtgatcactctgcaatttgatttagaaaaagtctcatctgacaaagggctaatatccagcatctacaatgaactcaaacagatttacaagaaaaaaataaacaaccccatcaaaaagtgggcaaaggacatgaacagacacttctcaaaagaagacatttatgcagccaaaaaacacatgaaaaaatgctcatcatcactggccatcagagaaatgcaaatcaaaaccacaaagacataccatctcacaccagttagaatggcagtcattaaaaggtcaggaaacaacaggtgctggagaggatgtggagaaataggaacacttttacactgttggtgggactgtagactagttcaaccattgtggaagtcagtgtggtgattcctcagggatctagaactggaaataccatttgacccagccatcccattactgggtatataccgaaaggactataaatcatgctgctataaagacacatgcacacgtatgtttattgcggcattattcacaatagcaaagacttggaaccaacccaaatgtccaacaatgatagactggattaagaaaatgtggcacatatacaccatggaatactatgcagccataaaattgatgagttcatgtcctttgtagggacatggatgaaattggaaatcatcattctcagtaaactatcgcaagaacaaaaaaccaaacaccgcatattctcactcataggtgggaattgaacaatgagatcacatggacacaggaaggggaatttcacactctggggactgtggtggggtgggaggaggggggagggatagcattgggagatatacctaatgctagatgacgagttagtgggtgcagtgcaccagcatggcacatgtatacatatgtaactaacctgcacaatgtgcacatgtaccctaaaacttaaactataataaaaaaaaagaaaaagtcttgtctacaaggtagtttctcagaatcactttcaattctttgattttatattactcttatcccttctttttgaattttattttttacattatgtatataaattgatttgcttaaaaaacgaaaccttgcataatcatcttagtgttcatgaagttgaacataatgtcagccaacaggtctcaactagcagcctgtggtcagaatgtagcccacatatatgttctagtatactgtgtttgtttgggcttcatggtgctttaaaagagttggaatcagtactttaaaatcagaggtttaaaataataatccacatttttatcttttgaaaaactgaaagatctagcaacattgggcctacattctcacaaggcaacaattgagttgagttggtgcggcctcccttgggaagcttcccttagatgaggcatgttcttcccagagacaccagagtttccccatagatggtttgtttatattgtaaaaacccagactgcttcatttatatcctatacctggcccctataggcatttaagttggcacatctgcatagaccatgaaccttcataatatcctcttttcttcacctttgtaggaatcccccatcccagaagacaaagaccgcagatttgtcttctcttactttctagctaccgacatgatcagtatctttgagcctcctgttcgcaattctggtatcattgggggcaagtaccttggcaggactaaagttgttaaaccatactctacagtggacaaccctgtctactatggccccagtgacttcttcattggtgctgtgattgaaggtaggtctaaacacagtccagaatttcctactggctgcctgaatgagttcttaattggaatttaattcatttaaccctgtaagaggcaattagattgtattgcaactgagataaagctactatccttgtatatatggtataatgtgttaatcgccttcctaatcaattaaactcttaagttgattgcatttgttggctacagatgtcgacaataagttttgtaaatactgagcaaacgactgcatattagtatgtcgtttaaagaaagctcattagtttctgtcataaatgcatacctgtgaatttatcattggagggttaatactattttactcctgattgcgtgagagaacatcaccaagctaagtgtgttgctaccttctctccagtgtttggtcaccggttcatcatccttgatacagacgagtatgttttgaaatacatggagagcaacgctgcccagtattcaccagaagcactcgcgtcaattcagaaccatgtccgaaagcgagaagcgcctgctccagaagcagaaaggtgtgtgtttgattgctagggtttggcacactcaagatattcaggaagtaattcttgagaaaacaaatgagtaatcacattttagattttctgatttctctcaccaggtgggaattattagatataaacagaaggttccctgtgtcaatgtaatagctagtaacttagaactttttcaacttcatttgtttagcaaatacagttgacccttgaacaatgtgggagttaggggtaccagcctccctccacagctgaaaattcatgtataacttttgacaccccaaaacttaactactaatagcctactcttgactgtaagccttactgataacataaacagttgattaacacatattttctgtcatgtgtattgcatcctgtattcttacaatacggtaagctagagaaaattaagaaaataataagaaagagaaaattatttactattcattaagtggtagtggatcatcttaaaggtcttcatccttatcttcgtgttgagtaggctgagaaggatgggttggttttgctgtctcaagggtggcaaagcagaagaaaatccaagtttcagtgggcctgtgcaatgcaaattcttgttgttcaagagtcagctataattattaaatgcctattatgtgtcagagactatcactaggcccttggacttttatcagtaaacaaaatagacaagaagttgctgcccacattgagttgaccttccaagcagcaggagatagacaataacacaaataaattatacagtatattgggtgatgaatgctgtaaaaattggagcaaattaagagtaataagtgtttctggagagtggcagtaggttgtgaaggtaggtcagggtaggtggttgtaccttgaggtgacaatgaacaaacacttgaggggagttagctgggtggatttctggaggaagtgcttttcaggaagaggaaatagcgcatgcaaaggccctaaatactagcaatattttacttaaagtactcaaggaacattgggaagaagtaggccagtgggggtggctgaaattgagtgagtgagaggaagaggagtaggagatggaattagaaaattaacaatgggctagattgtgtaggacttactaggtctttggaaaggtgctggcttttttctctgaatgaaatgagccattgggagcaggggcatctgaatagaggagtagcaagatttgacatatattttaaaagaactatcctggctgttttgttgaaagtagattaggagagagattagttaagagactattgcagtattccaggcaagagacggtgatgtttgggcccaggatggtggtatcagtggaggtggggagaagtggtctgatttggatgtattttgaaggtagcaccaattggacttcagatagattttctaggggatgtgaggggaaaagaataattaaggatgactccaagatgtttggcctgaggaacaggaaggaagaaattgtgatcacctgagatggggaagatgcgggatgtgggtagagcagttgccttctttgttggttggggtggggatttcagttctggatatatcgtatattaggtttaagacagccaagtagagagcatatagtctgttggatatgtaaatctggagtttgagtgagaggtctgggctggcgatgtaaatgtgggtgttgttggcatatagtgatattttaggctgtgagactgcatgatctctctctctctctctctctctctctctctctctcgacaggatctcgctctgtacccaggctggcatgcagtgccaatagtggaataatagctcactgcagcctcaaactcctgagatcctccttgagttcagcttcccaagtagctggaactacaggtgtacaccactattcctagctaatttttaaattttcagtagagacaggggtctcagtttgttgcccagaactcctgggctcaagtgattctgcctccttggcctcccaaagtgctaggattacaggcgtgagccattgctcctggcctgggtgaaatctctaaaggagttaatgtagctaaagaaaagaatggctctaagaactaagctctggggtccaccaacgcttacagttaaggagactgaaaaggaaaacgaataaagcaggaagaaaatgtggtatcctggatgtcaaatgaaggggtagcataggactgtaaaaaataacatgcaaaacaattttaataatcaaagggaaaatgtacaattgttctgtgccctttaaaaatttttgtcactgccaggcgcggtggctcatgcctgtaatcccagcactttgggaggccgaggtgggcggatcatgaggtcaggagttcaagaccagcctgaccaacatggtgaacccccgtctctgctaaaaatacaaaaaaattagctaggcatggtggtgcagacctataatcccagctactcaggaggctgaggcaggagaatcacttgaacccaggaggcggaggtcgcagtgagccaagattgcgccactgcactccagcctgggcgacagagcaagtctccgtctcaaaaaaaaaaaaaatttgtcacagcattaaaaatgttatggttgtaaatgtataaggacatgaaaaaatagtaaaactaatttttacttagcacattgtaatttaaaacactgataacattaataattaaagtgttttatttctttataaaaactttatcaaaagtggtttgagcagcacttgcctacttctcattgtataacttatgatgcagactgaacgtctgttctgtgccttggtgaattgtcatattcctgtttaagattggatcaacttccaacattttatgatttttgctttcaatgttataaaatatgtcttagacttcctttaatgagaatgaaatatctctgagagttcttttaatgtgaagcattttataggcatctgggatatcttcattctttttattacaaacacttttctcatttatgttgataggtttgccttcaccagtttccactggctgcacatccagattctcttgaaaggcagctgtgtcgacattcctacagtcagctttctcttctataactctatttatatttgacttgaattcacttcttgcatctttgctgtactttcatccttattggccaattctctcttttgattttccatttttgtaaaataaagtttgtgtatcactgagagacaaggaggcaagatagctacacactttactgtctgcgtgaactataaaacaaatatacagtgactagtcaccaacagactttgaaagaagtgatgtaattgtcactgattgtgatatgcatctgtttaattacattgtggttagtggactaaagtcctgacagataagtttgtactttatgcaattactcatagttattaactgtgttaactgaaatttgaaccatgttgttgggggaatgggttattttactaaatggtggtaatcgaaattcatgcatcttgtaactgtgcaaactgagaaatgccatcatatcaaggaagacagacttgatggaggacaggtgagcttcaaaattagggctcagccagagagagttattggcttttcccaagaaagaattccagggagagctggtgctgttaaacagcaactgtttttaagcaacagtgtacagcagcagctgaggttctgctccttgtagagtagggataccccataggcattgtgcccagaattgtagctcaaaggcagttctgcactcatattatgcagaaatttccaggaaaagggtggtaacttccaggtgttcgcgtcgttgctgtggaaaggggtggttacttccggatgttgtcatggcaatggtaaactgatatggcgcactggtgggcatgtcttatggaaagctgcctctgccccagacctattttagctagtcctcaatttggccctgtgtctgagccgagcctccagagtcgagccccacttcctacctcagaatgattcattatgtcagatggggatttagcaatattaagggaattggggaccttggagaccttaatgaggagtttcagtggaatgggaagagggggagaacctgatggcagtagatttaagagagaatgggagagaggaattctggatcagagcggagactactcttttggggaggtttggtgcaagggacaacagaaaaatggggcagcagctggcagagaaagtgaagtcaggagaagtttttgttttattttgtttttgcttttgtttttacatagaataaatagcatgtttgtatgctaatgggaatgattccatagagaggaaaacattgataagtgtgtgagagagcggggacaatttctggagtttgtgagaggatggggtttagtatgagtggaggaattggcttcagatagaagcaccaactattcacctagggcagtatttctcaaacttccgggtcttgagacacctttatacccttaaaaattattgagggccccaaagagtttttatgtgtttatatctattgctatttagcatattagaaattgtatctgaaaaattttcaaatattaatttattttgaaaacgataaacccatttcatgtcaacacaacataattttgtgaaaaatcagtttttacaaacaaaaaaaatttagtgagaagagtgatattgctttacatttttgcaaacctcttaatgtctgacttacttagtagtagaagatgactggattttcatgtgcttttgtattctgcctgcggtgatagcctgtgttgtgtgacctttggaaaactccattgtgcacttatgggaaaacaagagtaaaaagacaaataatgactaagtattatcacaagaataattttgacttcacagacccctgaagggtcttgggaacctccaagagtcctgggattactctttaaaaccttgatctagggcaacaggcaaaaggcagcatatgtgggttcagattctggtaggtgggtagatattgggaggccttgtgattgtttcgtgatagtagtgcagtagaaacagtgaggatagagggagatgttggaggtttcaagagagaggagaagttatgaaatgctctattttattgaatatataaatatcaataaaatgaatatgaaataaaatctaaaacagcatattttagctactactaagaaagaaaaaattgccaaatataatccatatcattaattgaaaatgcatgttaattccacagatgttaaaatgtaaaaaaaaaaattgtctcatttcatggacacatctttaaaaaaaaatgcctcaggacttaaacaaatatgatagctctccaggaaagtgggaggttgaacggactagagaagcgtagtttggtggttggacagcattaaaggcccacttcatattcatagtcatatatttaattcaagtacttcccgaaagtttttttctgtaattgtcacttgtttatgcaaataccagcagacactggaaagcttcttgcttcagcataccactaattaaatcatctttaaaatttttttaaatttagtaatttaagttttttaaaatgtagtaatgaggaaaagataccactgtgactcttagaatatgatatcaataaaaataaggagaaattcaaattttaggttgccatatggatatggtttgtttggccccagcaagctatggttttagatatggtttgtttggccccatgaagccttatgttgaaatctgatccccattgttggagatgggcctcatggaaggtgtctggatcctgagggcagatccatcataaatagcttggtgccattctcataggaatgagttctcacttgtagttcccatgagaactgttgttgaaaagagcctggcaccacctactctctctctcttgcctcttctcttatcatgtgatctctgcacatgtctgctccccttccccttccaccatgaagggaagcagcctgacattttcactagaagcaaatgttggtaccatgttccttatacagtctgcagaactctgagccaaataagcctgcttttcttttttaaataaattaccagcctcagttatttcatagcaacacaaatggactacgacatggggtaagagatccattgccatcctcattttgatcctcacccccgcccttcttctcttgtgatgggtcagagagatgagttaggaaaaacacatggagacgatacaaatccactgtcgcatcttctgtgcctcttagctattctgcgtttagctcccgactcacccatctgataaagaatcgcgatctaaggaaatgcagttacaaatatattttgccactcattgcagagtcatgaaaggggatcatgagtacttgtcagaccagtactttttatgtcaattgtcagttctaagatgatgaaatttggagttggccatttgctttctctgagccagaaaattagaataatgcataggtaactgagtattaacttcatcttcaagttcttaaattctctttgggtttggggtcctccactgcagtattttgaactcaagacttaaggccagcaaatgcacacacttattaacctaccttccacaggaaatccacatgtgtgaatagcatagatacatacacacatttgttcatatgtattattcttgttccattaacatgcctatttgtgcactttagcttcaagaggaccctactcacttactcaattatctttttaatccttttctttttcacttctagctacttttcccatgagaattttccaaatattctcattttcttttccattttctttaaggagatagaagtaattggtttcaaatatgagatcaaatgatccaatgtgggcttcatcagttttctcacccttcatcttagaatgtttctctactatcactcttcttctctttaccttcttttgtcagagataagtaactcctcctatttcttcaaatctaattcttctattttgtgtctgtaaccactttcctcctgactgctccagaatctttttgactttttttaatgactgcttcataaattgctttcttgaaggtcattggttgtttccaagtataatggactcttctcatttagtcattaattcaacagatatttgagcttataccatataccaaactttatattaaatgcttaggcaattatatgagagaatagggagctcataatctagagcaagggttggcaatttttttttttttaagtgaagggacaggtagtaagtagtttaggctttgtgggtcataccttctttggcatgactactcaactctacccttacagcgtgaaagcagccgtaaacaatacataaatgaataggagtggctatatttcaataaaattttatgtataaaaaataggcagcaggttggctttggcctgggtgtcatagtttgctgaccccttggtatagtctttagtttttctgatctacatataatattgattactctttattacccctcttttgaaatcctctcttgagttctggaaattcaaagtttctggtagtcctacctctcttaaagcctattgtgtgtgtctttcctacttccgtctactaggttggcatttctcaaggtcctgtttttggtccttttgcttgccttctctaaactttctagacattgcagtatctgaattgctctccattctgctgaatctattttcaacatgtctttgtccatctgagccaccagcatctcccactttgtacaactaaaaatgaagccattgtcattttcatctttctagcacacctgctcttccttattccttctttttgcttatctgtctcattttctaagtggaggactttgccaggatgctcatagcaaaatattctaagagcacacagaaaactgtgacatccctcttacctctggaagattagccactctataaaacacgttcacttttatggaagttatggaaggtcattggagggcttggcacagagttcaactagcatgttaggacctccggccacctctcagttggcagtccctgttggacataaccagctggcccctctgttttcttgttgagccatgtgagcaaaccttgccctgtaacttgcagctcttttccagagtgtgccctgacttgggctttggcaataaagtaggggctgtaactttaactagctcttccttaaacagtaccacctattgccatctatctgtgaatttactccatcttgctcaaaggcagcagatgccatgggtatttttcctgctgtataaaggggaatgggaatctggcttctttgggaaagggagagttattgtctctttccccaaatgattggatgatcacattttaactttatatgtttcatggctctagttcttggaaacacatgcaagattgaggtttgactgctttctgccactaaaatagctccctggtggtcattcataatttagtatatatgatttgaattacattcatcagataaacacattctgcttctataattaataatgccagagagcatttagatattggggattattacaacaatttttattgttcttggcttactacaaaagtaacacatgaccagaatttgaaaatttagggaataaaaatctaggtaatagaaatggaaataaacaaaaatttttgaaaatcttataactcagagataactgcttctaatattttgtttttaaagatgcatataaagtggaaaattctgtaatactattttgcttttttcacttgatagtctatcatgaacccttgtgaaatgaaatatttgaagacacagatatgaagggaccaaggaaaagctttgttcctaccccatctttcatgtacccacttcttaccctccactccccataggtaactacctctttcatttatttttttgaatatcttttcagagtttctttaaataatataagcaactttaagtatatactcttattcccccacaacttttataacacaaggtaacactctatacatacttttatgtcttgagtttctcactaaaaatatctttatactctttctgcagcattgtcaatggctgcagtattattctgttgctttattgtagtgtaaattatttaattccctatttttggacatttagactatctcaaaacaatcttatagatgtatctttgcatacaacccatgattatttccttaggataaattatttgagattatttgctggacttttgcttcatgtttccaaatttttcctgaaaggttattccactttataccttccccagcaagacttgccagcaggtaaaagagggaaataagttaaacagaggctatttgcaacagtgaactttaaaaatattatacgcaagaaaagtaaatacagaaaagcaatggtagattgatagttttcaagttacggaaggagaggaattcagtgagaggtgactgggcataattgagagaatatgttggaactggagtgggatgtgagtgctagttttgccgctgacatgggatctgggatcagtcactcgggtcttcaaatgtgttttctcatcactgaaagagggaagaatgcttactgactttatgtggcccattttgttctaaaaggatttatgaagatgaaatatgagggaatctttcagctctaaaatttttaattttataactgtaccttcatgttcagaggaaataaaaattgagcctctacttattgtggttgttttttgaagggttagacctctctcttcccaacaccctgtgttactattctctcttaatttcagtaaatgctaagcccaaacttctcactctacctcacagagcaatctcttagcttccatagataacctttcacaaaattcagtgtgaattggagagggaataatattaaaactataaaaggttgattcttggctacagatctatagctatatatttatatctatcatctctctttatatatatcactcaggcatttagttgtagatgaggaaacattaatctgcaacagtagtaagagacaatgatgtgattctcacagataccaaatttggcatggtggtggtattagatttgcctccttgtgatgcagtgattaacagatggcaggaaaggaggctgagcaagaagggaggaaattcaaaaactgcccccagtcgggccttcctgatgtggaggtcagctatcggcctgtgggcaagtgttcagttattggtcagctcagtctcaaagctgtgattagaagcttccctgatttcatcaagtaagaactttggtcaccgagatgagactgatcaagaataaataccatgtgcagtcatttccttcctttctctacagcaagcaaactgaaaaggatccaggcgtgcaggaattggaagcattaatagacacaattcagaagcaactgaaagatcactcatgcaaagacaacattcgtgaggcatttcaaatttatgacaaggaagcttcaggatatgtggacagagacatgttctttaaaatctgtgaatcgcttaacgtcccagtggatgactccttggttaaggaggtcagtatgaattactcttctgagttcattgcagaggctaggcactgatcattcttttctaaaggcaattgtgtgtgtatttcactacaactgggccagatttaggatgttcagatcagatctactattctgtcctgattaggtattgcccgttgattctagcattggtattcttttctaattgctgttgcagggcatctctttaagtgggcctggggctggacaacacagagtggttagtagaccaacatgtcaggactgaagaagggcaacagagacgatccaggaggggtggctaccaaggggagactcaaagataagttgatagagcagactggttggcagcctttgatacccttcacagctgatacctacactggcccatcagtagggttagcatgaaagaaggcatgaccactgcaggagggctgtggcatctgtcagtagtggtagcatggccagcagctgatggaggaagggcatggaagttttcttccttgaattttcataagtgagttgaagggggactttcatgccttttcttcattataaaccctttagccagggttcccttggaagtcagaacaaagtccccctgagaaatgccaaggactgtggcttatgatcattgagacattcttactgattaaaaatattgagattctgaggcctttttaaagatcttttagccaaaacaggtgttcagaatttaagagtcatttaggaaagggtttggtttagggctagtgactaggttggagatgaggatttttcatagacagaaacattagcagggagtgagtaggagggcagatagaagagtatttgttcatgtggaccaaacacacatttagctccccaaattttaggttgacagcatgcccaacttttgattttcaaattcttcatactgtctgatgtgggaactgacatgggagagagggatggcagtcattggcaagtggagcagggaagtgggggtgggacagatttgcacatcttataaaaataaccacagaaaatcagtctgttaccagtcacagtcgagttttaagggacacaggttgagcagtggcataaccagacccttccgttaggctgtggtagcaagagcctgctatttaaaaagtcttactcctcatgagctgagtggacagtcttttatttgaatataaaaacaactaaaagtgcttttataaatatggatgttagttctgaaatcttgggaaatgtggcagactgccacggttacttgagacatctctacgacaattactactgttactacttgagaccgtcattacgagagttaacgaaggaagatgaaagcagaaatgaaaacttaaaacaaaagtaactattttaaaggaagggaaagaagagagctccctgcttctagtgagcaaaggcaaccgcccgagctgctacagcccttcatatttattgggtagaaagagcagggattaattgatcacaggttcacattattgctaacaggcttcagatgtgtctaatcacaagaaacacttgtgcctgggtcgtgactgccttcagcgttccttctgggcagcagacgcagtttgtcagtttgccaacatcctgctttcatgagaaacagtttactgtttactcatagagcctccagtggtatactgagttgatcatgacgctcattctttcggccttcaacagggaaggtcatttactccatccagctttggtttcattaagtgtaagatggggataatgtctgtcctacctgccaggttcacaggatcatttcagaatcaacttgaggatacaaaaattctgaactgatttacaaaggctcgggatcattatgcataagcgcactctgcagttgagctgacggaagccctgcagatctgtctcacctattctctttgctctctctgcagttaatcaggatgtgctctcatggagaaggcaaaattaactactataactttgttcgtgctttctcaaactgacctgctgatgagaaaatgcaagacaatttttgatactggaactatgctttgaaatacaccttacactcttcatagaggcatttacagggttcctgaagttttatttctgttttggttcttctttcactcctactgaagtcgaaactaaattggatctaataggatctaagattggtgccttatttagggtgataggggtatagcaatgtctaattttgtgtgtcaaattgacttggccacagggggcccaaatatttcctttctttctttttaaaaaaataaatttttttagagatgggatctcactctgtcatacaggctggagtgtggtggcactatcctagttctatgaagcctcagactcctgggctcaagtgatcctcccacttcaacctccccagtagctgggacaacaggctcaagccaccatgcccagctaatttttaaaattattttgtagagacaaggtcttgctaggttgcctgaacttgtctcaaactcatgagctccagaaattctcccacctcagcctccaaaagtgctgggattataggcatgagccactgtgcccagcctcagatatttcattattctgggggtttctctgaaggtatttttcgatgagataaacatttgaatcagaagactaagtaaaacagatagtcctccctaatgtgggtgggcctcctccaatcatttgaagacatgagtagaataaaaaggctgacctttccccaggtaagagaattcctcctgcctgactggcttcaaattggaacatcagccttttcttgccttcagacacaaatggaaacatcagctgttggtctggagcctgctgaccttcagactggacctaaaccatcagctctcctaagtcataggcctttggattcagactggaattatacctttagctctcctgggtctccagcttgccaatttaccctgcagatcttgggacttgtaagccttcataattgtgtgagcaatttcttataactctctctttctctctctctacatatatatatatatatatattttatatgtacacattcatacacacacacgcttatatgtatacatatagtatgtatatgtgtatatatattatgtatatacatatatgtgcacacatctctactaaaaatagaaaaattagccaggtgtggtggcgtgtgcctgtagtcccagccactcgggaggcttaaatgggagaatcacttgaaccctggaggcagaggttgcagtgagccaagaccacgccactgcactccatccagcctgggtgacagagcaagactccatctcaaaaaaaaaaaggttagaaaaatgctgcttttagagagcctggccttgagagaggaaggaaagactagttgcagttactattctctggtgagctctgactggctttttacaaacagggcttctctttggttgaagtcagccactaagttcatctttaaacatgctatctcaaattccccgaagccacccaaaatgtggtatgaatgaggatagagttacacagaattcagactgctttgccctctcagaacttctagggaacttcccttggtgtttccttccctaacgagctcagccacttgtaaccagcttattgaaagggctgtgaatgtattatgttgattccttttctgttccaggttattatcttgggaataacccatgttttgttttgttttaccctcagtcgctcataactatttaaaacagtatctctttcaagtacagatgctcctctacttatggggctatgtctcaataaactcacgtaagtaaaaaatatcacaagttgaaaacacatttaataaccctgataagcccattgtaaagtaggcaaataagttggaccattgaaagttggggactatctgtattttagaagttttttcagcttaaaaattaccaagctctatcctacttggcccagctcagtccttcccccaggcttagaagcctgtggtaaagagtgtgtgtatactggggtgatgatagtggtttcttcttactcccttctttctgtcttctgctccctttgttcctattcagccatgctgctgtttctagcccatgtaggctctgggaaaggttaagcgggtagaaaccagagaaaaagggcaaagtcttatttctgtggctagtaatgtcgtaatgtggggccaggtctgagtgacatgtgccgaaaggctgactctttctcccagagcaccttttctctctttttggattcagggggtacatgtgcaggtttgttacatgagtatattgcacccaggtagtgagcatagtgcccagtaagtagtttttccacacataccccctccttcccttcccactctggtagtccccagtgtctattgttcccatcattatgtctatgtgtattcaatgtttagctcccacttagaagtaagaacatgcaatatttggtttcctattcctgcatcaattcactttaggataatggcctccagctgcatccatgttgctgcagaatacatgatttcattttttatggctgcgtagtattccatggtgtagatatacttcatttaaaaaatctaatccaccattgattggcacctaggttgattccatgtcctttgctcagagccccgttttggtgagttcttagaactctttccaaccggaaactgcccagtgcaccactctcagatggacgggacccagtctgtacctgatcaccccggctctaatggtatggtctccaaggctccttctgatcttcccaggaggccctttcaggctgacacaccttccagggtgtgcactctcgccatgttctcacccagatggctctcttggctgtgtaattaggcagctcaatccctttcctttagactgtttcaggggagaaccaggtaccccaaatcttatgctctccaaactccaggggacagacacatgtcaaaccctgagtcttttaaagtataccctcacttagcttgcagacccaaggcactccagcccctttcaagaagcttgcactttctgatattttctccatcactcttgcctcctgtggtagaggagctttgggctactccttaacaaatcattcatggatcggcagcaaatctgcaacatatggatatatttgccaatttttgtcctcagctttgggtctcagccaaaatggagatttaggaaagtctcatttagcatcctctagcctgcttttggctgttttgttttgtttttgtgtttgttttttagagacagggtcttactctgttgccagactggaatgcggtggtgtgaccatagctcactgcagcctcaaactcctgggctcatgcaatcctcctgcctcagccttctgagtagctaggcctgtagtctcagagggaactgtcttcaataaagttggcactgtccacatacactccttaa

SEQ ID NO: 86 - DNA, 4561 bp, Homo sapiens
agtcctgcgatttcgggtgtagagggagcaggggcctgcggggacctggtgtgggtggagtggggacaagcggtggagaagggtacgccagggtcgctgagagactctgttctccctggagggactggttgccatgagagcagccgtctgaggggacgcagcctgcactacgcgccccaagaggctgtgcgtggcgagcaggtcacgtgacgggagcgcgggctttggaaggcggctgaacgtcaggccacccgccgctaagctgagaagggagagcgagcttaggaccgcctgcccggggcaaccccgaaccaagctttagccgccgaggccgcgtgtcccaaaggccaggtgagaccccatgggaagcgcctccgggagcgacggggtccgcttggcgctgggggccgtggggagccggggtctggagtgcgcgggattcgcagtcaagaggtcccgccacttttccccctgtgagccttgggccagtcgcgtaagctccgagcctctctttcctccattgtagaaaagcggtaataagttccaccttatggggtcgtgttgtatttttcctaagaccttggacgagaaacatttctgacacttgagttgtttaggcccctttcctgcctacctgtctgtgggacgccgtgaggggatcaagggctacatggtctggtcctcagtccacactccagcagcgcggccggcttgaggcaagagccgaagggttgaacaggcctggagaggggacattagaggtttctgtctgttgtctcagttaaccctggcagcagccctgagagacaggcatggtaatcgttcttcttctgtagacgagaaaataaacctcagtggcttggtaatgtcacacggatggtaaatgccgcgcctagattcaaggccagagcttttgccgctgcagttcacaggggaattattcatattaatcaaatgaataattcattgtcaattaattattaattgattaataatccagggatggacctggaaggacgcgtgagaggatggcgagaggagggcacagctaaggaaaagtgggaaaaggcgggccttattccagctttctgttgagatcccagaatgtagggttaggttgggaaccagaacatgaaagatcgtgatgccatgctgaagtgtttggactgaattagaaggaagaattgaacagtcattgatgctctagaaagaaccctgtgaagaaagagtgggaacaatgaaaaggcctgatggagtctttcgtttcttctttctcttttcttttgtcttcttttcttttcttgacagggtcttgctctgttgcccaggctggagtgtggtggcacaatcatagctcactgtagcctggaactcctgggctcatgtgatcctcccaccacggcctcccaaagtgctgggattactgcccagagcctctgtgcctggccccagtagaatatttcttggagtattggacacataccaacagtgggcacaagatgagttttttatttttttgagacggagtctcactctcttgctaggctggagtgcagcggcacaatctcggctcactgcattctctgcctcctgggttcaagcgattctcctgcctcagcctcccgagtagctgggattacaggtgcacaccaccacacccagctaattttttttttttttgtatttttagtagagacagggtttcaccgtgttggccaggatggcaagatgattttaaattgcaccccctaaaaatcctttttaatagttatacatttaatacatattaaaatataactaatagaacacaaatattattgcttatgagttttccagtttagttttttaaaaaaaattctaagtgaatgaaagtacgggttttagttggaagtagcaaaaatcgtgagggtgatttgggaaacactgctatctgggaaacactgaactctgaagtgcaatactcttttgagcccagtgactacagcatgccagacccctaaatcaggacctggggaggagccatggagttaacatttcagactgagtggtggcgagaaaacgcaaagggaaagacttgaaactctagcaacattataataaaagtagaaactcttatgtgctgaggcgatgatgaagagagtttagagaagcttgtgagaaagccacatcacctccattcagatatgtttgcaatcctttttcaaggctgccttattagtcagggttctccagagactcaaaacaaatcagatctgtttgtttagctggtgtatttgcctgtctttcaggtctgccattatggtccctggactcctcaagccaggccaagcatcctggccttctgtggtccttgatggagacctatgttgcaggttttttttgtgtaataaataatgctgctaccttagaatatcaacagtatcttatttctctaagcacgtggttcaatttctggtactcgttgagccttactattgagtaaattctcctgctagactgagttttttgagaatggggaccttgttcatctttttatctttagcagtgctgacatggtgtcctttttgttgtgtggaatttagttgaaggcatgaagttggtgagataacaccagttataacctttctcctttcctccgtctctgacttgcctttcttttttagtcatccctcctctgtgttgccatgggaattcaaggcctggccaaactaattgctgatgtggcccccagtgccatccgggagaatgacatcaagagctactttggccgtaaggtggccattgatgcctctatgagcatttatcagttcctgattgctgttcgccagggtggggatgtgctgcagaatgaggagggtgagaccaccagccacctgatgggcatgttctaccgcaccattcgcatgatggagaacggcatcaagcccgtgtatgtctttgatggcaagccgccacagctcaagtcaggcgagctggccaaacgcagtgagcggcgggctgaggcagagaagcagctgcagcaggctcaggctgctggggccgagcaggaggtggaaaaattcactaagcggctggtgaaggtcactaagcagcacaatgatgagtgcaaacatctgctgagcctcatgggcatcccttatcttgatgcacccagtgaggcagaggccagctgtgctgccctggtgaaggctggcaaagtctatgctgcggctaccgaggacatggactgcctcaccttcggcagccctgtgctaatgcgacacctgactgccagtgaagccaaaaagctgccaatccaggaattccacctgagccggattctgcaggagctgggcctgaaccaggaacagtttgtggatctgtgcatcctgctaggcagtgactactgtgagagtatccggggtattgggcccaagcgggctgtggacctcatccagaagcacaagagcatcgaggagatcgtgcggcgacttgaccccaacaagtaccctgtgccagaaaattggctccacaaggaggctcaccagctcttcttggaacctgaggtgctggacccagagtctgtggagctgaagtggagcgagccaaatgaagaagagctgatcaagttcatgtgtggtgaaaagcagttctctgaggagcgaatccgcagtggggtcaagaggctgagtaagagccgccaaggcagcacccagggccgcctggatgatttcttcaaggtgaccggctcactctcttcagctaagcgcaaggagccagaacccaagggatccactaagaagaaggcaaagactggggcagcagggaagtttaaaaggggaaaataaatgtgtttccccattatacctccttcaccccagaatatttgccgtcttgtacccttaagagctacagctagagaaaccttcacggggtggagagaggattctaaggcttttctagcgtgacccttttcagtagtgctagtcccttttttacttgatcttaatggcaagaaggccacagaggtacttttccttttttagctcaggaaaatatgtcaggctcaaaccacttctcaggcagtttaatggacactaagtccattgttacatgaaagtgatagatagcaacaagttttggagaagagagagggagataaaagggggagacaaaagatgtacagaaatgatttcctggctggccaactggtggccagtgggaggtgatggtggacctagactgtgcttttctgtcttgttcagccttgacccaccttgagagagagccaccaggaaggcgcatcttagcagatgggaggaactgctgagagaagatgggcagaaagctggagcccctggagttggctgtgtctgtgtttgtgactgattactggctgtgtcttgggtgggcagaaactcgaacttgctatgtaatttgtgtctagttattcagaggagtaagatggtgatgttcacctggcaatcagctgagttgagactttggaataagacactggttttcatgcgctgtttttgttttaaagttatgaagaaaaaagtcaataaaattctaaaagtaa

SEQ ID NO: 87 - DNA, 6598 bp, Homo sapiens
gcagcgagtggccttcccggttggcgcgcgcccggggcggcggcgctggaggagctcgagacggagcctaagttatgtctgggaggcgaacgcggtccggaggagccgctcagcgctccggtgagcggagggcgcgcgggagacgtgaggtcgagccgtttgggggacgcagtccggtgaaagatggcctcttccctcccgctgccgccgccggaggaggcgcccttaaaagggcttgtttgggaatcttctcgctgtctctagaacctgttctctggactctaaggtctagagtcctcctctaccacttaacttttttctctttccagggccaagggccccatctcctactaagcctctgcggaggtcccagcggaaatcaggctctgaactcccgagcatcctccctgaaatctggccgaaggtgagccccagatttctcacttcctccccttgtggcccctcacctaatgttgagctcacgttcatccctcttctccagacacccagtgcggctgcagtcagaaagcccatcgtcttaaagaggatcgtggcccatgctgtagaggtaaaggctaaggagagtgttgtgggtggttaggcgggcaaaactggggaccagctatgtgatcaattggtattgtcccccgcaggtcccagctgtccaatcacctcgcaggagccctagggtgagttcactttcatctacttaattaagtagaatctgggtcactctagagctggacagcacacattggctcctcacatctgcccagggagctgttttgcagtactgcaaaaacagtttgcctgtgggcacctgcatgcattgccagtcttgattactccctgaagacttaatacacttaactttttatgccttgtgtatttctaccattttcctggaacttcctttaaaagctgagctatgtcttaactccacgtactgcctttctaatccattatgccttcagctttcatgtatgggtgttctgagataagtcatgtgtatgacatttttacagttttagcagaagttattatcaaaggatgtttcattaatagacaatctgaagacatactgactgagaaatgtgaactcctttgaagagctgatagggcttagagtcaactggggagaaagaccaatgacaagtgatagcaacgttgtgtactgggactgcaataaggaatactagatgctatgatggtagctaacccagaccatgtggctcagggaatgtttcgtggaagaagaaacatttgaactgagtctttaaagacaagtagaggccgggtgcagtggctcacgcttgtgatcctagcattttgggaggctgaggcgggcagatcacttgtggtcaagagtttaagaccagcctggccaacgtggtgaaaccctgtgtctactaaaaatacaaaattagccaggcatggtggcacgtgcctatagtcccagctactcaggaggctgaggcaggagaatcgcttaaacccaggaggcggaggttgcagtgggccgagatcacgcccctgcactccagcctgggtgacaaagcgagactccatctcaaaaaaaaaaaaaaaaaaaaagacaagtaggtttgttccaggtcaaagaagccatgtttgcagagattgggaatttaaagaaaaatcaaggttcggggaatagcaatttgtttagtgtctgcagcagacctcagcaggggaggaagcaccctaaggcagagcagatcctgatgaggcacaaaagccacactcatggcttgggcatcattcttgggtctgtgggcagcctttggagagttctgggtaaggtagtgaccgagtcaagtttgagtgttttaagaaagacccctctgggggctgtggggagaatggttttgagaagggctaccctggggctccaagaccagtggaatgacgtgaagtccaggaattctgaagcatgaagccaagggcgtgagctaaagccaggatgatatacagtactgggttcagagggaattgccccccagtggccttccctgaccacccttaccctattgctgtcacatttctctatgtaattctcttaggccttaccagttctaaagatagggtcttgttctgccacccaggctggagtgcagtggcgagatttcggctcactgcagatcttccctcctcagcctctcaagtagctgggactatagtcacatgccaccatgcctggctaattttttgatgttttctctaattttttttatagagatgagggttcactatgttgcccaggccggtcttgaactcctgggctcaagtgatcctcccaccttggcctcctaaagtgttgggattacaggcatgagccactgtgcctggtccttatcagttcttatagtgtattttcttgcatgtttgatgtctttctctcccccctctaagaacacaggcaccttgagggtagggacttctgcctttcctagtagccactcattcttgttgattgactgagattcatggtacatcgagcaggataaagttgccaggacctgggtgactgcttggctatagagaatgaggaagtcgtagtcagcagtgaccaccaatttgttcagcttccctgtgttttttttttttgagatggagtctcgcactgtcacccaggctggagtgcagtggcgcaatctcggctcactgcaacctccgcctcccaggttcaaccgattctcctgcctcagcctcccaagtagctgggcttacaggcacctgctaccacacctggctaattttttttgtattttcagtagagatggggtttcactatgttggccaggctggtctcaaactcctgacctcaggtgatccacccacctcagcctcccaaagtgctgggattataggtgtgaaccaccatatctggccacccattatctcttgaacttcatcttcagtttcttcctcttgccttcacttcagccacactggcctccttgttgtttgaccctgactagtacactgtggcctcagggttgttgcaccttctgttcccactgcctagaacttggccatgagtcactcccacacctccttcaagttgtagcttgaatgtcacctcagtgagggatgtattgacctttatctttttgcaattctaacctgccccaagcactctctcctgttctgttttcctgtagtgcttgatactgctaacataatactgaattttcttacctgtttttctcttagaatggggcaggggttttctctgttttattccctgctgtgttcccagtgcctggcacaggacaggtgactgataaatacttatggactgagtggacatttaggacaatcctcatcagctgtgtggcagatggaccacagcaggcaagggtggaaacagggagagaaatcagaaggtcgctgggaccagcctgggcaacaaagggagacctcccctactctacaaagaaactaaaaaaaaatcagccagacagagtgtcacatgcctgtagtcccggctactcagaggctgaggtaggaggattgcgtgagccctggaggctgaggcttcagtgagccatgatcgtgccactgcactccagcctgggcaacagagttgagaccgtttatctggaaacaaaacaaaaaacgttgctgagctggtctagaagacacctaatgagggcttgagttggtcagaggagaggctggatgctgggcacattttggaaacaagcgacagcaccagcagatgggggcaagtccatttgtgtcacaaaagcagactccttggaagcaatggtgggttgttttcttctctccatgtctctttcagggtctgatttgtcccttccttaaaaaaagtgtgtgttggccgggcatggtggctcacgcctgtaatcccagcactttgggaggccgaggcgggcggatcacgaggtcaggaaatcgagaccctcctggctaacacggtgaaaccccgtctctactaaaaatacaaaaaattagccgggcgaggtggcgggcgcctgtagtcccagctactcggaaggctgaggcaggagaatggcgtgaacccgggaggcggagcttgcagtgagccgagatcatgccactgcactccagcctgggcgagagagcaagactccgtctcaaaaaaaaaaaaaaaaagtgtgtgtcctgtgggtctttccaccctgaatcttctcgggcttttctggaagtaagcagtccagctaagtattgagggcatcccctcttctgtcctggtgcagatttcctttttcttggagaaagaaaacgagccccctggcagggagcttactaaggaggaccttttcaagacacacagcgtccctgccacccccaccagcactcctgtgccgaaccctgaggccgagtccagctccaaggaaggagagctggacgccagagacttggaaatgtctaagaaagtcaggcgttcctacagccggctggagaccctgggctctgcctctacctccaccccaggccgccggtcctgctttggcttcgaggggctgctgggggcagaagacttgtccggagtctcgccagtggtgtgctccaaactcaccgaggtccccagggtttgtgcaaagccctgggccccagacatgactctccctggaatctccccaccacccgagaaacagaaacgtaagaagaagaaaatgccagagatcttggtgagtgagaggcaggggtttttctctgccgtgtgctctgggagacgtgcagggctggggctctggctcttttgggggataggcagcacctgcagggtgtgggtgagatgctccagccaccatgttcccttctcactcacctgctcctcatttctcttccctcagaaaacggagctggatgagtgggctgcggccatgaatgccgagtttgaagctgctgagcagtttgatctcctggttgaatgagatgcagtggggggtgcacctggccagactctccctcctgtcctgtacatagccacctccctgtggagaggacacttagggtcccctcccctggtcttgttacctgtgtgtgtgctggtgctgcgcatgaggactgtctgcctttgagggcttgggcagcagcggcagccatcttggttttaggaaatggggccgcctggcccagccactcactggtgtcctgtctcttgtcgtcctgtccttcctatctccccaaagtaccatagccagtttccagatgggccacagactggggaggagaatcagtggcccagccagaagttaaagggctgagggttgaggtgagaggcacctctgctcttgttgggaggggtggctgcttggaaataggcccaggggctctgccagcctcggcctctccctcctgagttgccttctgttggtggctttcttcttgaacccacctgtgtaaagaggttttcagttccgtgggtttcccctttgattctgtaaatagtcccagagagaattcgtgggctgagggcaattctgtcttggaggaagaagctggacattcagcctgtggagtctgagttttgaaggatgtagggagccttagttgggtctcagaccataagtgtgtactacacagaagctgtgttttctagttctggtctgctgttgagatgtttggtaaatgccaggttgatagggcgctggctgcttggagcaaagggtgcatttcagggtgtggccaccaggtgctgtgagtttctgtggctcatggcctctgggctggtcccttgcacagggcccacgctggagtcttaccactctgctgcaggggtggaaggtggcccctcttgtcacccatacccatttcttacaaaataagttacaccgagtctacttggccctagaagagaaagttgaagagtcccagacctactagcattttgcaactatgcttgtaaagtcctcggaaagtttcctcgcgtaccagacagcggcgggggctgatagcaattttagtttttggcctccctatcctctcacatgagaacactgcctggatgcatctcatgatctctggagaatttccccatctttctcttctttccatcgtgtggattcaatagtgtggatttgaaggctgccctgcccccgactctcctgccgcacccctggccattgtaccttttgatgtttagaagttcgtggaagtagacgctgaggtgtgcagaggagctggtggataacagagaatgccagggaagatgagtgctgggtcagggtacttggatgaaacggtgcaggccaggcgggccctaataaaaccctctgccaggtctgggagtcccaggccatctgctcaacgctctgtggtttgtcagacctgcaagcaagccccctgctggggaagcctaggtgtccttgagctgaaccgcactgaagaactcttgtcctcactggctgatgcagcagaactcttgggaaatgtcttagtcctgcagaatcaggagtcaccagatgatgcagagttgagatcatcattgcaaagttctctgttcctgaggaactaaatttaaggaaaaaatgggattttgttttagagttggaaaaaaagcctgattaaagagtttctgcctgtt

SEQ ID NO: 88 - DNA, 10804 bp, Homo sapiens
aggggcgggcccggcgcgcgcgggaagtctctgtagggcggccggctaccctcagccgccgcgcgtcatggccctttcggtgcccggctactcaccgggcttccgaaagccgcccgaggtagtgcggctccgacggaaaagggcccggagccgtggagctgccgcctccccgccccgtgagctgacggagccggcggcccgccgagccgccctggtggcggggctgcctcttcgccctttccctgctgcggggggcagaggcggtggcagcggcggcggcccggccgctgctcggaggaaccccttcgcccgcctggacaaccgaccgcgggtcgccgcggagccccccgacgggccggcccgcgagcagccggaggccccggtcccggtgagtgtcttgtagcctggccgccaaggggctcttgtctttcgtgggttgagccagctgtgaatgggggatggaaagtcctcgcgttcgaggcaaggaaatgggcgcgaagacttcggccgcccgtggccttagggtaccccgccctgggagccgcgattctggcaaggccgggtttgtgggaagagcgctcccctggctaccccgctgcgggctgtgctcacgggacgcgttcccgaggaaagtgagggggccccagagggcagcgaggagccccttggagaggacttagaggtgacttggaaaagagctcgaaaaaccctgagagcccccatcttgcaaggacgctgttcgatggggcaggtgacaagccctgcttcccccgtgatttagggcctcccttctctcacgcactccaaattattctggagatgggggaatgtcgaggattcgtggggtcagaattcactagcatctgtcttacccaaagccttttggatctttcggtttgaaacgccggtccctgttcccctcaattttgatactaaagttcagacacaaaactgaagtgttgaaactcatagattggatggggtgcctctgaatttaggtgtacttgcgtttattgagaaacatgtatgccaggtgaggctctgtacatatttaacgcaaacttcagcatcctttaaattttaaaggagaatatatttaacctcagtttttagattctaatcaagaaaatgatttgctatgggaagagaagtttcctgaaagaacaactgttactgaattacctcaggtaatactttttaaatatcattagaatgtgtatttgtataaacttttttttcataggatttgagcctatttttaaaaatacatttatacttctcagaagcattttgcttggaaagtagttttacagagaggcttgatcatctcaaccagggatgaaaataccgcatcagccaaggtaaaggagttggtttgatacagtaatgatgactgtaaagatagccagcgctaaaataggcctgatagacgtgggggttttcttttactctctaacagtttttaccactcttctttgggcagttgacttctccagttcatcactcagagccagccctcctggcccacctccacaggttgtggcatagcactgaacctcgttgctcctctcccctaacacacacacgtttccattccccaactactaccattgtgctgtgtagtttgataaatgcggtttgtcctaatgggaacaggctagaagagttctccaagacccagtttctcttgtaaataagtgaccttcttatggtctatccaagatagttcccccttctctgatattttattgtgatataaaagaatgcttggccgggcacagtggctcatgtctgtaatcccaacactttgagaggctgaagcaggcggatcacacctgaggtcaggagttcgcgaacagcctggccaatatgacgaaacccccgtctcgactaaaaatacaaaaaaattagccaggcgtggtggggcacgcctgtagtcccaggtactcgggaggacgaggcacgagaatcgcttgatcctaggcggcagaggttggtactgagccgagatcacaccacttcactcagcctaggcgacagagggagactccgtctcaatttaaaaaaaaaaaaattcttgtattgtggagaacgtcgacctgaagcagacaggttgaggggaaatatttgaagtcaggaaatgtttcttaaatatgggctttgttagccctggatgcagagtttcagaagcttaaaagatccaaaatgttttaacacttggaatatttctacttcaatacaaacatctatactaccataaagaactgtaaaaactaaaaagtgaaatctgcccctccaccacccctacccccaacaacaaattcccgcttcccataggtaaccatggttaaaagtttagtgtgactcctttcagacttttttacagtgtgtaatgtatttttcatgttatttattatacagcttatatgatttttacttttcagtgatcatgttagctgataaaatctttaggttgaaggttttttcttgatactcgactaatttttgcattctttgttttctaaagacttcacatgtatcattctccgagcctgatattccgtcctcaaaaagtactgagttacctgtggactggagtattaaaacgcgactccttttcacctcttctcaaccctttacctgggcagatcatttgaaagcacaggaagaagctcaaggtcttgtccagcattgtagggcaacagaagttactttgcctaaaagtatacaggtaactctgaaataaaatagttatgtgttaaagtaacaaattaagtgtgaaatgctctcctttgcaaaatagcagatgctgccttccattaagtttttctttggaaatttaaagatacaaagacaggaagttttgtctttcccagatggtgcttatggtgctttcataccttttttttttttaagtcagattgagtaactgctcatacatttagagacttgtcttgcaaattaatcagtgttgcaggcaagaattgttaaattatttttctctaaggctttttgagaaagaaaatacaaagaaagaagtgaaaagcaattgggtgggattgcaagggctgatggatttacagattttcttacctgtataagaaaaattttatgaattttgtggagtttgtgagttctagaatggttttagagatatacattttgattattttaaagcatcaactcaaaactaggaggctgggcacaatagcccatgcctgtaatctcagcattttgggggctgaggtggggggattgcttgagaccagcctgagtaacgtagtgagaccccatctctacaaaaaaaaaaaaaaaaaaaaattagctgagcatggtggtgggtgcctgtagtcccagctacttgggaggctcaggtaggaggattgtttaagcccaggaggtcaagactgcagtgagctctgattgtgccactgtactctagcctcagtgacagagtgagactatcttaaaaaaatttttttaaagtctcaaactaggttaaaaaggattaccctgaaaaaggtcttggtatattatacatcttttcaataaatagattaggatgatttgtgatttgccgtatcagtgtttactggctacttttaaaacagccttttggagagagggttggatgtagtgttacctacacacacatgcccacccctattcctcatgataaaaaaggtagtcattgtccttaaggatggtagaaacaggaaaatgttcccatctatgtttaaatgttctgatactacggcttaccattacatctggctcaaataaggataaactatgttttcgttcctataacaattattaatgctttcctatagaaagcaataaagattcttagacctaagtgtttggtaaagattgtctttaataaaattctctatttctcaatgggcaaaaactgcccactgtcacctttggattttaggatcccaaactctcctctgagctccgttgtaccttccagcagagccttatctattggctccaccctgctttgtcttggctaccactgttccctcgtattggagctgatagaaaaatggctggaaagacaagtccttggtcaaatgatgcaaccctgcagcatgttttaatgagtgactggtaagattagtaagagaaacttgtataattcaatagtgaattttattttagcagcattctctatcatatttgtgactggatacgttaatggcagaagggtatctagatccttgtgaattttatctgaacctattaataaccaacatataaactgtttactttttttttttttagctgttactcattctttacccaattgtggtagaatgtatataagtgttggttaaatatatacagacaggcaggccgggtgtggtggctcacgcctgtaatcccagcactttgggaggccgaggcaggcggatcacaaggtcaggagattgagaccatcctggctaacacggtgaaaccctgtctctactaaaaatacaaaaaaaattagcctggtgtggtggcgggtgcctatagtcacagctactcgggaggctgaggcaggagaatggcatgaacctgggaggcagagcttgcagtgagccgagatcgcgccactgcactccagcctgggcgacagagcgaaactccgtctcaaaaaaaaaaaaaaagtatatatatatatatatatatatatatatataaacacgcagccctaattctttaatgctacttcttgtcagtctctgcttccttttttagcagcagctcagagaaagtcagcaggcaattctcaattaagttttgtttaaagaaaaaataagtgtttaagtggtatacactatttgttaaagtattgagaagtcatcagcgagtcctcataaccaatttcagtcctttaaagctaagtcatacgtaaccacaaaaattaaaaccattatctaaaatatttgtgttgtgttttaaaccaggtatcaaactgaattattcagaattataaacattgcattaaatgtttaataataccttaagaaaatttttttacttcataggtctgtgagctttacttctctatataatttgctgaagacaaaactttgcccctatttctacgtttgtacctatcagtttactgtcctgttccgagcagcaggattagctggaagtgacttaatcacagctctcatatctccaacaactcgaggtttaagagaagctatgagaaatgaaggtaaaagtttaggtttaaagtgagaatactatactatatagtaaacctattttggcctaaaagctatttaaatttaaaatgccttttaccagttgattagcaacattaagaaatatattatttctttatttctggctttttttccctcccccacaattatttaatccagcagtccgcaaactttttggcactagggatcagtttcatgggcagtgaggaggatggtttcgggatgaaactgttacacatcagatgatcattctttttttttttttttttttttttttgagatggagactcgctctgtcacccaggctagaatgcagtggtgcaatctcggctcactgcaagctccgcctcctgggttcaggccattctcctgcctcagcctcccgagtagctgggactacaggtgcctgcaaccatgcccggctaattttttgtatttttagtagagacggggtttcaccgtgttagccaggacgatctcgatctcctgacctcgtgatccgcccgcctcggcctcccaaagtgctgggcttacaggcgtgagccaccgcgcccggacaagatcatcattcttataaggagggcacaacctagatgcctcacatgcacagttcacagtaggattcgtgcccctgtgagaatctaatgcgaccactgatgtgacaggagatggagctcaggcagtaatgttcactcgacagtcgctcacctcctgctgtgcagcccggtttctaacaggccacaggccagtaccagtccacagtccaggggttggggactcctgatttaaactgttccttccacatagtgttctctgatctctaaaataaaacacatattgggccagatagtcactatctgaatatactcttctagaaattcttctatagtaccaattacccctttaataacaaaattttcaaactgagtaaacccattagtggatcatgaaatctacttaatgggcccaatcagtactttttcaaaaagtgaactggaatacaatatgatttatgaaagagtgttacatgtatgtgttgtttcccgaacctctttcaaggagaatacgttttatgcatgtttgtaggtttgtgaagaaagcttgaaaactctactgccttaatagatcatttgtaaaaactaacatttcaaattttttacactctaaaagtacagcatgcctgttaaatactttaaatgacaactcagttacatttttgttcctcatataggtattgaattttctctgcctttaataaaagaaagtggccataagaaggagacagcatctggaacaagcttgggatatggggagtatgtgattaaaataactttatatcatccactgacttatggactcatgaaatagatttgcacaggaacagcttgtgaaatagggactctaactgtagcaatttcctagggagcaagccatcagtgatgaggatgaagaggaaagtttttcctggctggaagagatgggtgtgcaagataaaattaaaaagccagacatactttctatcaagctgtatcctttcagttgttgttaactagaattaattttcattgaatgacgttagtgagaagtttaacattggcagttttatatgattataatcttaaattatcttcaggtcatattaaaactaattctccattgtaatactaaataagcccctaagtatcaacaaatggtgaactattaaaccttttttaatcaaaacgttcaattatgattgtgggagaataggtgtgttttgactagagaagaaattaggtttaggtgtcagtttgtagcaaattcagattgttaacattttgattgaaacatatgccttatgattcggtaaagagaggtagcaagaggatttccatttcattatggagaaaaggagtctcaggtgattcagaatcaagataactgctttccacattaggtgagatttgcttttgcaatttccttgattgtcatcttcaggcgtaaagagaaacatgaagtacaaatggatcacagacctgaatctgttgtgttggtaaaaggaatcaacacctttacattgctcaattttttgattaactctaagagtttagttgctacctcaggtccacaggcaggacttcctccaaccctcttgtcccctgttgctttccgaggtgccacaatgcaaatgcttaaggtaataaaagtctgcataacctagcttttaagaagtactttactttgataggataaattcttgatttaaaaaaaaacctcctagcatttttacttggtacatattttcattttgctttcctcccattaaaaaaagaaacaaaaattatataagacagttatatcaaagaaattatgtggaaatatataaattatatgaaatcctttttattttcttttcgagatggagtcttgcgctgctatccaggctgaatggagtgcagtggcgtgatctcaactcactgcaacccctgcctcccgggttcaagtgattctcgcgccatgcctcagcctcttgagtagctgggattacaagcacacaccaccaagcctagctattttttttgtttttttttttcttgtttgtttttgtttgtttgttttaagagggagtcccactctgtcaccggctgcagtgcagtggtgcgatctcggctcactgcagcctccaactctggggttcaagcgattcttctgcctcagcctctcgagtagctggggttacaggtgggcaccaccacgcccagctaatttttgtatttttagtatagacggagtttcaccatattggccaggctggtcttgaactcctggcctctttttaaattatacgaacatttattttctttttttggttggggagacagggtcttgctgtagtgcagtggcacagctcactgcagcctcaaccatgtgggctcaagtgaaattcctgcctcagcctctcgagtatcggaccacaggactgccatgccctgctttttttttttttttttttttttttttttttttttttttttgaggtggaatctcactctcacccaggcgtgtgccaccacgcctggctaatttttttttttttttgtattttttgtagagacgggttttcaccatgttggtcagggtggtctcgaactcctgacctcatgatctgccctcggcctcccaaagtgctgggattacaggcatgagccactgcacctggccgccctgcattcattcattcattcattcattcattcatctatctatttagagacggagtcttgctctgtcacccaggctggagagcagtggctcaattttggctcactgcaaactctgcctaacgggctcaagcgattcttcaacctctgcctctggggctcaggtgattcttctgccttagcttcccaagtagctgggactataggctcacaccaccatgcctggctaatttttttgtatttttaatagagacgaggtttcaccatgttggccaggctggtcttgaactcctgacctcaagtgatctgcccaccttggcctcccaaagtgctgggattataatcataataaattatatatgtaaatacaaaatacatgctaaatcttagcaataaaattgaatggattttaaatttttgtttttccaatagtctgcattgacagtgtattactaaatcagataaaatactatatgaaaaaatggtattctctggaatatacttcacctgaaaatctcttaatatggaaaggttgctgaaaatttactaagtatttgtactcacataacattgtttagatgtcttgggaaatagttttattccataattgttaaaagagaggaaaccccaaatggaaatatattgaacatatttttggctaggcaaaaggttgagagatgatcttaattttccttttctttacattttcatgaaggcacggagtgtgaatgtgaagacacaagctctttctggatacagagaccaatttagtttggagattacaggtcctatcatgcctcattctctgcattcactgaccatgctgctcaaatcttcacagagtggatctttctctgcagtactgtatccacacgagccaactgctgtatttaacatctgcctgcaaatggacaaagtacttgatatggtaagtagacacctatgagcagactgttttagttgtagtttcctcaaactagctggagggaaattgagtcatttatgctgagtcactattgtgtttcaagtaattaaactgttacttaattatgaattactagaggaaggaataatgtctgtaagttgtttatgtgaggtagctttcatgaattcagtccaagtacaatttttttttttttttgagatggagtcttgctgttgcccgggctggagtgcagcggcgcgagtctcggctcactgcagccttagcctcctgggttcaaacagttctcctgcctcagcctcccaagtagctgagattacaggcatgtgccaccacatctggctattttttgtatctttattagagacgggggtttcaccatgttggccaggctggtcttgaactcctgacttcaggtgatctgcccaccttggcctcccaaaatgttgggattacaggcttgagccacggcacccggcctcagtccaaatagttttaacagtgactgaagaacttcccattccaaaaaggggcagctttttcatttcctcttgcatccaaaactcaatagtacctgattcctttatagtttaaggaaacaattcactgtgggtatttaaccatatttgcctttaattttgaacatacttaaggtttttagagttagaattaagacctttaaaattgtctcatgcatctcagttggctagacttataaccattaatattttgggattttgtcactacaaaaattcttagcatcaacttctattaataggatgaatcacattaatcagccatttatttgtcagtctccatagtaattatttaactcttctgtgtttaaagactaatgtgctttttactgacttgtacacacatttccacaggaggttgttcataaggagcttactaactgtggtttgcaccctaacactctggagcaacttagtcaaataccgttacttgggaaatcatctttacggaatgtggtgctgagagactacatttataattggagatcctgaacaccaaagtaagcctaaaaggaatctttgaggaaaaaagccttctagcaaggaaattcaagattcttgaagttgaaggaatatactgaaatgtttataaacataacttttactacagtagcatctaaggttttaaatgtgttttactattttcagattagatttttagatataaagatgaaaaactcagataactcaaatgagatatctatatccctacaacctaattgtatattgagcagaaactgaattaatatgcttccttgcaaatgggaaatcacatagcagttaccccatggcattgtgactaatggcatcagggcaaaaatatgttactttacgatttacctgttagcaggttcttgtttcataaaggtagaaaataaatacagacaacatcta

(The sequence listing continues in the following parts.)
